United States Patent Application Publication US 2013/0332133 A1 - sequence listing, part 47

SEQ ID NO: 297664 - DNA, 665 bp, Unknown
  Bacterial polypeptide expressing nucleotide sequence isolated from the Sargasso Sea
catgcacgcatttcgttcgcacacatgcgcagagctcaccgaggccaatgtcggccagcctgtccgcctgtccggatgggtcaatcgcaagcgcgatcacggacagcttgtttttgtcgacctgcgtgaccattacgggctgacccagtgtgttgtcgattcctccgatcccaccttcgtagcggtcgaggcgacacggcttgaatcggtggtgacaataaccggcacggtgctcaagcgcagtgacgacaccatcaataccagcttgccgaccggccatatcgaggtgcggatcgagcagtttgaggtgcagtcggctgctgacacgctgccgctgcaggtcaattcggatgcggattctggcgaagagacgcgtttgcgttatcgctatctcgacctgcgccggtcacgcccgcatgacaacatcatgctgcgcgccaggatcattcagtcgattcgggcccgcatggtgacgcagggctttaccgaattccagacgccgatcctgacggcctcgtcaccagagggcgcgcgcgacttcctggtgccggcacgcttgcatcccggcaagttttatgcgctgccgcaagcgccgcaacagttcaagcagctggtgatggtttctggatttgaccgctatttccagattgcgccatgtttccgcg

SEQ ID NO: 297665 - DNA, 655 bp, Unknown
  Bacterial polypeptide expressing nucleotide sequence isolated from the Sargasso Sea
aagtttttttctgattcgttacaaaaagaaatagtaaaaaatctaagtataaatgatggtgatattttatttatggttggagataaaaaaaatattgtattaaaagcccttggtaacctcagggtcctagttgctcaaagagaagggcttgtaaataaagatgtatttaaaccaatatgggttacagaatttcctatgtttgattatgatgaagataacaataggtatatcgcaatgcaccatccttttactgctcctagagaatctgacatggataagctagatagtgaccctggaaatactcttagtcgcgggtatgatttgactatgaacggccatgaaattgcaggtggctcaattcgtattcattctccaaaaattcaggaaaaagtattttctcttttaggcctaactaatacgcaggctgtagaaaaatttggatttttagttgaagcattacaatatggtgcacctcctcatggaggaatagcatttggttttgataggttagtaatgttgttggcaggaaccgataatattagagatgttattgcatttcccaaaacaacttcagcttcctcattaatggatgatagccctaattatgttgatattaaacagctggatgaattaggattaaaattaaaagattgat

SEQ ID NO: 297666 - DNA, 910 bp, Unknown
  Bacterial polypeptide expressing nucleotide sequence isolated from the Sargasso Sea
tattctgaagaatttagattaaaatatagatttttagatttaagaagaaaaaaaatacatcaaaatataattttaagatctgaagtaatttcatttattagatctgagatggagaaacttggttttttggaatttcaaacacctattttaacatcatcaagcccagaaggggcaagagattttttagttcctagtagattaaacccaggaaaattttatgcattacctcaagctcctcaacaatttaaacaacttataatggtttcaggtttcgataaatactttcaaattgcaccatgttttagagacgaggatgcaagagcagatagaagcccaggagaattctatcaacttgatttagaaatgtcttttgttgaacaagaggatgtttttgatgtcgtagagaaattaatgaccaatgttttcaaaaaattttcaaataaaaaaatgctatataataaatttccaaaaatatcatattcagatgccatgattaagtatggcacagataaacctgatttaagaaatcctataattataaatgaacttactgaaatttttgaaagagatgatgtaagctttgatatttttaaaaaattagtgagcaaaggatctattgttagaggaataattactaaaaaaaccaaagataaacccagaagtttttttgatggtattgataaatgggcaaaaaatcagggagcatctggattagcttactttactattgaaaaagaagacaaaataaaaggaaaaggacctgttggtaagttttttagctcagatgcaatagaaaaaattatgaaaatatcaagtgctgaagtgggcgacagtgtttttttggcatgtggtaaaaaaaaagaagttgaaaatatactttctttagcgagagaaaaaattgcaaatgaat

SEQ ID NO: 297667 - DNA, 697 bp, Unknown
  Bacterial polypeptide expressing nucleotide sequence isolated from the Sargasso Sea
agcaggctctaaaattgttggtaaaggaccaatagcaaaatttttttctgaggcggccttaataaaattgttgaaactttgcaaaattaatcagaaagattcaatattttttgtttgtaataaagaaaaggaggcaataaatttctcaggaattgtaagacaaaaaatcgctgaagatttaaaattaatagacagtaatagttttaaattttgttggattacagattacccaatgtatgaatatgatgaaaaagaaaagaaaatagattttagtcacaatcctttttcaatgccccaaatagagatgaaagattttgacaaaaccgatccacttcagattttggcatatcagtacgatcttgtatgtaacggttatgagctttcatctggtgcaattcgaaaccatattccagattatctttttaaagttttctcaaaggttggttatacagaaaaaatggttaaacaaaatttttctggaatgataaaagcactttcatatggagcaccacctcatggaggcatggctcccggtattgatagaattgttatgctattagcaaatcaaaaaaacataagggaagtaaccttatttcctcttaaccaaaatgctgaagatcttttaatggaggcaccatcagaggcgaatgaaaaacaattaaaagagttacatataaaaactgtaaagaaaaattag

SEQ ID NO: 297668 - DNA, 766 bp, Unknown
  Bacterial polypeptide expressing nucleotide sequence isolated from the Sargasso Sea
tttcaaattgcaccttgttttagagatgaagatggtagagcagataggagcccaggtgagcattatcaactagatattgaaatgtcatttgtggaacaggaggatatttttaaaacagtagaaccaatcttttttaaattattcactgaatttggaaatggtaaatcagtttcaaaagcaccatttaaaaaaattacttataaagattcaatgttgaaatatggaaccgataaaccagacttaagaaatccaattgaaatatttgatgttactgaaattatgcaaagagatgatgtgaaacttgatatttttaagaaattaattaaaacaggatctgtagttagggcgataccagctcctaatagcgcatctaaacctagaagtttttttgatggttataatacttgggcaaaggacgaaggaggaaaaggactaggttatatacaattagaaaaaaataaaggtaagcttgctggaaaaggaccaatagcaaaatttttttctgaagaagcaattaagaaattagcagaaacaatcaatttaaaagaaggtgatgcattatttttttcttgtgataaattaaaaaattcagaaaaaatttcaggactagcaagacaaaagttaggtcaggatcttaatcttatagatttaaataagtttgaattttgttggatagtggattatccaatgtatcaatataatgaaatagataaaaaaattgatttcagtcataaccctttctcaatgcctcaagttaatttaaaag

SEQ ID NO: 297669 - DNA, 735 bp, Unknown
  Bacterial polypeptide expressing nucleotide sequence isolated from the Sargasso Sea
ataattgtaatgagttaagagttaaagatgttaacaataaagtagccttatcaggatggattaataaaaaacgtgatcatgggaacttgttatttattgatctgagagacaattatggcattactcaatgtattattgataaggagaattctggttttgcaactttagaaagaatacaacttgagacagttctaaaaattgaaggcagggtagttaacagatcaagcgaaacaattaataaagatataagcactggtgaaatagaagttaagattagtaattttgaaattttaggaagttgtaaggaattgcctatgcctatttttagtgatcaggaatattctgaagaaataagattgaaatatagatttttggatttaagaagaaaaaaaattcatgaaaatattattttgcgatcaaaagttatctctttcattagaaatgaaatgaacaaacttggttttttagaatatcaaacaccaatattaacttcatcaagtcccgagggtgcgagagattttttagttcctagtagattaaatcctggaaagttttatgctcttcctcaagcgccacaacaatttaaacagctgattatggtttcaggttttgataagtattttcaaattgcaccatgtttcagggatgaggacgctagagcagatagaagtccaggagaattttatcaattagatttagagatgtcctttgttgagcaaggaggatgtatttaat

SEQ ID NO: 297670 - DNA, 828 bp, Unknown
  Bacterial polypeptide expressing nucleotide sequence isolated from the Sargasso Sea
ggcgagtactagggatacctgcaccaaaatcttcaatgcaaccaagaagtttttttgacaacttaaacaattgggcaaaaaaagaaatgaatgcccccggtcttggctatattatttttgaagaaatagacggcatacttactggcaaaggcccaattgcaaagtttataccaagcaatatccaattagaaattgctaaaaaagcaaatttaaactcaggagactcaatattttttgcatgtgacaaaggcaagttagtatatgacattgctgcagcagcaagaaataaaatcggagaaattcttgatcttgtcgaaaaagatgtatttagattttgttggattatagattttccaatgtacgagcaggatagggatacaggtaaaattgattttagtcataacccattttctatgccacaaggtggattagaagcattagaaaatagtgatcctttagatgttctgggatatcaatatgatattgtttgcaatggcatcgaactatcgtctggggcgattaggaatcacatgccagaaattatgtataaagcttttgaaattagcggctacactaaaaaacaagtacaagataaatttgggggaatgattaacgcattttcttatggtgtaccacctcatggtggcatagcacctggaattgacagaatcgtaatgcttcttgctcaagaaaaaaacattagagaggtaattttattccctatgaatcaacaggcggaggatcttatgatgcttgccccagcagaggttgatatgaagacgctggatgagttaagtttaaaactaatacctaacgaaaaaaattaag

SEQ ID NO: 297671 - DNA, 444 bp, Unknown
  Bacterial polypeptide expressing nucleotide sequence isolated from the Sargasso Sea
aaataaaattcaattcagtcacaatcctttttctatgcctcaaagagaaaatagattcattaaacaataaagatccacttgatattaaagcttttcaatatgatatagtttgtaatggggtagaattatcttctggagctattagaaatcataaacctgaaattatgtataaagcatttgaaattgcaggctatgataaagattttgttaataataatttttctggaatgataagtgctttaaaatttggagctccccctcatggtggtagtgcacctggtatagacagaataataatgctattagccaatgaacctaatatacgtgaagttatagcttttcctatgaatcaacaagctatggatttaatgatgaatgctccaaatgaagtagaaaaaaataaattagaagatttgggcttaaaactaattgataaaaattaat

SEQ ID NO: 297672 - DNA, 694 bp, Unknown
  Bacterial polypeptide expressing nucleotide sequence isolated from the Sargasso Sea
tgaaaatgggattgatggcctacagtcaccaatacttaaatttttaaatgactctgtgatcaatcaactgattgagaaactctcattggaaaatggtgatactgtattttttggagctgataagaaagatatcgtgaatgcttctctgggtgctctccgagtaaaaatggcagaggattttggtttaatcagagatggatggtttcctctttgggtcactgactttccgatgtttcattgggatgagaaagagaaaagatggtcctctgagcatcatccattcacctcaccagtaaatttggacccagaggaactaaaaaataatccaaaagatgcgttatcaaaaggctatgacatggtactcaatggccatgaaattggcggcggatctattcgtattcattctgaagcaatgcaacaagctgttttttcaatacttggaataaatgaagaagaagcagatgaaaaatttggttttttccttgaagcactaaagtatggatgcccgcctcatggtggaattgcatttggaattgacagaatcgttatgctgatgacaggatcttccagcatcagggatgtcatcgcatttccaaagacacaaactgcaagctgcctactcactgatgcaccaagccttgctggcaaagcacaattaaatgaattgggtatatccgtcaaaaagaaaagctaa

SEQ ID NO: 297673 - DNA, 813 bp, Unknown
  Bacterial polypeptide expressing nucleotide sequence isolated from the Sargasso Sea
gatagatcccctaccgacttttatcagctggatatagaaatgtcttttgttgagcaacatgatgtatttcgattgatagaaaaagtatttgttaaactctttgaaaatttctcggatggttacatggtcaataacaagttcccaattattagttttgcccaatccattgagtggtacggcactgacaaaccagatttaagaaatccaataaagatgatggatgtttcagaatttttcgtatcgtccggatttaaaatattttctgacattttgacaaaggatggaacacagattaaagcaataccagcaaagggtggcggtagtaggaaattttgtgacagaatgaataagtttgcacaagagcaaggattgccgggtatgggatatatcttttggcggtcggatgataatggtgagttagaagcagctggcccaattgcaaaaaacttaggcaaggaaaagacagaagcaataagaaattttattgggcttgaaaaaggagatgctgcctttttcttgggaggcgtacctaatcatttcaatgatattgctggcaagtctagagatatcgtagggcttgagttagggattacaaattcaaattcttacgagttttgttggattaccgatttcccaatgtatgaaatagataaagaaaccaaaaaaattgagttttcgcataaccctttttcaatgcccaaggtggacctgttggatgaagatatcgatccattaagcgtattaggaatgcagtatgatttatcgtgtaacggatatgagattttgtctggcgcgattagaaatcataaactc

SEQ ID NO: 297674 - DNA, 814 bp, Unknown
  Bacterial polypeptide expressing nucleotide sequence isolated from the Sargasso Sea
catgcctgtttttggtgaacaaaattatcctgaagaaacaagattaaaatatagattcatagatttacgtagagcagaaatgcatgaaaatattgttttaagatcaaaagttatttcatttataagaaataaaatgttaggagagggttttttagaatttcaaactcctatattgaccgcctcaagtccagaaggtgctcgagattttttagttccaagcagaacacaccatggaaaattttatgcactaccacaagctccacaacaatttaaacaaatggttatgacctcaggttttgataaatattttcagatagctccatgttttagagatgaagatggtagagcagacagaagccctggagaacactatcagcttgatatagaaatgtcttttgtagaacaagaagatatttttaaaactgtagagcctatttttttaaaactattcactgaatttggtaaaggaaaaactgtttcaaaacctccatttaaaaaaattacttacaaaacttctatgcttaaatatggaacagataaacctgatttaagaaatccaatagaaatatttgatgttactgaaattatgaaaagaaaagatgttaagctagatatttttaaaaaactaattgaaaaaggtggggttgttagagcgataccagccccaaatacatcttctaaacccagaagtttttttgacggatataataattgggcaaaaagaagaaggagcaaaaggcctaggatatattattttagaaaaaaacggtggaaaattagcaggaaaaggacctataggaaaatttttttctga

SEQ ID NO: 297675 - DNA, 622 bp, Unknown
  Bacterial polypeptide expressing nucleotide sequence isolated from the Sargasso Sea
aagagttatttctgaaaaaatttcttcaaaacctggagatataatttttattatgtctggagaatacaaaaaaacacttgaacaattaggctctcttagagttgaattagcaagtaagtttaatttaattgatcaagaaaaaatttgtcctttatgggtaactgactttcctttatttgagtgggacgaagaagaaaaaagattcttttcaatgcatcacccttttacctcaccaaaaccagagttcctagatattcttgataaagagcccgaaaaagttattgcaaatgcatacgatttagtcttaaatggcaatgagattggtggtggttcaattagaattcatgattttgacacacaaatgaaagtttttgaattattaggcatgagtaaagaagaatatacaagtcagtttggttttttaattgaggccttgaagtatggtgctccaccccatggaggtattgcctttggacttgacagactcgctgcagttcttaaaggaaaagatgtaattagagacttcattgctttccctaaaaataatagtggaaaagacttaatgattgatgctccatcaaaattaactaaagagcagttaaaagatttatcacaaaaatag

SEQ ID NO: 297676 - DNA, 716 bp, Unknown
  Bacterial polypeptide expressing nucleotide sequence isolated from the Sargasso Sea
attgagcaaatatagaacacatacttgtaacgaattaagaaaagaagacgtagataaaaaagtatttctttcaggctggatcaataaaaaaagagatcatggcaacttattattcatagatttaagagataattatggtgtcacacagtgtattatagataaagataataaaaattttacaaacttagaaaaaactcaattagaaactgtagttaaaatcgaaggtaaggttgtagctcgatctgatgatacaattaacaatgatataggcacaggagaaattgaggtaacaattgatacttacgaagaattaggttcttgcaaagaattgccaatgccagttttcattgatcaagaatatgctgaggaaataagattaaaatatagatttttggatttaagaagaaaaaaaatacatgaaaatataatcttgagatcaaaagttatttcacacattagaaatgagatgactaaattaggttttttggaattccaaacaccaatactaacatcctctagtcctgaaggtgctagagattttttagttccaagtagattaaatccagggaagttttatgcattacctcaagcgccacaacaatttaaacaactaattatggtatctggttttgataaatatttccaaatagccccttgctttagggatgaggatgcaagagcagacagaagtccaggtgaattttaccaattagatt

SEQ ID NO: 297677 - DNA, 712 bp, Unknown
  Bacterial polypeptide expressing nucleotide sequence isolated from the Sargasso Sea
ttagcatattttacaattgataaagaaaaaaattattatgctaaaggccccgtaggaaaatttttttcctcagaatcaattgaaagaattatgaaaatatcttcagcaaaagaaggtgatagtatatttttagcttgtggaaaaaaatctgaagtagaaaagattctatccttagcaagaaataaaatagctaatgatttaaacttagttgataatgattcttttgcattttgttggattgtagattacccaatgtttgaattagatgaaaaaacaaataaagttatttttagtcacaatcccttttcaatgccacaaggagacttgaataatctaaatttatctaaacctcttgagattaaagcatatcaatacgatatagtttgtaatggtgtagaattatcttccggagctataaggaatcatattcctgatttaatgtataagctattcaaaattgcaggatatgaaagcaaaattgttgacgagaagtttagtggaatgataaatgctttaagttatggtgctccccctcatggaggaattgctcctggaattgatagaatagtaatgttgcttgcagatgaaaagaatataagagaagtaaccatgtttcctatgaatcaacacgcccaggatttgatgatgaatgcaccttccgaggtaacagaagagcaattaaaggaattaaatttaaaaattaagaaataat

SEQ ID NO: 297678 - DNA, 919 bp, Unknown
  Bacterial polypeptide expressing nucleotide sequence isolated from the Sargasso Sea
gaagatctaagagcagatagacaacctgaatttactcagattgattgtgagatgtcctttgttaatgagtctgatgttctggaacaatttgaaggtttgatcttacatttattaaaaaagtttgggaaaacagtaaaggcttttccaaaacttacatacaaagatgccatagaaaattatggtacagataaaccagatttaagatttgatatgaaaatcaatgaaattactgataatgttatgggtaaagattttaacatctttgataaagctgaatacataggatgtctggttctaaacgataaagctgaattatctagaaaagaaattgacgaacttactgaatgggtaaaaaggccacaagttggagcaaatggtattttatggattaagaataatgctgatggttctattaaatcatcttttgataaattttttacctctgatgatttaacaagtctaacaaaagatattggaagtaagtcaggagatcttatacttataatggctggaacaaaaaaagaaactcttgagcatcttggaacacttagagtagagataggtaagagatatgactttataaattttgacttgttttgcccagcttgggtaacagattttcctctttttgaatatgatgaggaagaaaaaaagtttaagtcaatgcatcatccttttacatctcctaacaaggaaagtttaggtcatttagattcagaccctgaaaaagttattgccaatgcatatgaccttgtattaaatggaaatgaaattgggggtggttcaattagaattcatgactacaacacccaaatgaaaatatttgagattcttggaatgtcaaaaaaggaatatgagagtcaatttggatttttaattgaagctcttaagtatggggcacctcctcatggtgggatag

SEQ ID NO: 297679 - DNA, 400 bp, Unknown
  Bacterial polypeptide expressing nucleotide sequence isolated from the Sargasso Sea
cgcaaggagatttatcaaatataaacttttcaaaccattagaaataaaagcttatcaatatgatatagtatgtaatggaatagaactttcttctggtgctattagaaatcataaaccagacctgatgtataaattattttcagtcgttggatattcaaaattggaagtacaaaaaaaatttaaaggaatgatcaatgcactaaattacggtgcgcccccacatggaggtattgcacctggtctagatagaattgtaatgttgttagctaatgaaaaaaatataagagaagttactttatttccaatgaatcaaaatgctcaagatttaatgatggatgcaccatctgaaattaatgagagccaattgaaagagcttggattacaaattaaaaaaaaatag

SEQ ID NO: 297680 - DNA, 881 bp, Unknown
  Bacterial polypeptide expressing nucleotide sequence isolated from the Sargasso Sea
tcagcgcaccaagatcgtggcctcgatgcggtcggccatggccgatgccggcttcggcgagtattcgacgccgatcctgacggcgtcgtcgcccgaaggcgcgcgcgacttcctggtgccgagccgcatccatcagggcaagttttacgccctgccgcaggccccgcagcagtacaagcagcttctgatggtcgccggtttcgaccgctatttccagatcgcgccgtgcttccgcgacgaggacccgcgcgccgaccgtctgccgggcgagttctatcagctcgacgtcgagatgagctttgtcacccaggaagacgtctgggaaaccatggaaccggtgatgaccggcgtcttcgagaaattcgccgacggcaagccggtgaccaaaaagtggccgcgcattccctatgacgaggcgatccgcaaatatggttccgacaagccggacctcaggaacccgatcgtgatggaagcggtcaccgaacacttcgccggctccggcttcaaggtcttcgccggcatgatcgagaagaaccccaaggtcgaggtctgggcgatcccggccaagaccggcggctcccgcgccttctgcgaccggatgaactcctgggcgcagggccagggccagccggggttgggttacatcttctggcgcaaggaaggcgagagcctcgacggcgcgggaccgcttgccaagaacatcggcccggagcgcaccgaggcgatccgcgcgcagcttggcctcgacgagggcgatgcctgcttcttcgtcgcgggcgaaccgtcgaagttctacaagttcgccggtgaagcccgcacgcgcgtcggcgatgagctgggcctgaccgacaaggaccggttcgagctctgctggatcgtcg

SEQ ID NO: 297681 - DNA, 795 bp, Unknown
  Bacterial polypeptide expressing nucleotide sequence isolated from the Sargasso Sea
gagcgaccgcattaaattacgtgctaaagcaagcagctttgtacgtcgctttttagatgaaaatggctttttagatatcgaaacgccagtactaactaaagcaacgccagaaggtgctcgcgattacttagtaccaagtcgtgtacacaaaggtagcttttacgcattaccgcagtcgccacagttatttaagcaattgttgatgatgtcgggttttgaccgttactaccaaattgttaaatgtttccgtgatgaagacttacgtgctgaccgtcaacctgaatttactcaaatagatttagaaacctcgttcatgagctctgatcaagtacgtggtatgacagaaaagatgatccgtgaaatgtggcagtcattactaaatgttgatttaggtgatttcccaattatgccttactctgaggcaatgagcttatatggttctgataagccagacttacgtaacccaatgaagctaattgatgtagccgatttagtaaaagacgtagagtttaaagtattctcaggcccagcaaatgatgaaaaaggccgtgttgcagtgctaactgttccaggtggtgcatcactttctcgtaagcaactagatgactacactaagtttatcggtatttacggtgctaaaggtttagcatggatgaaagtaaatgaccgcgatgcaggcgttgagggcgtgcaatcgccaatcgctaaattcttaaatgaagatgtgatcacgcagttacttgaacgtactaatgcacaaacaggcgatatcattttatttggtgcggataaacg

SEQ ID NO: 297682 - DNA, 841 bp, Unknown
  Bacterial polypeptide expressing nucleotide sequence isolated from the Sargasso Sea
agagcagatagaagtccaggagaattttatcaacttgatattgaaatgtcttttgtggaacaggatgatgtttttatagttgttgagaaactaatgttgcttctatttaaaaaattttctacaaaaaaaatattatttgaaaaatttccaagaataacatttaaagacgcattgcttaaatatggaactgacaaacctgatttaagaaatccactagaaatatgtgatctaacatcaatattcacaagaaaagatgtaaaatttgaaatttttaaaaagttagtaaaatctggatcaatcgtaagagcaataaaaaccacaaacacaaaagataaacctagaagtttttttgatggaattgataagtgggcaaaagatcaaggtgcatcaggtatggcctattttaccattgaaaatgataaagagattacagcaaaaggtccagtgggaaaatttttttcagaagatgctattaaagaaattatgaaaatcatgaacgcaaatattggagatagtattttcttttcatgcgataaagagaaagaggtgttaaaattaatttcatcggcaagagataaaattgcacaagaactaaatttaattaatgaggatagctttgctttttgttggattgttgactaccctatgttcgaaatcgacgaaaatacaaaaaaaatccaatttagccacaatcctttttcaatgccacaaggagatttatcaaagataaacttttcaaatccattggaaataaaagcttatcaatatgatattgtatgtaatggaatagaactttcctctggcgctataagaaatcataaaccagacttaatgtataaat

SEQ ID NO: 297683 - DNA, 805 bp, Unknown
  Bacterial polypeptide expressing nucleotide sequence isolated from the Sargasso Sea
tgatgaaaccttagataaattcgaagtattaaattggcatgatgctatggaagaatatggttgtgataagcctgatttaagaatacctcttaaacttattgaaatatctgatttagtaaaagatgaagaatttaaagtatttgctgagcctgctaaagaccaaaattccagagtagttgcaatgagggtttcaaatggaaactccttatcaagaggacaaatcgatgattacacaaaatttgtttcaaaacttggagctaaaggcctggcgtatataaaaataaatgatgttaaagatttagagaatggtattcagtcacctattctcaagtttttaaaaagtgagacaatctcaaatattgtagatgttttaaaagttaaaactgatgatctaattttctttggtgctggacctcaatcagtagtaaatttgtcaatgagcagtttaataaagaagttaggagaagatcttaatctttatagctcaaaatgggctccttgttggattgttaattttcctatgtttgaggaaaatgctgaaggagacttaactccactccatcatccgtttactttacctcaatgttctaaaaaagaattattagaagatccaaaaaaatctattgctcatgcttatgatgttgttctgaatggatatgagataggaggaggttcgctaaggatttttgataaagatatgcagcaaagtatatttagtattttaaatatttctaaagaagaagctgataaaaaatttggctttttattaaaagccctttcttcaggatgtcctcctcatggaggt

SEQ ID NO: 297684 - DNA, 529 bp, Unknown
  Bacterial polypeptide expressing nucleotide sequence isolated from the Sargasso Sea
ctgattccagaaaatgagttccgttttgtctgggttaccgattttccactctttgaatacagcgagtcagaaaaacgttttgtttcaagtcaccatcctttcaccatgcccaacctcgaagatcttgaagcatatggacaggatcagcctgagcgtattcgctccagggcttatgatatcaccctcaatggagtagaaatcggcggaggcagtatccgtattcatcggggtgatatacaggatcaggtctttaaattgttgaaacttgaagaagatgaaattgaaagcaaattcggttttctgatgaaagccctttcctacggagcaccaccccatggcggaattgcccttggctttgaccggatcatgatgtttttactgaataccgaatcgatccgggatgtcattgcctttcccaaaacccaaagggcttcctgccttatgaccgaagcgccctcgaatgtttccgaggaccagctcgaggaacttcagctcaggatccgtacttctgcggccaagcagaactgag

SEQ ID NO: 297685 - DNA, 754 bp, Unknown
  Bacterial polypeptide expressing nucleotide sequence isolated from the Sargasso Sea
gatttaagagataattttggaattactcaatgcgttatagacaaaagtaatgaaatttttaagaaaattgaaaaactttctttggaaacagtaattaaaattactggaattgttattgagagatcaaatgaaacaataaataaaaatatttctacaggtgaaatagaggtcaaaattaataatattgacattcttggcgcaactaaagaattgccaatgccagttttttcagatcaagaatatgctgaggaaataagactcaagtatagatttttagatttaagaagaaaaaaaatacatcaaaatattatcttaagatcaaaagtaatctcatttattagaaatgagatgcaaaaacttggttttttagaatttcaaacccccatattaacctcctctagtcctgaaggcgcaagagattttcttgttccaagtagattaaatcctggaaaattttatgccttaccacaagcaccccaacaatttaagcaacttataatggtttctgggttcgacaaatattttcaaatagcaccatgtttcagagacgaggatgcaagagcagatagaagcccaggagaattttatcaattagatgttgaaatgtcttttgttgaacaagaagacgtttttgatgtgatagaaactttatttttaaaattatttaaatcatttagtagcaaaaaaatccttcatgaaaagtttccaagaatttcatatgaagatgcaatgcttaaatatggatcggacaaac

SEQ ID NO: 297686 - DNA, 883 bp, Unknown
  Bacterial polypeptide expressing nucleotide sequence isolated from the Sargasso Sea
agattttcttgttccttcacgaaaacaaaatggggccttctacgcattgccgcagtcaccacaaatgtataaacaattattcatggtttcaggttttgataaatactatcaaattgctaagtgttatagagatgaagattctagaaaagatagacagccagagtttactcaacttgatttagaaatatcgaatggatcccctgaaatcgtaagggaaattactgaatctattgtaaaaaatcttttaactgacgtttatgaattagaagtagaaataccttttattgaaatgacttatgatgaagctataaataaatatggtacagataaacctgatcttagaataaaaaatacaattcaagagtttacaaatatctttaaaaatactgaaattaaatttataaagtcagcaatagaaagtaatggatttgtaaaaggatttgttacagaagaaattttatctagatcacaaatagatgaattagatgaaatagtaaaagacaatggtagcaatggtcttggttggttcaagattgataagaatgaagttagtggtccgttatctaagattattactgatgatgaaaaaaatgacatattacaacttggtgaaggaatgctcatttttcaatcgggcacaaaagaaatatacccaattcttgatattttaagaagatcaatattcaaacctgatgatacgttaaattttttatggatttacgattttccttattttgaaacagaagatggtgaaatacagccatcacatcatccttttacagcaccaaaagatgttgatagctttgtagaagacccttcttcttcaaaagcattacattatgatttagtccttaatggatctgaactaggttcgggtcacaaa

SEQ ID NO: 297687 - DNA, 324 bp, Unknown
  Bacterial polypeptide expressing nucleotide sequence isolated from the Sargasso Sea
gtggaagtattaggatacataaaaaagaattacaggaagaagtattttctattctaggttactcaaaagatgaaactaacgaattatttgctcaacttttaaattcttttgagtatggagcgcctcctcatggtgggattgctcctggaattgacaggatagtcatgcttcttagcggaacagaaaatatcagagatgttattgcatttccaaagactcaaagtggttttgacccattatttgaatctccaagtgaattaacttctgagcagctagctgaattaggtataactattaaaaaaccagaaaataatttgaattaac

SEQ ID NO: 297688 - DNA, 796 bp, Unknown
  Bacterial polypeptide expressing nucleotide sequence isolated from the Sargasso Sea
tttgagagataattttggaattacacaatgtgttatagagaaaagtaatgaaatttttaggaaaattgaaaaactttctttagaaacggtaataaaaattacaggaatagttattgagagatcagatgaaacaataaataaaaatatttctactggagaaatagaagtcaaaataaacaatattgatatacttggtgaaactaaggaattaccaatgccagttttttctgatcaagaatattctgaggaaattaggcttaagtataggtttttagatttaagaagaaaaaaaatacatgaaaatattattttaagatctaaagtaatatcattcattagaaacgaaatgcaaaaacaaggttttttagaatttcaaacccccatattaacttcttctagtcccgaaggtgcaagagatttccttgttcctagcagattaaatcctggtaaattttatgctttgccacaagcacctcaacaatttaagcaactcataatggtttctgggtttgacaaatattttcaaatagcaccctgctttagagatgaagatgcaagagcagatagaagtcctggcgaattttatcaattagacatggaaatgtcatttgtcgaacaagaagatgtatttgatgtaatcgagactttatttttaaaattattcaaaacatttagtaataaaaaaatccttcatgaaaaatttccaagaatttcatatgaagatgcattacttaaatatggctcagataaacctgactttagaaatccattagaaatttcagatttaacaaatatt

SEQ ID NO: 297689 - DNA, 850 bp, Unknown
  Bacterial polypeptide expressing nucleotide sequence isolated from the Sargasso Sea
atttaagagatattatggtttgacacaatgcgtaatagaaaacaataacatatatttttctattattgaaaacattaaacctgagtcagtcttaactatatctggatctgttgtaaaaagagaaaaaggtacagaaaacctacaactgaaaactggcaaaatagaaattaatattaaagaaattaaaattttatctgaagctaaagatttacctatgcctgtatttggtgaacaagattatccggaagatataagattaaagtatagatttctagatttaagaagagaagaaatgcataagaatattattcttaggtctaatattatttcatttataagaacagagatgattaaacttggtttcctagagtatcaaactccaattttaacttcttcaagtccagaaggtgctagagattttttagttccaagcagattgaacccaggaaaattttatgctttacctcaagcccctcagcaatttaaacaattaattatggtatcaggatttgataaatactttcaaatagctccttgctttagagatgaagatgctagagctgacagaagtccaggtgaattttatcaacttgatatagagatgtcgtttgttcatcaagaggatgtttttttggttttagaaaaattaatgataaatttgtttgaaaagttctcatcaatcaagattaaagataaaaaatttcctcaaattacttttcaagaagccatgttaaaatatggtacagataaacccgatttaagaaatcccttaattataaaagatataacaagtatttttaaaagagacgatgtaaaatttgatatatttaaaaaattggtaaacactggt

SEQ ID NO: 297690 - DNA, 848 bp, Unknown
  Bacterial polypeptide expressing nucleotide sequence isolated from the Sargasso Sea
cataagtgacttaacttcaatttttgaaaggcaagatgtaaaatttgatatttttaaaaaattagttaaatctggctctattgtaagagcaataataacaaaaaacacagaagataaaccaagaagtttttttgatggtattgataaatgggctaaagaacaaggcgcatcaggacttgcatatttcacttttgaaggagataaaaatatttcagccaaaggtcctgtaggtaaatttttttctgaggaatccttaaaagaaataatgaaaattactggagcaaaattgggagatagtatattttttgtatgtaataaagaaaatgaagttctaaagtttatatcattagcaagagataaaattgcaaatgatttaaatttaattgatcaaaatacttttgcattttgttgggtcgttgattatcctatatttgaaattgatgaaaaaacaaaaaagataaagtttagccataatccattttcaatgcctcaaggagatgaaaaaaaaatagacttttcaaagcctttagaaatgaaagcttatcaatatgatattgtgtgtaatggtgtagagttatcttcaggtgcaattagaaatcataaaccagatttaatgtataaattattttctatagcaggttatacaaaaaaagacgtcgataataagtttaaaggaatgatcaatgcattaagctatggagccccacctcacggaggcatagccccaggagttgatagaattgttatgttattatcaaatgagaaaaatataagagaagttactttatttccaaatgaatcaaaatgctcaagatttaatgatgaactcaccttccgaagtaagtgaa

SEQ ID NO: 297691 - DNA, 292 bp, Unknown
  Bacterial polypeptide expressing nucleotide sequence isolated from the Sargasso Sea
taaaccagaaattatgtacaaagcctttgatatagctggatattctaaagaagatttagaagaaaaattttcaggaatgcttaatgctcttaagtttggagcacctcctcacggaggtagtgcaccaggtattgatagaattgttatgttacttgctgatgagccaaacattagagaagtaatagcatttccaatgaatcaacaagctatggatttaatgatggacgcccctgcaagtattgataaagaaagattagaagaattaggtataaaattaatagataaaaattaa

SEQ ID NO: 297692 - DNA, 634 bp, Unknown
  Bacterial polypeptide expressing nucleotide sequence isolated from the Sargasso Sea
cattctaaaataacaaaaaagcttaatatggataatggtgatatcctttttattattggtgacgatataaaaacaacgcaattatcattaggtgcgctacgtattgcaattgctaaaaaagaagagtatgcaaaatcaaatgattttaaacctgtatggattacagattttcctatgtttgagtataaccaagaggacaaacgttatcattcgctacaacatccttttacacaaccaaaatcaaatgacctagagaaactaaaatcttcaccagagtctataccatcaaagcaatacgatttaataattaatggctatgaggtggctggtggttctgttaggattcataattctgatatgcagaaagtaatttttgatatacttggtattgatcgtaaagaagccaatgaaagatttgggttttttatagatgcgctcaaatatggaacgcctccgcatggtggtatagcatttggatttgatagattagttatgttgctagctggtactaataatatcagagatgttattgcattcccaaaaacaacatcggcaatgtcacttatggatggtgcgccaagccctgtttcaaaaactcaaatgaaagaactaggaattcaaattaaaaaatgat

SEQ ID NO: 297693 - DNA, 867 bp, Unknown
  Bacterial polypeptide expressing nucleotide sequence isolated from the Sargasso Sea
tcatttgtttcaactgaagatataattaaaattggagaagatttagttatatctttgctatcaaaatttacagattacaaaaagacctctgttcccagaatttcatatgttaaatccatagagatgtatggatgcgataaacccgatcttaggattcctttgcaattaaaagatattgctgagattgtaaaggatgaagaatttaaagtattttctggtccagcaaatgaccatgaatccagagtagttgcactgaaagtacctgatgctgcttcaatgacaagaaaaaaaattgatcactatactgactatgttggtaagttaggagcgaagggcttagcatatatcaaagtacttgagcttgattcagataacggactgcaatcacctattttaaaatttttaaaaaaagaaacagttgattcaattcttagtgctttagatgcaaaaaataatgacattattttttttggggccggaaaggcaaaaattgtcaatttatcgatgagctcattaattaaaagtatcggagaggatatgaatttaataacttcttcttgggcgccatgttggattgttgattttccaatgttcgagagaaataaagataataatttgacttcactgcatcacccttttactttgccagctgtctcagtaagtgaattaaaggatgatccagataaagcgttggcttgtgcttatgattttgtgttgaatggatatgagctcggaggtgggtctttgagagtttatgaaccctccatgcaaaaagagatctttagtatattgggaatttctaacgaagaagccaatgagaaatttggattcttattatcagccttgtcttcaggatgtcctcctcat

SEQ ID NO: 297694 - DNA, 788 bp, Unknown
  Bacterial polypeptide expressing nucleotide sequence isolated from the Sargasso Sea
attgaataaatatagaactcataattgtagcgaactaaataaaactaataaaaaccagagcgttgtattgtccggttggattaataagaaacgtgatcatggaaatttactatttattgacttgagagataattatggactaacacaatgtgttgtagataaaagcaatgaatcatttaaagagctggaaaaaattcagcttgaaactgtagtaaaaattattggaaaagtagtcgagcgaagtaaagatactattaacccagaacttaagacgggtgaagttgaggtaaatataaacgaatttgaaattttaggacattgtaaagaattacctatgccagtttttagtgaccaagagtatgcagaagaaatcagattaaaatatagatttttagatttaagaagaaaaaaaattcatcaaaatataattttaagatctgaagtcatttcttttataagaaatgaaatgacaaaattaggttttttagaatttcaaactcccattttaacctcatcaagtccagaaggtgctagggattttttagttcccagcagattaaatcctggaaaattttatgctttaccacaagctccacagcaatttaaacaactaataatggtttcaggttttgataaatattttcaaattgcgccatgttttagagatgaagatgctagagctgatcgaagtccaggagaattttatcaattagacttggaaatgtcttttgtagaacaagaagacgtatttaaagtagttgaaaaattattaataaatctatttaaaa

SEQ ID NO: 297695 - DNA, 650 bp, Unknown
  Bacterial polypeptide expressing nucleotide sequence isolated from the Sargasso Sea
cagccgcaccggagcccaaccgggcagcttgatcctttttggcgcaggcgataccgccacggtgaacaaggccctcgatcgagtgcgccaatacctggccaaagagctggagatggtgccggctgaggcctggaacttcctctgggtggtggattttccaatgttcgaattcaacgccgatgaaaaccggcttgaagcgctgcatcacccgttctgcgctgccaaccccgaggaccttggcgacgatccaacccaatggagcgaacggctacccaaggcccgcgcccaggcctacgacctggtgctcaatggcctggaactcggtggtggctcgctgcgcatccacgatgcagcgctgcaaaaccaagtgctgcaaaccatcggcctggcacaagaggaagcccaagagcaattcggtttcctgctcgaagccctggaaatgggtgcccctccccatggcggcatcgcctttggcctcgaccggatggtgatgctcctggcaggcgaggaatccatccgcgacaccatcgctttccccaagacacagcaggcccgctgcctgatgacatcagcaccaggcggtgccagcgacaagcaactcgaggaattgcacgtagcgagcacctgggtggaaccggaagaaaactgaa

SEQ ID NO: 297696 - DNA, 821 bp, Unknown
  Bacterial polypeptide expressing nucleotide sequence isolated from the Sargasso Sea
agcagatccagatagtcccgttttttcagaggtagaaaaaattaaacaggagtggtgcgtatgtgtagagggagaagtaagaaaaagggaagatggtctaattaactctaagatagagaccggggaaattgaggtatttgttaaaaaaatttcagttttaggacagtctgaagagttaccgctaccggtttttggagatcttacttacccagaagaaaccagacttaagtataggtttctagaccttcgaaaagaaacaatacacaaaaacatgattttaagatcgaagataattgagtttattagaaaagaaatgtggaaattagatttcaatgaatttcaaacaccgattatcacctcttcgtctcctgaaggtgctagggattttttaataccctcgagattacacccaggtcagttttatgctcttcctcaagcgcctcagatttataaacagcttattatggtagctggattcgacaaatatttccagatagctccttgttttagagacgaagatccgaggtcagataggtcaccaacagatttctatcaactggatgtagaaatgtcattcgtaagtcaagaagatgtcttcgaacttatagaaaaagtttttgtcaaactatttgaaaaattttctggaggatacagtgttaacactaaatttcctataattagttacaaagaggctcttaattggtttggaacagataaaccagacttgagaaatcctataaaaatggttgatgtttcgaatttttttgtttcgtccggctttaaaatattttctgatttattaaagaagaacggcaatgaaa

SEQ ID NO: 297697 - DNA, 884 bp, Unknown
  Bacterial polypeptide expressing nucleotide sequence isolated from the Sargasso Sea
ttctggaaaaaatacttttgaattagcaaaaaaatgtgggccattgtatgtgattaaaattcaaggagaagtttttgaaagactttctaaaaatcctcaccttgatacaggtgatatagaaataaaggtttctgaaatggaattcttaaataaatcagatgtcccaccatttactatagaagatgaaacagacggaggagaagatttaagaatgaaatatcgatatctagatttaagaagatctccgctcaaagagaatataattcttagacatagcctaatgcaggaaacaagaaattatcttaattctaagaattttctagaaattgaaacaccagtattgattaaatccacacccgagggagcaagagatttcatagttccttcaagaatgaattcaggagagttttatgctttacctcaatctcctcagacatttaagcaactgctaatggtgtctggatttgataaatattatcagttagttaaatgttttagagatgaagatttaagagcagatagacaacctgagtttacacagatagattgtgaaatgtcatttgttaatagagaagacatattagaaaattttggaggccttataactcgattatttaaaaatatattaaataaggatttaggtgaaatacctattatggagtatgatgaagcaattaaattatatggatctgataaaccagatttaaggtttgggatgaaattcaatgatttaacttcaaatgttaaaggaaaaggatttaaagtttttgatgattctgaagtgattttgtcaattaatgtagaaggatgcagtaattactcaagaaaacagatagatgaacttactgaatttgtgaaaacacctcaaattggctctaagggtt

SEQ ID NO: 297698 - DNA, 856 bp, Unknown
  Bacterial polypeptide expressing nucleotide sequence isolated from the Sargasso Sea
acataaaaatattttacttagaaataaagtgatttttgagattagaaaaaaaatgaatgaaagaggatttattgagtttcaaacaccgatattaacatcttcttctccagaaggtgctagagattatcttgtcccttctagaattcatcaagggaaattttatgcattacctcaagcacctcaacaatttaaacaattattaatgattgctggatttgatagatatttccagatagccccatgttttagagatgaggatagtagagctgatagatctccaggtgaattctatcaactagattttgaaatgagttttgtaactcaggaagatgtatttgaagctattgagccagtgttgtttgagatatttgaagaaaataagaaaaataatgaaataaaagtaagttcctatccatttagaagaataccatacaatgaatcaatggaagtttatggttctgacaagcctgatttacgaaatccacttgttatagatgattacacaaatgtatttaaagattcaaattttaaaatatttagtaatcaaatagaaaaaggatcagttgttaagggaataattgttaaaaatactggcgatcaacctagaagtttttttgataaattaaataactgggcaagagaagagggggcagctggattaggctatatttcatttgtacaaaatagtttcaaaggacctatagctaagaatttaaatgaagatcaattattattatttaaacttgaagaaaatgactcaatatttttcatttgtgataaattgaaggaggctcaattgttctctggaaaagtaagagaaaaaatttgtaatgatttaaatttgcttaataaaaat

SEQ ID NO: 297699 - DNA, 926 bp, Unknown
  Bacterial polypeptide expressing nucleotide sequence isolated from the Sargasso Sea
ctttaaggagtcgatggaagtttacggttctgataagcctgatttacgaaatccacttgttatagatgattatacaaatgtatttaaaggttcaaattttaaaatatttagtaatcaaatagaaaaaggatcagttgttaagggaatagtagttaaaaatactggcaatcaacctagaagtttctttgataaattaaataattgggcaagagaagagggtgcagctggattaggctatatttcatttgcagaaaatagttacaaaggtcctattgcaaagaatttaaatgaagatcaattattattattaaaacttgaagaaaatgactcaatatttttcatttgtgataaattgaaagaagcgcaactattttctggcaaagtaagagaaaaaatttgtaatgatttaaatttacttaataaaaattcttttgaattttgttggatagttgattttccaatgtatgaaattgatgaaaaaactaataaaatacagtttagtcataatcctttttcaatgcctcaaggtgaaatggaggctctagaaaaaaaagaccctcttgatataaaagcatatcaatacgatattgtgtgtaatggtgtagagttatcttcaggcgcaattagaaatcataaaccagaaattatgtataaagcttttgatatagctggatattcgaaagaagacttagaagaaaaattttcaggaatgcttaatgcgctcaagtttggagctcctcctcatggaggtagtgcacctggtattgatagaattgttatgttgcttgctgatgagccaaacattagagaagtaatagcatttccaatgaatcaacaagctatggatttaatgatggacgcccccgcgagtattgataaagaaagattagaagaattaggtattaaattaatagataaaaattaat

SEQ ID NO: 297700 - DNA, 445 bp, Unknown
  Bacterial polypeptide expressing nucleotide sequence isolated from the Sargasso Sea
gatggcaatctaacacctcttcatcatcctttcacattaccaaaatgttcagtaaaggaaatacaagaaaatcccgaggatgcaattgcatatgcatatgatgttgttctaaatggatatgaaattgggggcggatctttaagaatatttgataataaaatgcaaaaagctatttttaatattttgaatattaccagcgatgaagctaaaaataagtttggattcttgttgaaagcattgtcatctgggtgcccaccccatgggggtattgcatttggtcttgatagaattgtaatgcttgtaactaacactccaaatataagagatgttattgcttttcctaaaacgcaaagcgcaacatgcttacttacagaggctccaagcaaagttgataaagatcaacttgatgaactaaaaataattagcacacacaaggaagaataat

SEQ ID NO: 297701 - DNA, 889 bp, Unknown
  Bacterial polypeptide expressing nucleotide sequence isolated from the Sargasso Sea
aaaactttttacaaactttttacaaaattttctaaatttaaaattcaaaatgaaaaattcccaaaaataacatttgcggatgcaatgttgaaatatggaacagataaacccgatcttagaaatccattgctaatttatgaagtttccgatgtttttaaaagagatgatgttaaatttgatattttcaaaaatttggttaataaaggcaatgtagttagagcaattatagcaccacaaacatctgacaaaccaagaagtttttttgataatattgataaatggtccaaagaccaaggtgcatcaggcttagcctattttacgcttgaacaaaaaagcgatttatctgccaaaggtccaattggaaaattttttagcagtgattcattaaaagaaataattaaaataactggagctaaagtaaaagatacaatttttttctcttgtggaaataaaaaggaagtagaaaatattttatctttagcacgaaataaaatagcagaagagctaaagttaattaaccataatcaattttctttttgttggattattgattatccaatgtatgagattaatgaagagactaaaaaaatccaatttagccacaatcctttttctatgccacaaggaccaatagaaaaattagatttcaaaaatccacttaatattaaagcttatcaatatgacattgtttgtaatggtattgaactttcatctggcgccataagaaatcatgtgccagatttaatgtataaactttttaacttagctggctatgataaaaatgctgtagatgaaaaatttagtggcatgattaatgctttaagttatggcgcaccacctcatggaggaatagccccaggtattgatagaatagtaatgttattggcaa

SEQ ID NO: 297702 - DNA, 276 bp, Unknown
  Bacterial polypeptide expressing nucleotide sequence isolated from the Sargasso Sea
aagtattttctttacttggattaagccatgatgaagcagttgaaaaatttggatttttagtcgaggctcttacttatggtgcaccaccgcacggaggcatagcgttcgggtttgataggcttgtgatgttactagctggaactgaaaatataagagatgttatagcattcccaaagacaacttcggcaacttcgttaatggatcaaagtccaagttctgtcagtaaatcgcaattaaaagagttaggcatcacaattaatgatccagaagattaag

SEQ ID NO: 297703 - DNA, 913 bp, Unknown
  Bacterial polypeptide expressing nucleotide sequence isolated from the Sargasso Sea
gttaagtgttttcgagatgaagatttaagagctgatcgtcaacctgaattcacacaaatagatattgagatgtcatttgttgatgaagaagatatttatatatatatggaaaatctaactagatacatattccagaaagtaaaagatataaagctctctgatccttttccaagaatgacttatgctgaagcgatggaaagatatggttcagataagcctgatcttaggtatgaaatggagttgattgatattaagtcctttaccgatgaatctgattttaaagcttttagcgatgctgaatctgttaaagcattacttgtcaaaacaggtgctaaatactctagaaaagttatagatgacttgaatgataaagctaaaaagtatggagccaaaggattagcatggatgaaatttgaagatggaaagttcaacggcgggatttcaaagtttttttctgaaagcttgcaaaaaaatatctctgaggaccttaaagtagaaaatgatgatatattactgttcgttggagatgataagaatattgtaacaaagtcacttggtaaacttcgaacagttatagcttcaaaagaaaatttagcaaatggaaatgaattcaaacccttgtgggtcactgaattccctatgtttgactttgatgatgagaataatcgttatgtttccatgcaccacccgttcactgctccaagagactctgacatagaaaagctagatagcgacccaagtatagctttgagtcgtggttatgatttaacgatgaacggtcatgaaattgctggtggttcaattcgaattcattctccagaagttcaagaaaaagtattttctctattagggcttactcaaaaagaggcagttgataaatttgggtttttagtagaggcacttcgatatggag

SEQ ID NO: 297704 - DNA, 414 bp, Unknown
  Bacterial polypeptide expressing nucleotide sequence isolated from the Sargasso Sea
caatgccacaagggggattggaagcgctcaataattcagatcctttaaatattttaggttatcaatatgatattgtttgcaatggcgtagagctatcatcaggcgccatacgaaatcacgttccagagattatgtataaggcttttgaaatagctggctacagtaaagatcaagtgcatgaaaaatttggaggcatgataaacgcttttacttatggcgtacctcctcatggcggcattgcaccaggaatagacagaatagttatgctacttgctcaagaaaaaaatattcgtgaggtaattttgttcccaatgaatcaacaggcccaggatctgatgatgttggcccccgctgaagtcgataagactacacttgatgagttgaatttagaagttaaaccaactgatgaataaa

SEQ ID NO: 297705 - DNA, 619 bp, Unknown
  Bacterial polypeptide expressing nucleotide sequence isolated from the Sargasso Sea
taaacaactgattatgatatctgggttcgataaatattttcagattgctccgtgttttagggatgaagacccaaggtcagataggtcacccacagatttttatcaattagatgtagaaatgtcgtttgtggaacaacaggatgtttttgataccattcagcccattttaactggtattttcgaggaattttcacaagggaaagaagtggatagtgagtggccacagataacttaccgacagtcaatgctttggtatggaacagataaacctgatttaagaaatccaataaaaatgcaaaatgtttcggagcattttatagactcaggttttgagatcttcgaaaatattctaaagaatgaggactcggaaatcttcgccattccagctccaaaaggaggaagtagaaaattttgtgatagaatgaatgcgtttgctcaaaaggaaggtttgcccggtatgggatatattttttggagagatggagattctggtctagagggagccggaccgctttcaaaaaacattggccatgagaggacagagcagattagactccaactagatcttcaaataggtgatgctgcattttttcttgctggaaaccagaaaatttcttaa

SEQ ID NO: 297706 - DNA, 860 bp, Unknown
  Bacterial polypeptide expressing nucleotide sequence isolated from the Sargasso Sea
aacagttacgaaaagatctgatgaaactattaatgataatttaccaacaggtaaaatagaaattaatttgtctgaattagaaattatttctcaatcaaaagcattacctttgcaagttaattcagatgaagattatggcgaagaaactagattaaaatttagatatttagacttaagaagaagtaggcctcatgaaaatattgttttaagatctaatgttattcaaactattagaaataaaatgttagagttaggatttttagagtttcaaacaccaattttaactgcttctagtccagaaggtgcaagagattttttagttccctctagacttaataaagggaagttttatgctttgcctcaagctcctcagcagtttaaacaactcataatggtatcgggttttgataaatattttcaaatagcaccatgttttagagatgaagatagcagagctgacagatctccaggagaattttatcaacttgacttagaaatgtcatatgttgaacaagaagatgtttttgaagctgtagaacctgtgattaaagaggtttttaaaaagtattcagacaaaagtattgatgagttttttccaaaaattacttacaaagactcaatgttaaaatatggaaatgacaaacctgatttaagatttgctcttgagattaaagatgtgacaaatatttttagaaattctagttttactatttttgcgaaatcaattgaaaatggatctgtagttagagctgtccctggtcccaattgtggttcacgttcagttgctgatagaatgaataattgggcccaaggagaaggtgctcctggtatgggatatattattttcagtgaaaatactg

SEQ ID NO: 297707 - DNA, 523 bp, Unknown
  Bacterial polypeptide expressing nucleotide sequence isolated from the Sargasso Sea
gagtttgatcttttggaaaaaaatgcatttaaattttgttggattattgattttcccatgtatgaacttaatgaagatacaaataaaatccaatttagtcacaatcctttttcaatgcctcaaggagaattagatgcattaaataacgaagatcctttaaatataaaagcttttcaatatgatattgtatgcaatggagtagaactctcttcaggggcaattagaaatcataaacccgagataatgtataaagcatttaatatagcaggttatgataaaaaatttgttgaagaaaatttttcaggaatgttaaatgctttaaaatatggagctccacctcacggaggaagtgcacctggcattgatagaattgtaatgttgttagcagatgagccaaatattagggaggttattacttttccaatgaatcaacaagctgtagatatgatgatggaagcaccaacatcagttgataaagcaagattggatgaactaggcattaaattagtaaataaaaattaaa

SEQ ID NO: 297708 - DNA, 379 bp, Unknown
  Bacterial polypeptide expressing nucleotide sequence isolated from the Sargasso Sea
atggatccattagaaattaaagcttttcaatatgatattgtttgtaatggcgttgaattgtcatctggtgcaataagaaatcatagacaagatattcttttaaaggcctttgaaattgcaggatataacatcgatgaaattaagaaacggtttggagcgatgtacgatgcttttggctatggcgcaccccctcatggcggcattgctcctggaattgacagaattgtaatgctcattgctggtgtagaaaatatacgagaagttattgctttccctatgaatcaacaggcgcaagatcttatgatgaatgcaccatccgaaatattatcggatcagcttaaagaaatcggcattaagattattgagaagaaagaataga

SEQ ID NO: 297709 - DNA, 232 bp, Unknown
  Bacterial polypeptide expressing nucleotide sequence isolated from the Sargasso Sea
tttggaggaatgttaaatgcatttaaatatggagctcctcctcacggtggcatagctcccggcatagataggattgtaatgcttctggcagaagaaaagaatattagagaagtgatactttttcccatgaatcaacaggctcaggatttaatgatgagtgcccctgcagacgtacctgattctaatctaaaggacttaaatatacaaactttagaactaaaggaagattaag

SEQ ID NO: 297710 - DNA, 622 bp, Unknown
  Bacterial polypeptide expressing nucleotide sequence isolated from the Sargasso Sea
aaaacaaactgtgaaataggtgacagtatttttatggcttgtggaaaacagaatgaattagaaaaaattacttttttagcaagagataaaattgcaagagatcttgatttaatagatgcaaatatttttgcattttgttggattgtagattatccaatgtttgaaaaaaatgaattaactaataaaatagagtttagtcacaatccattttcaatgccacagggtaatttaagtgaaaaagatcttgaaaaccccttagatattcttgcatatcaatacgacatagtttgtaatggaatcgaattatcatctggagcgattagaaatcataaaccagaacttatgtacaaacttttttcaattgcaggatatgacaaaaagcaagtagatgaaaaatttagtggaatgattaatgcacttagttatggagcaccaccacatggtggaatagctcctggtattgataggatagtaatgctattagcaaatgaaaaaaatataagggaagttacaatgttcccaatgaatcagaatgcccaagatttaatgatgaaagcgccgtctgaggtaaatccagatcaactaaaagaattaaacctttctttaaaaattaaaaaataac

SEQ ID NO: 297711 - DNA, 850 bp, Unknown
  Bacterial polypeptide expressing nucleotide sequence isolated from the Sargasso Sea
agtaccatttaaaaaaattacttataaaaattcaatgctaaaatatggtacagacaaaccagatttaagaaatccaattgaaatatctgatgttacagaaatttttaaaagagaagatgttaaattggatatatttaaaaaattaattgaaaaaggggcggttgtgagggctataccagcaccaaatacatcttctaaacctagaagtttttttgatgagtacaacaactgggctaaagatgaaggaggaaaaggattaggatatatcatactggaaaaaaaagatggtaatttaattggaaaaggcccaataggaaagtttttctctgaaaaggctattaatgaattagcaaaagtttgtaaattaagcgaaaaagattctgtatttttttcgtctgataaacaaaaagaagcagaaagaatttctggcattgctcgacaaaagttaggcaaagaattaaatcttatagataataaaaagttcgaattttgttggataactgactatcctatgtatgagtatgatgaaaaggagaaaaaaatagattttagtcacaatcctttttcaatgccacaaattgatattaaggatttcgataaatctgatccattatccatacttgcttatcaatatgatttagtatgcaacggttatgaaatatcttctggagcaataagaaatcatctcccagaattaatgtataaagtattttctaaagttggttattctaaggaagaggtaaattcaaagtttggaggtatgatcaaggctctttcttatggcgctccaccacacggaggaatggctccaggaattgatagaattgttatgatattagctggaaaagaa

SEQ ID NO: 297712 - DNA, 863 bp, Unknown
  Bacterial polypeptide expressing nucleotide sequence isolated from the Sargasso Sea
gatttggatatctctctcccattacctcaggtcacctggaccgaatgcatggaacggtacgggcatgatgcaccggacatgcggtttggccttgagatagtcgatctcactgaggtcacgaagaacagtgatttccgtgtttttaaaagcgctgttgagtcaggcggaagagtccggggaattctcgtctcaagtgctgctgaaaaattttccagaaaagatcttgatggtcttacagagatggcagtcgaagcaggcgcgaagggccttgtctggctcaaacttgattcttctggatcgtggacggggccggttgcaaaaaacttaggctctgatgtagcggaaaacattcgccaatcactttcagcaaagccgggtgaccttgcgcttatctcggctgatagctttgacgtcacctgtaaagccttgcacgcactccggaaacatcttggtaaagaacttgaactgtacgacgaaaacacaatgcatgtgtcatgggttattgattttccgatgttcgcccgtgatgaagaaactgggaactgggctgcaatgcatcaccctttcactgcacctcatcctgaagacgttgaaaaacttacgtcgaatccggcagcgtgccgtgcaattgcctatgaccttgtgattaatggttcagaggcgggaggtggcacgattcgaatccatgaccaggcgactcaacaaaaagttttcgagctccttggaatttctcctgaaattgccaaggaacgctttggttttctccttgacgcactggcaagcggtgctcctccgcatggcggaattgccctaggcattgatcgctgggtcatgctctttggtcacctcaattcaattcgtga

SEQ ID NO: 297713 - DNA, 904 bp, Unknown
  Bacterial polypeptide expressing nucleotide sequence isolated from the Sargasso Sea
tatgcaacacagaactcatacctttggccagctaacctcaaaagaaaataatcttaatgtcgtcctaaatggttgggttaatagcattcgtctgcacgggcaaattatttttattgaccttagggatagatatggtaaaactcaattagtatttgattctaaaacatttttgggagattttgaaaatgtcaaaaaattatcattagaagatgttctctcaatagaaggaattgtctcgcttagagcacaatctgctattaataaagatattataacaggtcagatagaaattttagtatcgaatgttttactatttaatgaggccaagccattaccattcgtaatatctgaccgtaacagcgcagaagaaaacttaaggttaaaataccgttatttggagttacgcacggaagaccttcagcgtaatcttattattcgtcacaaaacttatcaggctgttcgcagttatctttccaataatgacttcttagaaattgaaacacctgtattgatgaaatctacacctgaaggggctagggattatttagtaccaagcagaatacatgagggaaagttttatgctttgcctcaatctccacaactatacaagcaaattttgatgatttcaggtttcgatcgatattttcaaattgtaaaatgttttagggatgaagaccttagatcggatagacagcctgagtttacccaaatcgatattgaaatgtcatttgttgatgaaggccatgtaatagattatatggaaaaattaacaaaacatgttttcaaaaatgtaaaaaatattgaattagatactcctttcgaaaaattgacatggtcaaaagcaattgactcatacggttcagataagccagatttaggatatgatcttgagctcattgatttt

SEQ ID NO: 297714 - DNA, 943 bp, Unknown
  Bacterial polypeptide expressing nucleotide sequence isolated from the Sargasso Sea
aacacctattctaacagcttcaagtccagaaggtgcaagagattttttagttccaagtcgacttcatccaggaaagttttatgcacttcctcaggccccacaacagtttaaacaaatgataatgatatctggttttgatagatattttcaaattgcaccatgttttagagacgaggatggtagagccgacagaagcccaggcgaacactatcagctggatatggaaatgtcttttgttgaacaggaagacgttcttaaagttgtagaacccattttttaccaattattcaccaggtttggaaatggaagaaaaattaacaagccgccttttcaaagaatcaaatataaaacatctcttgaaaaatatggaactgataaaccggatttaagaaatcctattgaattatttgacgttacaaaaatttttaaatcaacagatgtcaaattaaaaatttttaaggatataattgaaaaaggtggaatagtaaaagctattccagctccaaacactttttcaaaaccaagaagtttttttgacgggcttaataattgggctattagtgaaggagcaaacggtttggcctatattacatttgaaaaagcgagcaacaaaattataggaaaaggacctattgcaaaattcttttcagaaaaagctatcacagagttaataaaaacttgtaaaataagcgaaaaagactcagtattttttgtatgcaataaagaaaaagaggcaataagattttctggtgttgtaagacaaaaaataggatatgaactaaaactaattgatgagataagttttaatttttgttggattactgattatccaatgtatgagtatgatgagaaagagaaaaaaatagattttagtcacaatccatttctcatgccacaagttcctattaatgaatttgataaaatcgatcctttaaaaatttag

SEQ ID NO: 297715 - DNA, 805 bp, Unknown
  Bacterial polypeptide expressing nucleotide sequence isolated from the Sargasso Sea
gaagccctgggtgaacattaccaattggatattgaaatggcctttgtagaacaggaagacatttttaaaactttggaaccaattttttatgaattatttacagagtttggtaaaaataaaactgtatctaaagttccttttccaagaataaaatttaaagatgctatgtcaaaatatggaacggataaaccagatttacgaaatccaattgaaataaaagacgttactcatattatgaaaatggaagatgttaaattagatatctttaaaaaattaattaataaaggggctttagttaaagcaataccagcgccaaatacttctaaaaaaacaagaagtttttttgacaatctaaatacttgggcaaaagatgaaggtgcgagtgggttagcttatatgagctttgaaaaaaaagaaggtaaaattgttggtactggtccaatagctaaatttttttctgaaaattccctaaataaaattatatcagaatgcagtttatctgaaaaagattcagtttttttttcatgtgacaagaagaatagtgtggaaaaaattgctggtttggcgaggcaaaaaatagcaatagaactaaatttaattgaccaggataaatttaatttttgttggattactgattttccaatgtatcaatatgatgaagtagaaaaaaaaatagattttagtcataatcctttctcaatgcctcaaattgatattgaaagttttgataaagctgatcctttgtctattctggcttatcaatacgatttagtttgtaatggaacagagctttcatctggagcta

SEQ ID NO: 297716 - DNA, 724 bp, Unknown
  Bacterial polypeptide expressing nucleotide sequence isolated from the Sargasso Sea
taaacgtagagatcatggtaatttaatttttattgatcttagagataaatcgggtgtattacaagttgtatttaatcccgaagtttcctctgatgctcacgatttagcatctaaccttagatccgaatgggtagttcaaataaaaggaataattgtaaaaaggatttctggtgctgaaaatgattcaatatcaacaggatcagttgaattgcaagcaagtgaattaaaaatcttaaataaatcaaaaacgcctccttttgaaatatcaaatgaaatcgaaatagatgatcaaactagattagcttataggtttgttgacttaagaagacctaaaatgcaaaaattatttaccttgaggcacaaaattactaaattaatatgggattatttatcagataaagattttattcatattgagactccaatattactaaaaagtacacctgaaggtgccagagattatgttgttcctagccgtattcatccaggaaaattttatgcgttacctcaatctcctcagcaattaaagcaaattttaatggtttctggatttgacagatattttcagatagctaggtgctttagggatgaagatctcagagctgataggcagcctgagcacactcaacttgacttagagatgtcgtttgtacaccaggatgatgttatgaatttggttgaaggattatacaaacatgtaacctgtgaaattttaggtgagaat

SEQ ID NO: 297717 - DNA, 424 bp, Unknown
  Bacterial polypeptide expressing nucleotide sequence isolated from the Sargasso Sea
tcacaatccattttcaatgcctcaaggtgatttaagtgaaaaagattttgaaagcccgttagatattcttgcttatcaatatgacatagtttgtaatggtatcgaattatcttcaggagcaattagaaatcataaaccagaacttatgtataaacttttctcgattgcaggatatgataaaaatcaagtagatgaaaaattcagtggtatgattaatgcacttagttatggcgcaccaccacatggaggaatagcacctggcattgatagaatcgtaatgttactagctaatgagaaaaatattagggaagttactatgtttccgatgaaccaaaacgcacaagatttaatgatgaatgcaccatctgaggtaaattcagatcaattgaaagaattaaatttagctttaaaaaataaaaaataa

SEQ ID NO: 297718 - DNA, 832 bp, Unknown
  Bacterial polypeptide expressing nucleotide sequence isolated from the Sargasso Sea
gttttttcagaacccgctaatgacaaaaactcaaggattgctgctttgatagttcctgaaggcgaaaaaatcggaagagggcaaatagatagatatacagattttgtaaaagaatttggagctaaaggtttggcctacataaaagttgatggtggaagtattgcagatctttcatcacctatacttaagtatctatctgaagaatgcttaaaaaatattttgactgcattgaaagttaaaaaaggcgacttaatattttttggtgccggtaaagaaaaaattgtaaatgactacatgagtagactaatagctaagattggtattgatttaaatctcttgaaagatggttttgaagcttgttggattacagattttccaatgttcgaggaaacttctgatggatctttaacttcattgcatcatccttttacctgtcctgttgaaacagaattagaaaagcttgggaaattaagtccattagaaattaattcaaaagcctatgacatggttataaatggggtggaaattggtggaggatctattcgtatacataaaaaagctcttcaggaaaaagtctttgaattactgggattgtcagaagatgaagcacagaaaaaatttggattctttttaaaaactttaacaacaggttgtccgccacatggtgggatagcatttggtctagataggttagcgatgttaatggtgggtgccgaatctataagagatgtcatagcttttccaaagacgcaatcagcattatgtttactaacagaagcgcccggtcccgttacagacgaaagtcttgatgaacttcatatatcaagaaagg

SEQ ID NO: 297719 - DNA, 856 bp, Unknown
  Bacterial polypeptide expressing nucleotide sequence isolated from the Sargasso Sea
atgagaaacaaaatttgcaaagaactcaataatacagatattggtaaattagttaatttatgcggatgggtagatagaagaagagatcatggtggtgtaatttttattgatttaagagaccatagtggattcctacaaataacaattaaccccgatgatggtgcagaactatttaaacaggcagaaactctaagaaatgaaacagtaataatggttatcggaattattaatgaaaggcccaaagattccataaatacaaatttaagtactggagagttagagcttaaggttaaagatttgcaaattctcaaccaaattaaaaaaaacttaccttttccagtgtctatacatgattatgaaaatacaaaagaggaactcagattaagatatagataccttgatttaagaaggggaaaattactagaaaatttaaaaacaagacataagattattaaagttgctagagaatttcttgataattttggatttacagaagtagagaccccattacttacaaagtcaactccagaaggtgctcgcgattttcttgttcctgcacgtctttcaaatggggaattttttgctttacctcaatccccacaactatttaaacaacttttaatggttggaggcctagacaagtattatcaaatcgcaaaatgtttccgtgatgaagacttaagggcagatagacagccagagtttactcaattagatattgagatgagctttattagtgaagaggaaataatttcttttaatgaaagtctcataaaaaaaatatggaaagaagtgttaaatattaattttaataatgcttttccaaagaatgtcatggcaggcagcaatggataat

SEQ ID NO: 297720 - DNA, 391 bp, Unknown
  Bacterial polypeptide expressing nucleotide sequence isolated from the Sargasso Sea
agtgaaaaagattttgaaaatccattaaatatacttgcttatcaatacgacatagtttgtaatggaatagaattatcttcaggagcaattagaaatcacaaaccggaacttatgtataaacttttctcaattgcaggatatgataaaaaacaagtagatgaaaaatttagtggaatgattaatgcacttagttatggtgcaccaccacatggaggaatagcacccggtattgatagaatagtaatgttactagctaatgaaaaaaacattagggaagtcacaatgtttccaatgaaccagaatgctcaagatctgatgatgaatgcaccatcacaagtaaatccagatcaattaaaagaattaaatttagctttaaaaactaaaaaataac

SEQ ID NO: 297721 - DNA, 544 bp, Unknown
  Bacterial polypeptide expressing nucleotide sequence isolated from the Sargasso Sea
tgaccgcgacaacgaccagtggaatttcctttgggtggtggatttcccgatgttcgagttcaacagcgacgagaaccgttacgaagcgctgcaccaccccttctgcgcccccaatgccgaggatctcggcagtgatgcctcccaatgggccgacaccctgccggctgcccgggcccaggcctacgaccttgtgctcaatggccttgagctcggcggtggatccctgcgcatccacgactcagccctgcagcgccaggtattgcagaccgttggcttgccgctcgaggaggcccaggagcagttcggcttcctgatggatgccctcgatgtgggcgccccaccccacggcggcctggcctttggtgtggaccggatggtgatgctgctcgcgggtgaggaatcgatccgcgacaccatcgccttccccaagacccagcaggcccgctgcctgatgaccaatgccccaggcggggtcgccgacaagcagctggaggagctgcatgtggccagcacctgggtggacccgagcgaaaacgacgcgtga

SEQ ID NO: 297722 - DNA, 529 bp, Unknown
  Bacterial polypeptide expressing nucleotide sequence isolated from the Sargasso Sea
tgcaaaagatctagatttaattgatgaaagtactttcgcatttttttggattgtagattatcctatgtttgaaaaagatgaagtaactaacaagattgagtttagtcataatccattttcaatgccccagggtgatttaagtgaaaaagattttgataacccgctagacatacttgcatatcaatatgatatagtctgtaatggaatagaattatcctctggagcaattagaaatcataaaccagaacttatgtacaaacttttctcaattgcaggatatgataaaaaccaggtagatgaaaaatttagtggaatgattaacgcacttagttatggtgcacctccacatggaggtatagcacctggtatagatagaattgtaatgttactagcaaatgaaaaaaatattagagaagtaacaatgtttccaatgaaccagaacgcacaagatttgatgatgaatgcaccttctgaggtaaaccaagatcaattaaaagaattaagtttagctttgaaaactaaaaaataa

SEQ ID NO: 297723 - DNA, 550 bp, Unknown
  Bacterial polypeptide expressing nucleotide sequence isolated from the Sargasso Sea
attgaataaatatagaagtcacaattgtaacgaacttagaaaaaaaaatgtcggaagtaatattttactttcaggttggattaataagaagcgtgatcatggaaatctcttatttttagatttacgtgataactatggcatcacacagtgcatagtagataaagaaaataaaaactttaaagatttagaaaaaatacaacttgaaacagttattaatatagagggtaaagtagttaatagatcaactgaaacaatcaataaagagatagaaacaggtgagattgaagtcactatcgaaaattttgttgttttaggtaagtgtaaagaattgccaatgcctgtttttagtgatcaagaatattctgaggaaatcagattaaaatatagatatttagatttaagaagaaaaaaaattcatgaaaatattattttgagatcaaaagttatttcgtttatcagaaatgaaatgaataaatttggttttttagagttccaaacaccaatattaacttcatcaagtcctgagggtgcaagagattttctagtgcca

SEQ ID NO: 297724 - DNA, 406 bp, Unknown
  Bacterial polypeptide expressing nucleotide sequence isolated from the Sargasso Sea
gcctcagggaggaatggaagcattactagagcaggatcccttaaaaataaaagcttatcagtatgatataatatgtaacggtattgagttatcttcaggagcaataagaaatcatgatattgatatcatgttaaaagcttttgaaattgctggttatcaagaaagtgatattataaaaaaatttccatcccttcataatgcttttcaatatggagcaccaccacacggaggaatagccccaggtattgatagaatagtaatgttaatagctaacgagcctaatattagagaagtaataatgtttcctatgaaccagaaggcagaagatttattaatgggagcacctaatgaggtttctaatcagcaattaaaagatctacatattaaagtagttcctgatgaataa

SEQ ID NO: 297725 - DNA, 835 bp, Unknown
  Bacterial polypeptide expressing nucleotide sequence isolated from the Sargasso Sea
agaagagatcagattaaaatataggtatttagacttacgaagaaaaaaaattcatgaaaatataattctaaggtcaaaagttatatcatttataagaagtgaaatgaatgcaattgggtttttggaatttcaaacgccaatacttacttcttctagcccagagggtgcaagagattttctcgttccaagcagattgaaccctggaaaattttatgccttacctcaagctccacaacaatttaaacaacttataatggtttcaggatttgataaatattttcaaattgctccatgctttagagatgaagatgctagagctgatcggagtccaggggaattttatcaattagatttagagatgtcatttgttgaacaagaagatgtctttaaagtggttgaagaactattaattaatacttttaaaaaattttcaaacaaaaaattaatttctgaaaaatttccaagaatttcttatgctgacgcattagtaaaatatggaagtgataaacccgatctgagaaacccactaatcataaatgatattaccgaagtttttttaagagatgatgtttcttttgaaatctttaaaaaacttgtcaaattaggatctcaagtaagatgtattgttactagagaaactaaagataaaccaagaagtttttttgataatattgataaatgggctaaagcagaaggttcttcaggtttagcttattttacattagaaaagaataatgaaatatctgctaaaggacctgtaggaaaatttttttctaaggagtctttagaggcaataatgaaaaaaactggagcagaaattggagatagtattttt

SEQ ID NO: 297726 - DNA, 606 bp, Unknown
  Bacterial polypeptide expressing nucleotide sequence isolated from the Sargasso Sea
ttggtgataccatatttctttcctgcggaaaaaaaaatgatgtagaaaaaatattaagtgctgcaagaaataaaatagcagaggatttagatttaattgataatgaaacattttcattttgttggattgtcgattatcctatgtatgagattgacgaaacaacaaaaaaaattaaatttagtcacaatccgttttcaatgccacaaggagaactaaataaattagaccttttaaatcctttaaatattaaagcctatcaatatgatattgtttgtaatggtattgagttatcatcaggggctataagaaatcatattcctgaattaatgtataaattatttgaaattgctggctattcgaaaaatgatgtaaataaaaaatttagtggaatgataaatgccttaagttatggagcaccacctcatggaggaatagctccaggaattgatagaattgttatgcttttggcaaacgaaaaaaacataagagaagttactatgttcccaatgaaccaaaatgcacaagatttgatgatgaatgcaccatctgaagtttcagatgatcaactaaaagagttaaatttaaatattaaaaagaaaaaataat

SEQ ID NO: 297727 - DNA, 925 bp, Unknown
  Bacterial polypeptide expressing nucleotide sequence isolated from the Sargasso Sea
tgttattgagcagcatgaagttttaggcacttgtaaagaacttcctatgccaatttttagtgatcaagaatattcagaagaaataagattgaaatatagatttttagatttaagaagaaaaaaaattcatgaaaatattattttaagatctaaagttatttcatacatccgaaatgaaatgactaaattaggttttttagaatttcaaacaccaattttaacctcatctagtccagaaggtgctagagattttttagttcctagtcgtttaaatccaggaaaattttatgcactacctcaagctcctcaacaatttaaacaattaataatggtttcgggctttgatagatactttcaaattgcaccttgtttcagagatgaagatgcaagagcagacagaagtcctggggagttttatcaattagatttggaaatgtcatttgttgaacaagaggatgtgtttaatgttgttgaaaagttaatggttaatacatttaaaaatttttcaaataaaaaactgatgtttgataaatttcctaagatttcatacaaggaagcaatgcttaaatatggtactgataaaccagatttaagaaacccacttattataaatgatataactgaaatttttacaagagatgacgtttcatttgaaatatttaaaaaattagtaaaatctggatctaaagtaagatgtattgttacaaaaaatacaaaagataagcctagaagtttttttgataatattgataaatgggctaaagaagaaggtgcttctggtttagcttattttacttttgaaaaagataaagatatttcagcaaaaggccctattggaaaattcttttctaaagatgcattggctgaaattatgaaaaaaacaaactgtgaaataggggatagcattttcatggcttgtggaaaa

SEQ ID NO: 297728 - DNA, 628 bp, Unknown
  Bacterial polypeptide expressing nucleotide sequence isolated from the Sargasso Sea
atgataaaaacaggggcgcaaataggtgatagtatcttttttgcgtgtaataaattaaatgaattagaaaaaattacggcattagcaagagacaaaattgcaattgaattaaatttaattgatgaaaatttattttctttttgttggattgttgattatccaatgtttgaaaaagatgaattaactaataaaataaaatttagccataatccattttctatgcctcaaggggatctaaataaaattgattataagaagcctttggaaattcttgcttatcaatatgatattgtttgcaatgggatagaactttcatcaggtgctattagaaatcatattccagaattaatgtataaattattttctattgcgggatacgataaaaaacaagttgatgaaaagtttagtgggatgattaatgctttaagctacggagcaccacctcacggaggtatagctccaggtattgataggatagtaatgttgttagctaatgaaaaaaatattagagaagtaacaatgttcccaatgaatcaaaatgcacaggatttaatgatgaatgcaccatctaaagtaaacgatgatcaattaaaagagttaagtctggctttgaaaattaaaaagtagt

SEQ ID NO: 297729 - DNA, 306 bp, Unknown
  Bacterial polypeptide expressing nucleotide sequence isolated from the Sargasso Sea
gtggttcattaagaattcacgatccaaaaattcaagaaaaaatttttaaaatactgggtttgaatcacaaagaggcagaggaaaaatttgggtttttgattgaagcacttagttatggtgcacctcctcatggtggaatcgcatttggatttgacagactggtaatgcttttagcagggactgaaaatataagagacgtaattgccttccctaagacaacttcggccacttctttaatggatggcagcccaagtcccgtagcaagctctcaacttaaagagctaggcataaaaaataagttttagt

SEQ ID NO: 297730 - DNA, 604 bp, Unknown
  Bacterial polypeptide expressing nucleotide sequence isolated from the Sargasso Sea
aaatgacacgatttttttttcatgtggaaaaaagaaagatgttgaaaatattttatctttagcaagaaaaaaaattgcagaagaattaaaattaattgattataaaactttttctttttgttggataattgattaccctatgtatgagttaaatgatgaaactaaaaaaattcaatttagccataatccattttcaatgcctcaagactctttagaaaaaatagattttaaaaatccactcaatattaaagcatatcaatacgacattgtttgtaacggcatagaactatcttctggagcaataagaaaccatattccagaattaatgtataaactttttaaagtagcaggttatgataaagaaacagtcgatgaaaaatttagcagcatgataaacgcattaagttatggagcaccaccacatggtggtatagcaccaggaattgatagaatagtaatgctattagcaaatgaagaaaatattagagaaattacgatgtttccaatgaatcaaaatgctcaagatttattaatgaaagcaccctcggaagtagatgataagcaactaaaagagttaggcatagaaatcaaaagaaaaaaataa

SEQ ID NO: 297731 - DNA, 886 bp, Unknown
  Bacterial polypeptide expressing nucleotide sequence isolated from the Sargasso Sea
gatggttggtgatttaatgaaggatgtcgaatttaaggtcttttctcaaccggccaacgacgaagactcaagagtagcatgccttgttttgaaaaataagcctgatatttctagaaaacaaatagatgattacactgaatttgtatccaattacggcgctaagggattagcttatattagagtcaatgctataaaagaaggcgttaaaggaatgcaatcaccaatactcaaatttctagacgaagattgcattagttcactcaccgatcgtctaagtatagaggacggagatactgttttctttggtgctgataaagcagaaacagttaatgcatcattgggtgctttgagagaaagattagcaacagattttgatttaattgaatccggttggcacccgctttgggttacagactttccaatgtttcactgggaacctaaagaaaaaaggtgggtatgtgagcaccatccttttacttcgccacttaacgatgaccctcaggatctaattgctaatccgaaaagtgcaatttctctaggctatgatttggtcctgaatggaaatgaaattggcggaggttcaatcagaattcattcccaagagatgcaatctgcagtttttaaaaccttgggtattagccctgaagaggcaagtgagaagtttggattcttccttgaagcattaaaatacgggtgcccaccgcatggtggaatagcctttggaattgatcggatagttatgctgatgactgaatctactagcattagagatgttattgctttccctaaaacgcaaactgccagctgtttgcttaccgatgctccaagtcaagctggaaaaggtcagcttaaagaattaggtattagcatcaaatcaaaaaaataa

SEQ ID NO: 297732 - DNA, 639 bp, Unknown
  Bacterial polypeptide expressing nucleotide sequence isolated from the Sargasso Sea
tatgcacaaatttaggtctcatacttgtggacaactgaatgcgactaacaaaggccagttagttcgactttctggttgggtacatagagtgagagatcatggtggggtgctgttcatagatctaagggatcattacggtttcacccaagttcttgcagatccagatagcaatgtttttctggaggttgaaaaggttaggtcagaatggtgtatccgaatagatggactagtgaagctgcgtgaaccagagttgattaacgaaaaacttcccactggtgaaattgaggtatttatagatgatatggaagttttgggtaaatctgaagagttaccaatgcctgtatttggagatttagaatatcctgaagaaactcgcttgaaatatagatttttggatcttcgaaaggaaaaattacacaaaaatattttgttaaggtccaaagtggtttcatcacttagaagaaggatggagaaaattggatttaacgaatttcagacaccaataataacagcttcctcaccagagggagctagagattttttggttccatccagattacacgcgggaaaattctatgctcttcctcaggcgcctcagcaattcaaacaactgattatgatatctgggttcgataaata

SEQ ID NO: 297733 - DNA, 382 bp, Unknown
  Bacterial polypeptide expressing nucleotide sequence isolated from the Sargasso Sea
aaacttttcagatcctttaaatataaaagcatatcaatatgatattgtatgtaatggtatagagctttcttcaggagcaataagaaatcatatcccggaactaatgtataaactatttgacattgcaggatatagtaagaaaaatgtagatgaaaaatttagtggaatgatcaacgctttaagttatggcgcgcctcctcatgggggtatagcaccaggaatagatagaattgtaatgctgttagctaaagaaaaaaatattagagaagtaaccatgtttccaatgaatcagaatgcagaagatttaatgatgaacgcaccttctgaggtaaataaagaacaattaaaagaacttaatattttattaaaaaataataaataa

SEQ ID NO: 297734 - DNA, 783 bp, Unknown
  Bacterial polypeptide expressing nucleotide sequence isolated from the Sargasso Sea
tgttaaaggaataatcgtacagaataccaaagataaacctagaagtttttttgacaagttaaataattgggcaagagaagagggggcagctggtttaggttatgtatcttttgataatggagaatataaaggaccaatagcaaagaatttatcaaatgaaaaactatctaaaatgaatttacaagatggaaactctattttttttgtttgtgataatcttaaatcagcacaaattttttccggaaaggtaagagataaattgtgcaaggaaatgaatttattaaataaaaattcttttgaattttgttggatagttgactttccaatgtatgaaattgatgaaaaaacaaataaaatagtttttagccataatcctttttcaatgcctcaaggagaattaaattctttattaaatgaaaaccctttagaagttaaagcatttcagtatgatattgtttgcaatggtgttgaattgtcttctggagctattagaaatcataaaccggaaattatgtataaagcttttgagattgcaggttatacaaaagaggaattagaagaaaaattttctggaatgttaaatgcattaaaatatggagctcctccacatggtggtagcgctccaggaatagatagaattattatgcttttagctgatgaacctaatattagagaagttatagcattccccatgaatcaacaagcaatggatttaatgatggatgcacctgctgaagttgataaaaaacaattaaatgaccttggacttaaaattgtagataa

SEQ ID NO: 297735 - DNA, 634 bp, Unknown
  Bacterial polypeptide expressing nucleotide sequence isolated from the Sargasso Sea
atgaataaatatagatctcataattgttctgaattaactgaaaaagactcaggaaaaagaatttcaatatctggttggttgcatagaaaaagagaccacggaaatttattatttatagatttaagagatcattatggtttaactcaatgtgtaatagaaaataataataaactttttccagttttagaaaaaattaaaccagagtcagttcttaccattaccggcaaagtcgttaaaagagaaaaaggaaccgagaactctgaaataagcacaggtaaaatagaagttaatattcaagaaattaaagttttatccgagtcaaaagagttgcctatgcctgtatttggtgagcaaaactatccagaagatataagattaaaatatagatttttagatcttagaagagatgaaatgcataaaaatattattttaagatcaaaagtaatatcatttataagatctgaaatgttaaaattgggttttttagagtatcaaactccaattttaacttcttcaagtcctgagggagcaagagattttttagtgcctagtagattaaatccaggaaaattttacgctttacctcaagcaccacaacaatttaaacaattaattatggtttcagagatttgac

SEQ ID NO: 297736 - DNA, 822 bp, Unknown
  Bacterial polypeptide expressing nucleotide sequence isolated from the Sargasso Sea
tatttttaagaattcagattttaaaatattcagcaacctaattcaaaaaaactttaaagttaaaggtatcgtagtaagcaatacagctgataaacctagaagtttttttgataaattaaataactgggctagagaagagggggcagcaggactaggatatataagttatggaaatgacgaacataaaggaccaattgcaaaaaatttagatactgaaagactgaataaacttaaattaaataatgatgactctatttttttcatttgtgatcaagaaaaagaagcgcagttatttgctggtaaagttcgtgataaattatgtttagatttgaatttacttaataaaaattcatttgagttttgttggatagttgatttccctatgtttgagatagatgaacaaacaaacaagattgcatttagtcacaatccgttttctatgcctcaaggtgaaatggattcacttaaaaataaagatccattagacataaaagcttttcaatatgatatagtttgtaacggtgttgaattatcttctggcgctataagaaatcataaacctgatattatgtataaggcatttgaaattgcaggctataaaaaagaagaattagaaagtaaattttctggaatgttaaatgctatgaaatttggggcacctcctcatggaggcagtgcccctggtattgatagaattgtaatgcttttagctaacgaacctaatattagagaggttatagcattccctatgaatcaacaggccattgatcttatgatgaatgctcctgctccagttgataaagaaagattagaagaattagg

SEQ ID NO: 297737 - DNA, 575 bp, Unknown
  Bacterial polypeptide expressing nucleotide sequence isolated from the Sargasso Sea
aaaaagaactgatgttgagaaattattaagcaatgcaagaaacaagatagcaaatgatcttaagttaattgatgagagtgttttttcattttgttgggtggttgattatccaatgtttgaaattgatgagaatacaaaaaaaattgagtttagtcataaccctttttcaatgccacaaggtaatattgataatttaaatttatctgatccattaaaattaaaagcatatcaatatgatattgtttgcaatggtatagaattgtcttcaggagcgataagaaaccataaacctgatttaatgtataaattatttgaaatagctggctactctaaagagaaagtgaatgagaaatttagtggcatgattaatgccttaagttatggagcaccccctcatggtggtattgcacctgggatagatagaattgtaatgttattagcagatgaaaaaaatattagagaagtaactatgtttccaatgaatcaaaatgcccaagatctaatgatgaatgcaccatctgaagtagacgaaaatcaactcaaagaacttaatatttcaaaaagaaaaaaatagt

SEQ ID NO: 297738 - DNA, 847 bp, Unknown
  Bacterial polypeptide expressing nucleotide sequence isolated from the Sargasso Sea
atcttcaattcaatcatcgacgccggcggtgccattaaagggtttgcactcccaggattggcgaatgaactcagcaaaaacatgcttcaaaatgatttggccagtaaagccattcaagcctgtggtggtaaaggcctgacttggatgaaggtcttacctgacaatcaatttgaatcgaacattgtgcagttttttagtaacgaacaactgattgctgctcgtgatgcggtaaacgctgaggtgggtgacgtcatgatgtttgtggccgatgcatcacttgataccgtgaaccaagtgttgggccgttttcgaatttatttggcggaacgattcaacttgattccggaaaatgtgtacgcgggttgttgggtgacggactttccgttatttgaaaaaaccgatgctggattaacctccttgcatcacccatttacacaaccatctagtcccatccacgacggcatgagcgaggccgacatattaaatatcaacgcccgtgcatatgacatcgtcatcaatggccaagaagtgggcggcggtagtattcgtatccacgactccgcacaacaggccttaatatttaaactattaaacttaagtgacgaggaaatcgaacagaagtttggcttttttgtaaatgcgttagcacatggcaccccaccccacggtggactggccattggcattgatcgcttggtatcggttattttagcgacaccatccatccgagatgtgatcgcgtttccaaagaaccgagtggccttctgtccattaaccaaggcaccaaatgtggttgatcaagcgcaactggatgatttaaatatcacccataaagcgcccattgaag

SEQ ID NO: 297739 - DNA, 388 bp, Unknown
  Bacterial polypeptide expressing nucleotide sequence isolated from the Sargasso Sea
aaaataaattttaatcagccacttgatattaaagcttatcaatatgatattgtatgcaatggtatcgaattgtcgtcaggtgcaatcagaaatcatatacccgatttgatgtataaactttttgctgtagcaggctatgataaaaaaagtgttgaagaaaaatttagcggtatgattaatgcattaagttatggtgctccccctcatggtggtatagcacctggaattgataggattgtgatgttactagctaatgaaaaaaatattagagaaattactatgttcccgttaaatcaaaatgcgcaagatttaatgatgaatgctccttcaagtgttgataacaatcaattaaaagagttgaatattaatgttattaaaaaaaaataat

SEQ ID NO: 297740 - DNA, 428 bp, Unknown
  Bacterial polypeptide expressing nucleotide sequence isolated from the Sargasso Sea
tatgccgcaggggggaatggaagctcttattaacaaagatcctctggatatattagcttaccaatttgatatagtttgtaacggggtagagttatccagcggtgctataagaaatcaccgtccagagattatgtacaaagcgtttgagatagctggttatggtaaagaggtcgttgaggaaaagtttagtagtttgttaaacgcatttaaatttggtgctcctccacatggtggttctgctcctggaattgataggatagtcatgttacttgctggtgaacccaatataagggaggtcatattattcccaatgaatcaacaggcagaagatttgatgatgggtgcaccagccgaaatatccaaagaaagatacagagagctagaccttaaacacattcctactaagaaagagaaaactattaaatgat

SEQ ID NO: 297741 - DNA, 463 bp, Unknown
  Bacterial polypeptide expressing nucleotide sequence isolated from the Sargasso Sea
tatgaaactgatgaaataactaaaaaaataaaatttattcacaacccattttcaatgcctcaaggtgaaataaataaattagacttttctaaccctttaaaaataaaagcttatcaatatgatattgtttgtaatgggattgagctatcatcaggagctataagaaaccatgttccagaattaatgtataaattatttgagatcgcaggttattcgaaaaaagatgttaatagtaaatttagtggaatgataaatgctttgagttatggggcaccaccccatggaggaatagctccaggaattgatagaattgttatgcttttagcaaatgaaaaaaacataagagaagtcactatgtttccaatgaaccaaaatgcacaagatttgatgatgaatgcgccatctgaaatttcagatgaccaattaaaagaattaaatttaacaattaaaaataaaaagtaat

SEQ ID NO: 297742 - DNA, 822 bp, Unknown
  Bacterial polypeptide expressing nucleotide sequence isolated from the Sargasso Sea
gaccaagagtattcggaagaagttagattgaaatacagatttttggatttaagaagaaaaaaaattcataaaaatattattttaagatcaaaagtaatttcatttataagatatgaaatggagaaatatggttttttagagtttcaaactccaattttaacttcatcaagtcctgaaggtgcaagggattttttagttccaagcagacttaacccgggaaaattttatgcacttcctcaagcaccacagcaatttaaacagcttacaatgatttctggttttgataaatattttcaaatagccccatgcttcagagatgaagatgcaagatctgatagaagcccaggtgaattttatcaattagatatagagatgtcttttgttgagcaagatgatatttttcaaatagtagaaaaattaattaacagtttatttaaaaaattttctaaaaataaaattctttatcaaaaatttcctaaagtaagctactcagatgcaatgctaaaatatggaacagataagcctgatctaagaaatccactattaatttctgatttaactaacatatttgaaagagaggatgttaagttcgaaatatttaaaaaattaattaaatcaggttcgattgttagggcaatagttacaaagaaaacaaaagataaatctagaagcttttttgataatatagataaatgggcgaaagaatatggagctaatggtcttgcatattttacttttgttaatgagaatggtattaaaggcaaaggtccaattggaaagtttttttcagaggaatcactaaaagaaattatgaatattact

SEQ ID NO: 297743 - DNA, 624 bp, Unknown
  Bacterial polypeptide expressing nucleotide sequence isolated from the Sargasso Sea
aattgaagtctatatagatgaattgagcatactgaaccgatctgaaacccctcctatctctccttgggaaccccaagatacttcagaagcgttgaggctgaaacaccgttttctggatttgcgtggaccggaattgcaacggaatttaaagatgcgctacaacattacgcgcgttgctcgtaacgaaatgcaccgacaaggcttcatggaagttgaaacaccgatgcttacgaaaagtactcctgaaggagcgcgggactacctagtccctagtcgattgaatccgcaaaagttttatgcgctcccgcagtcaccccaactattcaaacaaatccttatggtttcaggaatggataaatatttccagatcgttaaatgttttcgcgatgaggatttgcgacaagaccgacaaccggagtttactcagattgatatcgaaatgtctttcggtaatgaaaaaataatttttcaaatgatcgaagatatgatggccgcaatttacaaggaagtgttgaacgaagaaatttcaacaccctttccgattttgaaatatcaggatgcgataaaccgttttggcacggataagcccgatatgagaatcgatatggaaatcgttgacctcgc

SEQ ID NO: 297744 - DNA, 902 bp, Unknown
  Bacterial polypeptide expressing nucleotide sequence isolated from the Sargasso Sea
ggaaaaaagttttcttatcttggatggattaataaaaaacgtgatcatggaaaccttttatttattgatttaagagataattatggcattacccaatgcattgtagataaggataattcttcattttctaatttagaaaaaattcaattggaaacagttgttaagataaatggtgaggttgttaatagatcagaggatacaattaataaagaaattcaaacaggagaaatagaggtttcaattgaaagttatagcgttcttggtatttgcaaagaattgcctatgcctgtttttagtgatcaagagtactcagaagaaataagattaaaatatagatttttagatttaagaaggaaaaaaattcatgaaaatattattttaagatcaaaagtaatttcatttatcagagatgaaatgaataaattaggttttttagaatttcaaacacctattttaacttcctcaagcccagaaggtgctagagattttctagtaccaagtagattaaatcctgggaaattttatgctttaccacaagctcctcaacaatttaaacaattaattatggtatctggatttgatagatattttcaaattgccccttgttttagagatgaagacgcaagagctgatcgaagtccaggtgaattttatcaattagatttagaaatgtctttcgttgaacaagaagatgtttttaaggtagtagaaaaattattagttaacacttttaaaaaattttcaaataaaaaattaatgtttgaaaaattcccaaaaatttcttactcagactcaatgttaaagtatggaagtgataaacctgatttgagaaatccactaataattgacgatataacagaaattttttctagagaagatgttacatttgaaatattcaaaaa

SEQ ID NO: 297745 - DNA, 739 bp, Unknown
  Bacterial polypeptide expressing nucleotide sequence isolated from the Sargasso Sea
aatgaataaatacagaactcatttatgctctgagctaaatatttctaatcttaacgacaaagttacattaagtggatgggtagacacaattcgtgatcatggtaacttaatttttattgatttacgagataattatggaattactcaatgtgtagttgattcccaaaataatacttttgatgatatttctaaacttagtaacgaaagtgtcattacaattcatggtaaggtaattaaaagatctgacgaaactataaataaaaatatatcaacaggagaaatagagattaaaatcgaaacttacatactcctttcttcttctgatattcttcctcttcctgttaattcagatattgattatggagaagaggtaagacttaaaaatagatttttagatttaaggcgaaacaaacttcataaaaatataattcttcgaagtaaaataatatcatcaataagagataaaatgatatctagaggatttacagagtttcaaaccccaattttaacatctacttctccagaaggtgcaagagattatctcgttccatctagaatccatcatgggcaattttatgcattaccccaagcaccacagcaatttaaacaattattaatgatggcaggttttgataaatattttcaaatcgctccatgttttagagatgaggatagtagagctgatagatcacctggagaattttatcagttagattttgaaatgagttttgtactcaag

SEQ ID NO: 297746 - DNA, 876 bp, Unknown
  Bacterial polypeptide expressing nucleotide sequence isolated from the Sargasso Sea
tctgggtttgacaaatattttcaaatagcaccatgttttagagatgaggacgcaagagcagatagaagtccaggagaattttatcaattagatgtcgaaatgtcttttgttgaacaagaggacgtttttgatgtcattgaaactttatttttaaaattatttaaatcatttagtaacaaaaaaatacttcatgaaaagtttccaagaataacctatgaagattcaatgcttaaatacggatcagacaagccagatttaaggaacccattagaaattacggatttaacgaatatttttgagagagaggacgtaaaatttgaaatatttaagaaattagttaggaaaggattaatagttagagcgttagttaccaaaaatacacaccataaacctagaagtttctttgatggaattgataaatgggcaaaagatcaaggttcatctggtcttgcatattttactttagaaaaagaggataagataagcgccaaaggaccaattggaaaatttttttcagaaacttcattaattgaagttattaatcaaacaaaagcagatattggagatacagtttttctttattgtggaaataaagatgatgttgaaaaaatattaagtgctgcaagaaataaaatagctgaggatttagatttaattgataatgatacattttcattttgttggattgttgattaccctatgtatgagattgatgatacaacaaaaaaaattaaatttagtcataatccgttttctatgccacaggtagaactaaataaattagacctttcaaatcctttaaatattaaagcttatcaatatgatattgtttgcaatggtattgagctatcatcaggagctattagaaaccatatt

SEQ ID NO: 297747 - DNA, 742 bp, Unknown
  Bacterial polypeptide expressing nucleotide sequence isolated from the Sargasso Sea
agatgagggaggtaaaggtctaggatatatttttttagaaaaagaaaataataatttagtgccaaagggacccatatcaaaatttttctctaaaaatgctatagaagagttaatcaaaacttgttcattaaaagatggagatagcattttcttctcttgtgataaaaaaacaatggttgagaaaatatcagggttagcaaggcaaaagttaggaacggcactcaatcttattgataagaataaatttattttttgttggatagttgatttccctttctacaaatataatgaagaagaaaaaaaaatcgattttagccataatcctttttcgatgccgcaaataaatatagaaaattttgataaagcggatcctttatctatcacagcttaccaatatgacttagtatgtaacggatttgagatatcttctggggcaataagaaatcatttgccagagtttatgtataaagttttttcaaaagttggctatagtaaaaatgaagtaaataatagatttcaaggtatgatcaaagcgttatcctatggggctcctcctcacggtggtatggctccaggaatagacagaatagtaatgttgctagcagataagcaaaatattcgtgaagttacactttttccaatgaatcaaaatgcagaagatctattaatgggagctccttcaataccaaaagatgaacaacttaaagaattaggagttaagacaataaagaaagaaaaataa

SEQ ID NO: 297748 - DNA, 811 bp, Unknown
  Bacterial polypeptide expressing nucleotide sequence isolated from the Sargasso Sea
tattttcaaattgcaccatgttttagagacgaagatggtagggcagacagaagtcctggagagcactaccagttggatatggagatgtcttttgttgaacaagatgacgtatttaatacagtagaacctattttctatgacttattcaaagaatttggagaagggaaaaaagtaaacatggcgccatttccaagaataaaatatagagactctctaaataaatatggaacagacaagccagacttaagaaatcctattgaattagttgatgttacggaaatttttgcatcaaaagaagttaatttaaaaatttttaaagatttaatctctaaaggcggtatcgtaaaagctatacctgctccaaataccctttcaaaaccaagaagtttttttgactcgttaaataactgggcaattaaagaaggggcaagtggattagcttacattacttttgaaaaatcaggaaataaaattaatggaaagggaccaatagcaaagttttttgctgaaaaatctatctcagaattattaaaaaagtgtaaaatttcagaaaaagactccgtattttttgtgtgtaataaagaaaatgaagctaacaattttgctggtattgccagacaaaagattgcagaggaattaaaaataatagacacaaatagctttaagttttgttggattactgattaccctatgtatgagtatgatgaaaaagagaaaaaaattgattttagtcacaatcctttctcaatgccacaattagatatcaaagattttgataaaaccgacccattgaagattttagcctatcagt

SEQ ID NO: 297749 - DNA, 838 bp, Unknown
  Bacterial polypeptide expressing nucleotide sequence isolated from the Sargasso Sea
gaatcagctcctttgccattcatgctggataaccgaaataatgctgaagaggatttaagattaaaataccgttatctcgaactaagaatggaggagcttcaaaaaaatcttctgacacgacacgagacataccaagcaacaagaaattatttatcagaaaatcaatttgtagaagttgagacccctatcttaatgaaatcaactccagaaggtgctcgagactatttagtaccaagcagggtgcatagaggtaaattttatgcgttgccgcaatccccacagatttataaacagattctaatgatttctggatatgatcgatattttcaaattgtcaaatgttttcgagatgaagacctaagagctgatagacaaccagaattcacccaaatagatatagagatgtcatttgtagatgaggaagatgttttcaggtatatggaaggattaaccagacatatatttgaaactgtctcaaagataaatcttcctgattcttttccaagaataacctatcaagaagcaatggaaacatatggttctgacaaacccgatttaaggtatggccttaaactaattgaattaaaatcttatacagatgtttcagattttaaagcatttagctctgtagaaagggtcaaaggaattattgtaaatggtggtgaaaaatattcaaggaagatgattgatgagttaactgacttcatcaaaaaatttaaggctaaggggttggcatggatgaaattgaaagataattcatttgatggtgggatatcaaaattcttctcaattgaattgcaaaaaaagatgcaaagcgagctggatattaaaaatggtg

SEQ ID NO: 297750 - DNA, 850 bp, Unknown
  Bacterial polypeptide expressing nucleotide sequence isolated from the Sargasso Sea
agagataattatggaattacacagtgtgttattgatggaactcactctttatttgaagaggtaagcaaattaagtaatgaaagtgttttaacaattagcggagaagtcgttaaaagatctgatgagacaattaacaaaaatcttcaaacaggtgaaattgaaataaagattcaagattacaaaattttatctaaatctgaaattctccccttacctgttaattctgatatcgaatatggagaagaaataagattaaaatatagatttttagatttaagaagaaataaattacacaaaaatattatattaagaagcaaaataatatcagatattagaaagaaaatgattgatagaaactttgttgaatttcaaactcccatcctgacttcatcatctcctgaaggagcaagagattatttagtcccatctagaatacatcagggtaaattttatgctcttcctcaagcacctcagcaatttaaacaattattaatgattgctggttttgataaatattttcaaattgcaccatgttttagagatgaagatagtagagcagatcgttctccaggtgaattctatcaactagactttgagatgagttttgtaactcaagaagatgtgtttgatgctattgaaccagttttatttgaaatatttgatgaaaataagaaaaataatgaaacaaaggtaagtccttatccatttaggagaataccttacaaagagtcaatggaagtttacggcactgataagcctgatttacgaaatccacttgttatagatgattatacaaatgtatttaaaggttcaaattttaaaatatttagtaatcgaatagaaaaaggat

SEQ ID NO: 297751 - DNA, 718 bp, Unknown
  Bacterial polypeptide expressing nucleotide sequence isolated from the Sargasso Sea
atgatgtcaggatttgaccgttattatcagattgcaagatgctttagagatgaggatctcagggcagatcgtcagcctgaatttacccaactcgatgttgaaatgtcatttgttgatcaagatgacattaaaagtgagatggaatcaatggtcagggaactttttaagtcggtactcgatatagaccttgaaaaacaattttcacaaatcacgcatgctgaagcaatggatcgctttggctcagacagcccacatttgggtatagaaatggagctcactgaagtcagcgatctcatgagggatgttgaatttaaagtttttgctggtccagcaaacgatgatgattctagagtcgcatgtcttgttctgagagattcttctgatttgtccagaaagcaaatcgatgattatactgattttgtatcaaattacggcgcaaaaggattggcctatattagagtcaatgaaattgaaaaagggattgatggtcttcagtcaccaatacttaaatttttaaatgactcagtcaccaatcaactgattgagacactttcattaaaaaacggtgataccgtattttttggagcagataagagagaaattgtgaatgcttctctaggtgctcttcgagtaaaaatggcagaggatttcggtttaatcaaagacgggtggtttcctctttggataactgactttccttatgtttcattgggatgag

SEQ ID NO: 297752 - DNA, 482 bp, Unknown
  Bacterial polypeptide expressing nucleotide sequence isolated from the Sargasso Sea
ctgggtaaccgagttcccccttgtggaatatgacgaagcagaaaaaaaatatgctgccatgcatcatcccttcaccgctccgcatgaggaggatctagataaatttgaatctgaccctggagctattaaggcccgagcctatgatttggttctgaatggtaatgaaattggtggaggcagtattcgtattcaccaaaaggatgtgcaggaaaaaatgtttaagcttcttggaatcggcaaggaagaagctgaggcaaaattcggatttcttctagatgctctgcaatacggcgcaccacctcattgtggtattgccatgggtctggatcgtattgtgatgctgctggccggtgctgattccattcgcgatgtgatcgcatttcctaaaacacagaaagccacttgtttgatgacccaggcaccttctcaagtggataaaaagcagatgaaggaacttaaactgaaagccgacctgagttgat

SEQ ID NO: 297753 - DNA, 849 bp, Unknown
  Bacterial polypeptide expressing nucleotide sequence isolated from the Sargasso Sea
gataacagatcgtaaaagtgcagaagaggattttcgattaaagtataggttcttggaattaagaacaaaagaattacagagtaatatagaagttcgacataaaacctatcaagcagtacgaaaatttctttcaaataataatttcctagaagttgaaacaccagttcttatgaaatctactccagagggggctcgagattatttagttccaagcagaatacacaatggaaagttttatgccctgcctcaatcaccccaaatgtataaacagcttttaatgatatctggatttgatagatattttcaaattgtaaaatgttttcgcgatgaagatcttagagcagaccgtcagccagaatttacgcaaatagatattgaaatgtcttttgttgatgaaaatgatgtaatgaaaaaatgtgaggaattaacaaggtcaatttttaaagatgtaaaaaacattgacctagtgaatccattcccaaaaatgtcttattctgaagcgatgtcgaagtatggcacggattgtccagatttgcgttatgatattatgttaaatgattttaaaccattttcagaaaaaagtgattttaaagcatttgattcggctgaatctgttatgggaattgtcgtacctggtggtgccaaatattctcgaaaagaaattgatatttttactgatcatgttaagaggtataaagcaaaaggcttagcatggatgaaatcaattgaggggaaattaaatggaggtatttctaagtttttcaatgatgatttacaaaaagaaatcatagcaagtctaaatgtaaatgatggtgatattttgtttcttattggagatgataataaaat

SEQ ID NO: 297754 - DNA, 339 bp, Unknown
  Bacterial polypeptide expressing nucleotide sequence isolated from the Sargasso Sea
tttgtaatggcgtagagctatcatcaggcgctatacgaaatcacgttccagaaattatgtataaggcctttgaaatagctggctataacaaagatcaagtacatgaaaaatttggaggaatgataagcgcttttacttatggcgtgcctcctcatggcggtattgcaccaggaatagacagaatagtgatgttacttgctcaagaaaaaaatattcgtgaggtaatattgttcccaatgaatcaacaggcccaggatctgatgatgctggctcctgctgaagttgataagactacgcttgatgagttgaatttagaagttaaaccaactgaagaataaa

SEQ ID NO: 297755 - DNA, 765 bp, Unknown
  Bacterial polypeptide expressing nucleotide sequence isolated from the Sargasso Sea
tatgacgaagtttagaactcacaactgctcagaacttaccgagaaagatgttggaaaagatataaaactttctggttggttacacagaaaaagagatcatggaaatttactgtttatagatctaagagatcactttggtattacacagtgcgttattgaaaacaaagataaaaattttaaaatattagaaaaattaaaaccagagtcagtagtcttgattcaaggaaatgttgcaaaaagatcaccagatactcaaaacaaagaattaaaaactggaatgatagaagtaaaaataaaagaatttgaaattctgtcttcagctaaagaattgcccatgcctgtatttggtgagcaagattatccagaagatataagacttaaatatagattcattgatttaagaagaaatgaaatgcacgagaatataaagcttcgatctgaaatattatcttttttaagaacagagatggtaaaaaataattttttagaatttcaaacaccaattttaaccgcgtccagtccagaaggggcaagagattttttagttcctagtcgtgttcatccgggaaaattctatgccttaccacaggcgcctcaacaatttaaacaaatgattatgatatccggttttgatagatattttcaaattgccccatgtttcagagatgaagacggtagagcagatcgaagtcctggagaacattaccaattagatatggaaatgtcttttgtagaacaagaagatatatttaaaatagttgaacc

SEQ ID NO: 297756 - DNA, 914 bp, Unknown
  Bacterial polypeptide expressing nucleotide sequence isolated from the Sargasso Sea
ttttgtcaataataattttttagaggttgagactccagttttgatgaaatcaactcctgaaggtgcgagagactatttagtaccaagccgtttgcaaaatggaaaattttatgcattgcctcaatcgcctcaaatttacaagcagatactaatgatatctggctatgatcgttattttcaaatagtaaaatgttttcgtgatgaggatctgcgtgcagatcgccaacctgaatttactcaaatagatatagaaatgtcatttgtcgatgaagaagatgtttttttaaatatggagaatcttactagagatatctttttatccgttagaggaataaaactacctaatactttcccaagaataacctataagaaggcaatggaaacatatggttctgacaagccagatacaagatacgaaatgaaactcgtagatttaaaatcatacacagataggtcaaatttcaaggcatttagctctgttgaatctgtttatggtattgtagtagaaaaaggagcaagctattctagaaagatcattgatgaattaacggatgaagtaaaaaagcacaatgctaaaggccttgcttggatgaaatatgaaagcggtgagtttggtggcggagtatcaaagtttttttctgattcgttgcaaaaagaaatagtagaaaacctaaatataaatgatggcgatattttatttatggttggagataaaaaaaatattgtattcaaagctcttggtaatctcagagtattggtcgctcaaagagaggggcttataaataaagatgtatttgaaccgatatgggttacggaatttcctatgtttgattatgatgaagataacgataggtatattgcaatgcatcatccgtttactgctccaagagagtctgacatcgataaattagaca

SEQ ID NO: 297757 - DNA, 850 bp, Unknown
  Bacterial polypeptide expressing nucleotide sequence isolated from the Sargasso Sea
tttaaagaattagaaaaaatccaattagaaagcgttattaaaattaatggaaaagttctagaaagaactaaagaaactattaattcagaacttagaactggagaaatcgaagttaatattatttcatttgaaatacttggaaaaagtaaagagcttccaatgccaatttttagtgatcaagattattctgaagaaataagacttaaatacagatttttagatttaagaagaaaaaaaattcatgaaaatataattttgagatcaaaagtaatatcttttataagaagtaaaatgcttgagttaggttttttggaattccaaactccaatattaacctcatcaagtcctgaaggagcaagagattttttagtaccaagtagactaaatccaggaaaattttacgcacttccacaggcaccacaacaatttaaacagttagttatggtttcaggttttgacaaatattttcaaatagctccttgctttagagacgaagactcaagagccgatagaagtccaggagaattttatcaattagatctagaaatgtcttttgtagaacaagaagatgtttttaatatagtagaaaaattgatgtctagtttatttaaaaaattttcttctaaaaaaattttattcgataaatttccaaaaatttcttatgaagaatctatgttgaaatatggtacagataaaccagatctaagaaatccattaattataaacgacttaacagatatctttacccgtgaagacgttaagtttgatatatttaaaaaattagttaaatcaggctcaaaagtcagatcaataattactaaaaaaactaaagataagcccaagaagtttt

SEQ ID NO: 297758 - DNA, 446 bp, Unknown
  Bacterial polypeptide expressing nucleotide sequence isolated from the Sargasso Sea
tactaaaaaaataaaatttagtcataatccgttctcaatgcctcaaggtgaaataaataaattagacttatctaatcctttaaatattaaggcctatcaatatgatatcgtttgtaatggaattgagttatcatctggtgcaattagaaaccatgttcctgaattaatgtataaattatttgaaattgctggttattcaaaaaatgatgtaaatagtaaatttagtggaatgataaatgccttgagctatggagctccgcctcatggaggtatagctccaggcatagataggattgtcatgcttttagcaaatgaaaaaaatattagagagattactatgtttccaatgaatcaaaatgcacaagatttaatgatgaatgcaccatctgaaatttctgaggatcaattaaaagagctgaatttatctttaaaaaagaaaagttaat

SEQ ID NO: 297759 - DNA, 470 bp, Unknown
  Bacterial polypeptide expressing nucleotide sequence isolated from the Sargasso Sea
gctgaaataccaacctggagaaattgaaataaaaataaaaaattttgaaattttaggcaaaactaaagaattaccaatgccagtattttcagatcaagaatattcggaagaaataaggttaaaatatagattcttagatttaagaagaaaaaaaattcataaaaatataattcttagatcaaaagtaatttcatttattagaaaagaaatggaaaaacttggttttaatgaatttcaaactccaatactaacatcatcaagccctgaaggtgcaagagattttttagttccaagcagattaaacccaggtaaattttatgcattgccacaagctccacaacaattcaaacaattaataatggtttcgggatttgacagatattttcaaattgctccatgttttagggatgaagacgcaagagcagacagaagcccaggagaattttatcaattggatattgaaatgtcat

SEQ ID NO: 297760 - DNA, 439 bp, Unknown
  Bacterial polypeptide expressing nucleotide sequence isolated from the Sargasso Sea
atgcgtagccactattgcggccagctgaacgaatcgctggcggatcaggaagtaactctttgcggctgggttcaccgtcgccgtgaccatggtggggtcatcttccttgatatccgtgatcgcgaaggcctggcccaggtggtgtttgatccggaccgcgctgaaacctttgccaaggctgaccgtgtgcgcagcgaatatgtggtcaaggtaaccggcaaggtgcgcctgcgtccggaaggtgcacgcaacgccaacatggcgtcgggcgccatcgaggtactgggctacgagcttgaggtgctgaacgaggccgagacgccgccgttcccgctcaacgaatataccgacgtgggcgaggaaacccgcctgcgctaccgctttatcgacctgcgtcgccctgaaatggccgagaagttgaagctgcgttcgcgcatca

SEQ ID NO: 297761 - DNA, 709 bp, Unknown
  Bacterial polypeptide expressing nucleotide sequence isolated from the Sargasso Sea
ttgcatagatatagatcacataattgtggagaattaaataaaaaagctactggttcgactgttaaaatttcgggctggcttcataagaagcgtgatcatggaaatttattatttttagatattagagacaattacggtattacacaatgtgtgattgatcaaagtaataaattattcaaaaaattagaaaaaacatctttggagactgtactcttaattgaaggagatgttgttgaaagatcaaaagatactattaacaaagacttacctactggtgaaattgaaattcatataacaaagtatgaaaatcttggcgaatgttctggattaccaatgccagtattcagtgatcaagagtatgctgaagaaattagattaaagtatagatacatagatttgagaagaaaaaaaattcatgaaaatattttattaagatctaaaattatttctttcataagagaaaatttaaaatcaatgggttttaatgagtttcaaacgccaatccttacttcttcaagcccagaaggagcaagagattttttagttccaagcagattaaatcctggcaaattttatgccttacctcaagcgccacagcaatttaagcagttaattatggttgctgggtttgacaaatattttcaaattgccccatgttttcgtgatgaggatgctagagccgatagaagtccaggagaatttatcaata

SEQ ID NO: 297762 - DNA, 868 bp, Unknown
  Bacterial polypeptide expressing nucleotide sequence isolated from the Sargasso Sea
ttgaataaatatagaacacataattgtggccaactttcgaaaaaaaatagcaaatcaaatgtagttttatctggttggattaacaaaaaaagggatcatggaaatttattatttatagatttaagagataattttggaattactcaatgtctagtagataaagataataaatactttaaagaattagaaaaaatacagcttgaaagcgtaataaaaataaatggagttgtaaatgaaagaacatccgacactaaaaacaaagaattaaaaacgggagaaatagaagttaaaattatttcatacgaaatactgggaacatgtaaagagctccctatgcccgtatttagcgaccaggaatatgctgaggagataagattaaaatatagattcttagatttaagaagaaaaaaagttcatgagaatataatattaagatcaaaagtaatatcatttatcagagaagaaatgataaatttgggatttttagaatttcaaactcctattctaacatcatctagccctgaaggagctcgagattttttagttccaagcagattaaatcccggaaaattttatgcacttcctcaagcgccccaacaatttaaacaattaataatgatatcaggctttgataaatattttcaaattgccccatgctttagagatgaggatgccagggcagatagaagtccaggtgaattttatcaactagatctagaaatgtcttttgttgaacaagaagatgtttttgacgtagttgaaaagctaatgctcaaactatttaaaaaattttctgataaaaaaatattatctgaaaaatttccaaaaatcacttttgaagattctatgctaaaatacggaacagaca

SEQ ID NO: 297763 - DNA, 667 bp, Unknown
  Bacterial polypeptide expressing nucleotide sequence isolated from the Sargasso Sea
aattataaaattatagaggattccatcatagaatctttattatcaactttagaagttcaggaaggagatattattttctttggggcaggaaaaagaaatattgtgaatgattcattggctgcgttgcgtgatctcgtcgcaaaagatcttgatttacttacttgtgaatgggcaccatgttgggtagtagattttccaatgtttgagaaaaataaaagtggagatttaacaccattacatcatccatttactgctccgaaatgtaccgcagatgaactaaaaaacaacccgcttggtgctttaacagaggcatatgatattgttttaaatggtactgagcttggaggcggttctgtaagaatacatgatagattgatgcaagagactgttttgaagcttctcaatattaatgagaaagaggcagaagagaaatttggtttcttaattgcagcattacagcacggctgtccgccgcatgcaggactggcaattggttttgatagaatgattatgcttatgactggttcggattctataagggatgtaatcgcctttcctaaaactcaaacagcatcttgtttacttactgaggcaccaggacaagctgcgcaggaacaacttgaagaattacatattaggttccatggactagaaaaggaggattaag

SEQ ID NO: 297764 - DNA, 847 bp, Unknown
  Bacterial polypeptide expressing nucleotide sequence isolated from the Sargasso Sea
tccattgagcttggacgtgaagacgtaattcaagttaagggtaatgtaattgagcgcgaatcaaaaaatccaaatatttctacaggaagcatcgaattacaagtaaacgaattaacaattttaaacaaagcgcaaacccctccatttacaattgaaaatgaaactgacgggggagatgaactacgcatgcagtatcgctatttggatttaagaagaaatcctgtaaaagaaaatctgatcttaagacatcgggttacaatgtccattagaaattttctttccaaagcagattttattgatgtagaaacaccttatttaataaagtcaacccctgagggtgcaagagattttatagttccttcaaggatgaataacggacaattttatgccttgccacaatcacctcaaaccttcaaacaactgcttatggtgggtggatttgataaatactttcaaattgtaaaatgcttcagagatgaagatttaagagccgacaggcaaccagagtttactcaaattgattgtgaaatgtcctttgtagaacaagaagatgttttgtctcaatttgaagaactaatcaaacatttatttcaagaaatcaagggtataaaattgactgaatttccgagaatttcctatgcaaaagctatggaaaagtatggtagcgataagccagatattcgttttggaatgacctttggaaaccttaatgaaattgctaaagggaaaggttttaatgtattcgacagtcaagagttaattataggtattgctgttcctggcggtgccaattatacccgaaaagaaattgataattggattgattgggtcaaaaaggccccaagtg

SEQ ID NO: 297765 - DNA, 801 bp, Unknown
  Bacterial polypeptide expressing nucleotide sequence isolated from the Sargasso Sea
attgggtgaatcaaagggtcagccttcaggcagtttgattaaacaaatgaaatcatttgggttggagctttccaaaaaatctcagaaattaaaagaaattgaagagaatttagaaaacattcttctaaggttacctaatttgccccttgactcgacacttgttggaaaaaatgacaaaaacaataaagttatagaaacatttaatgaaaaagataaaattaattcttctgtgccccattgggatcttggagaaaaatttaaaatcattgatttggaaaaaggggtcaaattaactggtgctagatggtatttattagctggaaaaggtgcaatgcttcagagagcacttgttcaatggatgctcaatgagcacgtatttaataatggttataaagaaattgctcctccctatatggttaataaaaatacaatgactggttctggtaaccttcctaaatttgaagaaactttattcagtgacaaaaataatgatttatggttaattccaacaggagaagtttcattaaataatatgtttggaaatgaaattattaagcatgagcttccattaaaatatgtaactcacacaccttgttttagagatgaaaaaagttcagctggtagagatactagaggcattaaacgagttcatcaatttgaaaaagttgaattatatagatatgaacatccttcaaactctatgaaggcatttaatgaaatggtttccgaagtatctaaattatgtgaggcattaaatttcacttacagagttgtagaactttgcacaggagatattggatt

SEQ ID NO: 297766 - DNA, 661 bp, Unknown
  Bacterial polypeptide expressing nucleotide sequence isolated from the Sargasso Sea
aatgattaaaagaacacatacatgcggtgaactaagtattttaaatgaaaatgaaaatgtttcattaaatggctggatttcaaaacgaagagatttagggggtttaatattttttgatttgagagacagatatggaagcacacaaattgtttttgatgataaaaaaaatgctgaagcatttaacatcgcaaaaaaattaggttttgaagatgttataggaattactggattggtaattaagagacctgttgaagctataaataataaaatggttactggtgaaattgatattttagtaaataaaattttagtttataatgaatctattcctcctccatttgatataaatgatagaaactctgcatcagaagaacatagattgaaatttagatatttggagctccgcacaaaagagcttcaattttatatgaaaactagacatgagacaagtctcgaagtaagaaagtttttatcagatcaaaatttctttgaaattgaaactcccattctcatgaaatcaacacctgaaggtgctagagattttttagttcctagtcgtattcataaaggtaaattttatgcattgcctcaatctccacaaacttacaaacaattattaatggtttcgggttatgatagatattttcaaattgttaaatgt

SEQ ID NO: 297767 - DNA, 792 bp, Unknown
  Bacterial polypeptide expressing nucleotide sequence isolated from the Sargasso Sea
gatattaatgaatcaagtaaagatttagtaaatcaagtaaaaaaaatagggcgagaatatgtggtttctgttaaaggaattgttgaagaaaggcaatctaaaaaccctaatataaaaactggtgatatagagatttcattgtctgaagttgaaattctcaatgagtcgaaaattcctccttttacaattgatgataatacagacggaggggaagagttaaggatgaaatatcgatacctcgatctcagaagaaatttgataaagaataatttaatttttagaaataatgtaacgcttgaaattcgtaaatacttgaacgagtcgggttttatagatgtagaaacaccttatttaataaagtcaacaccagaaggagcgagagattttattgttccctcaagaataaataaaggtgaattttatgcccttcctcaatctcctcaaacattcaaacaacttttgatggttggtggaattgataaatattatcaaattgtaaaatgttttagagacgaggatttaagatccgatcgtcaaccagaatttacacaaattgattgcgaaatgtcttttgttggacaagatgatgttttgatgctatttgaaaaccttgtaaagaatactttcaaaaaatgtattaatgtcacgctagaagattttcctaaaataacttatcaagaggcaatagaaacttatggttctgataaacccgacacaaggtttgaaatgaaaatttttgattgttctgaaagcagcaaagaaaaaggatttaagatttggacgatagtgaat

SEQ ID NO: 297768 - DNA, 818 bp, Unknown
  Bacterial polypeptide expressing nucleotide sequence isolated from the Sargasso Sea
attggggaaacaggtaatggtttcaggatgggtccatcgaagaagagatcatggtggcgtaatattcattgatctcagagatgtttctggaatacttcaattggttttcgatccagagaatcaagatctttttgcaactgcagaaaaaataaggagtgaatttgtactgtcagttacagggattgtcagagaaaggcctcatggaacaatcaatgatcagatgaagacaggtgaagttgaattgctggttgaaaaaggagaagttctgagtgcctcagagactcctcctttccatcatgacgaagcaacaagtgaagacattcgcctgaaataccgatatctcgacctcaggcgagaagacatgtcaaacaatatcaaagtcagacatgagatcacaaaatctttgagggagtatttgaataatgcatcttattttgaaatcgagacgcctattttaaccaaggccactcctgagggcgctagagactatcttgtaccaagcagaactcagcaaggaaatttctttgctctgcctcaatcaccgcagttatttaagcagctcctaatgatgtcaggatttgatcgttattatcagattgcaagatgctttagggacgaggacctgagggcagatcgtcaacctgaatttactcaacttgatgttgagatgtcatttgttgatcaggatgatgtcaaaagtcagatggaatcgatggtgaaagatttgtttaaatcagtgcttggtattgatcttgaaaagcagtttcctcaaatcacgcatgcagaggcaatggaccgatttggttcggatagtccac

SEQ ID NO: 297769 - DNA, 694 bp, Unknown
  Bacterial polypeptide expressing nucleotide sequence isolated from the Sargasso Sea
aatgataaaattatttggcaaaggtccagttggaaaatttttttcagaagagtcattaattgaacttatgaaattaacaaattctgaaataggggacactatttttttatcttgtggtaaacaaaaagatgtagaaaagattttatctctagcaagaactaagattgcagaagaattaaatttaattcaagataatgaatttgcattttgttggattgttgattacccaatctttgagttagatgaattaactaataagattaaatttagccacaaccctttttctatgcctcaaggagatattcataatttagatttatcaaaacctctaaatttgaaggcatatcaatatgatattgtttgtaatggaatagaactttcttcaggagcgataagaaatcatatacctgaattaatgtataaactttttgatatagctggatattcaaagaaagatgttgatgataaatttagcggcatgattaatgccttgagttttggcgctccaccgcatggaggtatagcacccggaatagataggatagtcatgcttcttgcaaatgaaaaaaatattagagaagtaactatgtttccgatgaaccaaaatgcccaagatttaatgatgaatgcaccatcaaaggtaaatgaaattcaattaaaagaactaaacttggctttaaaaacaaaaaaatag

SEQ ID NO: 297770 - DNA, 837 bp, Unknown
  Bacterial polypeptide expressing nucleotide sequence isolated from the Sargasso Sea
ttaacgcaatgtgttatagataaaagtaataaatattttaaagatttagaaaaaattcagcttgaaagtgttattaagattaatggaacagttattgagagaagcaaagaaacaattaattctgatcttaaaactggtgaaatagagataaatatagtttcatttgaagtacttggtaattgtaaagaattaccaatgcccatttttagtgaccaagactatgcagaagaaataagattaaaatatagatttttagatttaagaagaaaaaaaattcatgagaatataattttaagatctaaggttatttcttttataagaaataagatgcaagaactagattttttagaatttcaaacaccaattttaacttcatcaagtcctgaaggagctagagattttttagttcctagcaggttaaatccaggaaaattttacgcacttccacaagctccgcaacaatttaagcaattagtcatggtttcgggttttgataaatattttcaaatagcaccatgttttagagatgaagatgcaagagcagatcgaagtccaggagaattttatcaactagacttagagatgtcttttgttgaacaagaagacatatttaatgttgttgaaaaactaatggttagtttgtttaaaaaattttcatccaaaaaaataattaacgaaaactttcctagaatttcatatgaagacagtatgcttaagtatggcacagataagccagatttgagaaatcctttattaataagtgatttaacaaatatatttacacgtgaggatgttaaatatgatatatttaaaaagttagttagcaaaggttcaaaa

SEQ ID NO: 297771 - DNA, 769 bp, Unknown
  Bacterial polypeptide expressing nucleotide sequence isolated from the Sargasso Sea
tcttcgctttacctcagtctccacattatttaagcaaacacttatggcttccggttttgaaaagtattttcaatttgctaaatgttttagagatgaagatttaagagctgatcgacagccagaatttacacaattagacatagagatgtccttcgcagattccaaagaagttatgagcttaattaccaaaatgattaaacaagtattcaaagaatctctgtcagttgatttgggagattttgtagagattacataccttgaagctatcgagaaatatggtgttgataaaccagacctaagaaatcctctagagttagttgaagttaaagaattgtttaaagaatgtgattttaaggtttttaatgaaccagcaaatgacaaagattcaagaattgcagcgattaaagtgcctaacgggaaattattaactaggaaacaaatagatgagtataccgagtttgttggaaactatggtgcaaaaggactagcttacataagggtagaagatccctcgaaagggaaagagggacttcaatcgccaattataaaatttatagaggattccatcatagaatctttaatagaaactttagaagttcaagatggagatatcattttctttggagcaggaaaaagaaatattgtgaatgattccttggctgcattacgggatcttgtcgcaaaagacctagatttacttacttgtgaatgggcaccatgttgggtagtagattttccaatgtttgaaaaaacaaaagtggagatttaa

SEQ ID NO: 297772 - DNA, 502 bp, Unknown
  Bacterial polypeptide expressing nucleotide sequence isolated from the Sargasso Sea
gtagagacgccgatgctcatcaagtccacgccggagggggcgcgagacttcgtggtgccctcgcgcatgaacgcggggcagttctacgccctgccccagtccccgcagacgttcaagcaggtgctcatggtggcgggcatggaccgctacttccagatcgtcaagtgcttccgcgacgaggagctgcgcgccgaccggcagcccgagttcacgcaggtggactgcgagatgtccttcgtgacgcaggaggacgtgctgagcaccttcgaggggctcatccgcaaggtcttcaaggagctcgcgggggcggacctgccgcccttcccgcgcatggagtacgtcgacgcgatgcgcgactacggcatcgacaagccggacctgcggttcgacatgaagctcgcggacctgacgggcctcgtgcagggccaggcggggtgcgcgagcttccccatgttcagcggcgcggggctggtggtggccatcgccgtgccgacgctgggca

SEQ ID NO: 297773 - DNA, 676 bp, Unknown
  Bacterial polypeptide expressing nucleotide sequence isolated from the Sargasso Sea
ctgcgcacgcattttgctggcgaattgaacgccgctgctattggacagactgttactctcgcgggctgggttgcccgtcgccgtgatcacggtggagttatttttgttgaccttcgcgattcttccggtattgcacaggttgttttccgtaaggctgatgttgcagagcaggctcaccatttgcgctctgaatactgcattaaggtcacgggcgttgttgaggcacgtccagaaggttccgagaatcagaacttggcctctggcgagattgagatcaacgtttccgaactggaagtgctcaatagctgtgcgccactgcctttccaacttgatgatgagcctggcgaagagatccgcttgcggtaccgctaccttgatctgcgccgtgataagccagcgtacgatcttcgactgcgctcgaaagttaatgcagctgcccgcgaggttcttgctcaacatgactttgttgagattgagacaccgacaatgacgaggtccacgccagaaggtgcacgcgactttttggttccggcacgtctgcagcctggcaccttctatgcattgccacagtctccacagcttttcaagcagcttcttatggtggctggaatggaacggtactaccagatagcacgatgctaccgggatgaggatttccgtgctgatcgacagcctg

SEQ ID NO: 297774 - DNA, 512 bp, Unknown
  Bacterial polypeptide expressing nucleotide sequence isolated from the Sargasso Sea
tgataaacaacaatttgccttttgttggatagtagactacccaatgtttgaaagaaactctgtaacaaaaaaaatagaattcagccataatcctttttcaatgccccaaggtgatttaaaacaattaaactttaatgaacctttagagatgaaagcatttcaatacgacatagtttgtaatggagttgagttatcatctggagcaattagaaatcatttgcctgaattgatgtataaacttttttcaattgtcgggtacgataaagatgatgtaaaagaaaaatttagcggaatgttaaatgctctaagttatggcgcacctccacatggtggaatagcgccaggtattgatagaattgtaatgctacttgcaggtgtacaaaatataagagaagtaacgttgtttccgatgaatcaaaatgcacaagatcttatgatgggagctccaaccaaagtagatgataagcaattaaaagaattaaatattaaaatagagactaaaaaaaactaat

SEQ ID NO: 297775 - DNA, 580 bp, Unknown
  Bacterial polypeptide expressing nucleotide sequence isolated from the Sargasso Sea
ctttggtgcaggttcttctgaaatagttaatttaagtatgagttctttaataaaaagacttggaaaagatttagatttatatcaaaaagattgggcgccttgttggataactaatttcccaatgttcgaaagtgatgctgataatttgaaagcactccatcatccatttacaagacctaaagagaatttagaaaactttagaaaggatccatctgaggctcaagcttatgcatatgacttagttcttaatggttatgagattggcggaggttctttaagggttcatgactctaaaatgcaatcagctatctttgatgctctaaatatttcaaatgaggaagcaaatcttaagtttggattcttgcttgacgctcttaaaactggatgtccacctcatggaggaatagctcttggtctcgatagaattgtaatgctacttactcaaactgaaaatataagggacgtaatagcattcccaaaaactcaaagtgcatcatgtcttctaacagatgcaccaaacattgttgatgagtctcaacttaatgaacttcatataaaaaaagatcttgatgaggaataa

SEQ ID NO: 297776 - DNA, 583 bp, Unknown
  Bacterial polypeptide expressing nucleotide sequence isolated from the Sargasso Sea
tattattggtgacgatataaaaacaacgcaattatcattaggtgcgctacgtattgcaattgctaaaaaagaagagtatacaaaatcaaatgattttaaacctgtatggattacagattttcctatgtttgagtataaccaagaagacaaacgttatcattcgctacaacatccttttacacaaccaaaatcaaatgacctagagaaactaaaatcttcaccggagtctataccatcaaaacaatatgatttaataattaatggctatgaggtggctggtggttctgttaggattcataattctaatatgcagaaagtaatttttgatatacttggtattgatcgtaaagaagccaatgaaagattcggtttttttatagatgcgctcaaatatggaacacccccgcatggtggtatagcatttggatttgatagattagttatgttgctagctggtactaataatatcagagatgttattgcattcccaaaaacaacatcggccatgtcacttatggatggcgcaccaagccctgtttcaaaaactcaaatgaaagaactaggaattcaaattaaaaaatga

SEQ ID NO: 297777 - DNA, 639 bp, Unknown
  Bacterial polypeptide expressing nucleotide sequence isolated from the Sargasso Sea
attgaataaatacagaacacacacttgcggagaactaactttaaacaacaaggatcaaacaataaagttatcaggctggataaataagaaaagagatcacggaaatttattatttttagatttacgagatcactatggactaacacaatgtgtaattgataagggaaaaaaaatttttaaagaaatagaaaaacttccattagaaaccgtgctacaagtagaaggtaaagttttggtgagagaaaaagatacaattaacaaaaatttaaatactggagaaattgaagtaggaattgaaaaatataaaatacttgccagaactaaggaattaccgctacctgtcttttcagatcaagaatactctgaagaaattagactaaagtacagatttttagatttgaggagaaataagatacataataatattattttaagatctaaaatcatttcatttattagatctgaaatgcaaaaatatggttttctagaatatcaaacacctatattaacttcatctagcccagaaggtgctagagattttttagtgccaagtagactaaacccaggtaagttttatgctttacctcaagcaccacagcaatttaaacaattaatcatggtatctgggtttgataatat

SEQ ID NO: 297778 - DNA, 870 bp, Unknown
  Bacterial polypeptide expressing nucleotide sequence isolated from the Sargasso Sea
aatttactattcattgatctaagagaccactatggaattactcaatgtgttatagaaaataataataagtatttccctattcttgaaaaaattagacctgagtctgttttaaaaatctctggtaaagttttagcaagaagtgaaggaaccataaattcggaactaagcacaggcaaaatcgaaatagcaatagatactgttgatattttatctgagtcaaaagaactgccaatcccagtatttggtgagcaagactatccagaagatataagattaaaatatagatttttagatcttagaagagaagaaatgcacaataacataattttgagatccaaagtaatttcttttataagaacagaaatgctgaaacttggttttttagagtatcaaactcccattctgacttcatctagtccagaaggagcaagagattttttagtacctagcagactaaacccaggaaaattttacgcgctccctcaagcacctcaacaatttaaacaattaattatggtttcaggttttgataaatattttcaaatagcaccatgtttcagagacgaggatgcaagagctgatagaagtcctggtgaattttatcaattagatttagaaatgtcttttgtcagtcaagaagatatttttagtgtagtcgaaaaacttatggttggattatttaaaaaattttccactaagaaaatcttgtttgagaaattcccacgtattccttttaatgagtcgattgaaaaatatggaacagataaacctgatttaagaaatccactaataataaacaatataacccaagttttaaatcgagaagatgtaaaatttcaaatctttaaaaaattaatcaaatcaggatct

SEQ ID NO: 297779 - DNA, 502 bp, Unknown
  Bacterial polypeptide expressing nucleotide sequence isolated from the Sargasso Sea
taaatttgcattttgttggattactgattatccgatgttcgagctagatgaaaaaaacaacaatatcgtgttcagccacaatccattttcaatgccacaaggagatatcaataatttagattttaataaacctttaaatataaaagcatttcaatatgatatagtttgtaatggaatagaactttcttcgggtgctataagaaatcatatacccgatttaatgtataaattattttctgttgcaggttataaaaaaaccgatgttgataaaaagtttagtggaatgattaatgcattaagtttcggggcacctcctcatggtggtatcgcccctggtatagacagaattgtgatgttattagccaataaacaaaatattagagaagttactttgtttccaatgaatcaaaatgcacaagatttaatgatgcaagctccatccgaagttgaaacaaagcaattaaaagacttaggaattaaaatagaaaataaaaaaaattaa

SEQ ID NO: 297780 - DNA, 877 bp, Unknown
  Bacterial polypeptide expressing nucleotide sequence isolated from the Sargasso Sea
gaaatgcaaaaattaggttttttagaatttcaaactccaatattaacttcatcgagcccagaaggtgcgagagattttctagtcccgagtagattaaacccaggaaaattttatgctttaccacaagctcctcaacaatttaaacaacttattatgatctctggttttgataaatattttcaaatagccccatgctttagagatgaagatgcgagggcagatagaagtccaggggaattttatcaattagatgtcgaaatgtcatttgttgaacaagaagatatttttcaagtcatagaaacattatttttaaaattatttaaaaagttcagtaataaaaaaattctacatgaaaaatttccaagaattagttttgaagatgcgatgctcaaatacggttctgataagccagatctaagaaatccattagaaatctcagatttaacaaacatatttgaaagagaagatgttaagtttgaaattttcaaaaaattaataaaaaatggctctatggttagagctctagttaccaaaaatactgcagataaacctagaagtttttttgatggaattgacaagtgggctaaggatcaaggttcatctggtcttgcatacttcagtttagaaaaagagcaaaaaattagcgcaaagggaccaattggaaaatttttttctgaggcttctttatttgaaataatgaaacaaactaatgcaaatgccggtgacacagtatttctttcttgtggaaaaaaaaatgatgtagaaaaaatactaagtgttgcaagaaataaaatagctgaagacctaaatttaattgacaatgaatgtttttcattttgttgggtagttgattatccaatgtatgaaattgatgaaa

SEQ ID NO: 297781 - DNA, 567 bp, Unknown
  Bacterial polypeptide expressing nucleotide sequence isolated from the Sargasso Sea
catgcacgcataccgcacccacacctgcggcgaactccgcgccgaaaacgctggatcggagggtcggctttcgggctgggttcatcgaaaacgggatcatgggaacctgctgttcgtcgatcttcgagatcattacgggttgactcaatgcgtgatcgaagtcgattcagatatatttccgcagattgaggcccttcgcctagaaacggtggtttgcgttaccgggcggatcgaggaacggtcggacgaaacaaagaatgccgatctccccaccggcgcggtagaattgaggatcgattcctgcgaattgctgggcaccagcgaacctctgccgctggaggtgaatagcgatcgcgattacggcgaggaagtcagactgcgttatcgcttcctcgatctgcggcgtgacaaggtccaccacaatatcatcctgcggaattctattatttcgagtattcgccgccggatgatcgatcagggttttcttgaattccagaccccgatcctgacgtcgacctcaccggaaggtgcgcgtgactttctagtgccgagccggctccatccggg

SEQ ID NO: 297782 - DNA, 374 bp, Unknown
  Bacterial polypeptide expressing nucleotide sequence isolated from the Sargasso Sea
caaccctttaaatattaaagcatatcaatatgatattgtttgtaatggtgttgaattatcttcaggagctattagaaatcatatacctgaattaatgtacaaattattttcaatagctggctatgaaaaaaaacatgttgatcaaaaatttagtggcatgattaatgctttaagttatggcgctcctccacatggaggtattgcacctggaatcgatagaatagttatgcttttagcaaatgaaaaaaatattagggaagtaacaatgtttccaatgaatcaaaatgcacaagatttaatgatgaaagcaccttccgaagtagatttagaacaattgaaagaactgaatttatccgttattaaaaaaaaataac

SEQ ID NO: 297783 - DNA, 430 bp, Unknown
  Bacterial polypeptide expressing nucleotide sequence isolated from the Sargasso Sea
atttagtcataatcctttttcaatgccacaaggtgaattagagtcactgaataataaaaatccattggatattaaagcatatcaatacgatattgtatgcaatggtgtagagctatcttctggagcaataagaaatcatagccctgaaataatgtataaggctttcgaaattgctggatatagcaaaaaatttgttgaaaaaaatttttcaggaatgttaaacgctcttaagtatggggctcctccacacggaggaagtgcacctggaattgatagaattgtaatgttattagctgatgagcccaatattagagaagtaattgcttttcctatgaatcaacaagcaatggatttaatgatggaagctccagcagaaattaataaagaaagattagaagaattaggattaaaactaatagagaaaaattaa

SEQ ID NO: 297784 - DNA, 775 bp, Unknown
  Bacterial polypeptide expressing nucleotide sequence isolated from the Sargasso Sea
attaataagaaaagagatcacggaaatctcttgtttttagatttaagagatcactatggactaacccaatgtgtaatagatgaaggaaaaacaatttttaaggatatagaaaaacttccattggaaactgtactacaagttgaaggtaaagtcttagtaagagaaaaagacactattaataaaaatttaaatactggagaaattgaagtgggaattgaaaaatatagaatacttgcaaatactaaggaattaccattacctgttttttcagatcaagaatattctgaagaaattagattaaagtacagatttttagatttaaggagaaataaaattcataataatattattctaagatctaaaattatttcatttattagatctgaaatgcaaaaatatggttttctagaatatcaaacacctatattaacttcatctagcccagaaggtgctagagactttctagtaccaagtagactaaaccctggtaaattttatgctttacctcaagcaccacagcaatttaaacaattaatcatggtatctggttttgataaatattttcaaattgcgccgtgttttagagacgaagatgcaagagcggacagaagtccaggtgagttttatcaacttgacttggaaatgtctttcgtagaacaagaagatgtattcaaaatagttgaagagttgtttgtaaatttattcaaaaaattttcttctaaaagtttacttcatgaaaaatttcccagaattccctttgatgaggctatgctta

SEQ ID NO: 297785 - DNA, 742 bp, Unknown
  Bacterial polypeptide expressing nucleotide sequence isolated from the Sargasso Sea
aaagaaaatccaagcttttcagagttggaaaacatacaacttgaaacagttgttagaattgagggcatagttgttaatagatctcaagaaacaattaacaaagaaatcgaaactggtgaaatagaaataagtattaaaggttttagtacattaggggaatgtaaagaactacctatgccagtattcagtgatcaagagtatgccgaagatattagactaaaataccgtttcttggatttaagacgtaaaaaaattcatgaaaatattattttaagatctaatgtgatctcatttataagaaatgaaatgaaaagtttaggttttttagaatttcaaacaccaatactaacttcatcaagtcctgagggtgctagagattttcttgtaccaagtagattaaatcctggtaaattctatgcgctacctcaagcccctcaacaatttaaacaattaataatggtatcaggttttgataaatattttcaaattgctccatgtttcagagatgaagacgctagagctgacaggagtcctggtgaattttatcagctggacttagaaatgtcatttgttgaacaagaagacatatttgaagtagttgagaaactaattattaaaacttttcaaaagttttcaaaaaaaaaaattctatctaaggcttttccaaaaatttcatataacgagtctatgattaaatatggaactgataaaccgagacttgagaaacccattaattattagc

SEQ ID NO: 297786 - DNA, 847 bp, Unknown
  Bacterial polypeptide expressing nucleotide sequence isolated from the Sargasso Sea
ccccaacaatttaaacaactaattatggtttctggatttgataaatatttccaaattgctccatgttttagggatgaagatgcaagagcagatagaagtcctggtgaattttatcaacttgatttagaaatgtcatttgtagagcaagaagatgtttttcaagtagtagaaaaattgatgaaaaatctttttaaaaaattttcaaaaaaaaaaatattatttgaaaattttcctagaataccatttaaagaagcgatggaaaaatatggaacagataagccagatttaagaaatccattgttgataaaagatataactcaaatatttacaagagaggatgtaaaatttgatatttttaaaaaattagtaaaagcaggttcattagtaagagctattgttacaaaaaacacaaaagataaacctagaagtttttttgataatttggataagtgggcaaaagatcaaggtgcttctggtctagcttatttttcgatagagcaagaaaagtctttgttaggaaaaggcccgattgggaagttttttagcgaagaatctattaaagaattaatgaaaattaccaatgcgactccaggagatagtatttttttagcctgcggtaagcaacatgagattgagaagattttatctctagcaagaaataaaataggtgacgaattgaacttaataaataatgaagagttcgcattttgttggattgtagactatccaatgtatgaaagagacgataaaactaataaaattaaatttagccataatcctttctctatgcctcaaggtgacttaaaaaatcttgattttaaaaatccgctaaaaataaaggcttatc

SEQ ID NO: 297787 - DNA, 772 bp, Unknown
  Bacterial polypeptide expressing nucleotide sequence isolated from the Sargasso Sea
aaaggattagtagttcctaatggaagtgaattttctagacgtcaaatagatgatattgtcaattattctaaagaactaggaagtgctggattaatttggatagttttggaatcagaatttgaatttaaaagtatagtaaaaaaatatttagatgaaaattttgttaaaacacttgctcaatcatcgggagctaaaagtggtgatatgattttgatggttgcaggcaagaataaaaatactttagaaatattagggaatttaagatctaaattgggacgtgatctacaattatatgatcaaaatgagttaaaattttgttttattacagattttccattatttgaatggaatgaagattctcaaaaatgggaatcttcccatcatccatttactatgcctcatgaagaatatttgagtaatgttgcagataatccaggaaaaattagggcttattgttatgatatggttgcaaatggatatgaattagcaagtgggagtattagaattcacaaaaaagaattacaagagcaaatattttctgtattaggttattccaataagcaaactaatgagcaattttctcaattattaaactcttttgaatacggagcaccaccacatggcggtatcgccccgggaattgatagaattgtgatgttattagctggtactgaaaatataagagatgtaatagcttttccgaaaactcaaagtggttttgatcctttgtttgaatctcctaagcgtattatcgaaagaacagttagatgaa

SEQ ID NO: 297788 - DNA, 775 bp, Unknown
  Bacterial polypeptide expressing nucleotide sequence isolated from the Sargasso Sea
tttgctttctggatggataaataaaaaaagagatcatggtaatttattattcatagatttgagggacaactatggaattactcaatgtataattgataaagataattcaaatttttcaatattagaaaaaattcaacttgaaacagttgtaaaaattgagggtgaggtaataaatagatcaaaagagactattaataaagaaattgaaactggagaaatagaaattaaaataaaaaaatttgaagtgctaggcacatgtaaagaattacctatgccagtttttagtgatcaagaatattctgaggaaattagacttaagtatagatttttagatttaagaagaaaaaaaatacatgaaaatataattttaagatcaaaagttatttcatttataagaaatgaaatgaatagttatggtttccttgaatatcaaacaccaatcttgacatcatcaagcccggagggggctagagattttctagtaccaagcagactaaaccctggaaaattttatgctcttcctcaagcacctcaacaatttaaacagttaataatgatctctggatttgataagtattttcaaattgcaccatgtttccgagatgaagatgctagagcagataggagtcctggtgaattttatcaacttgatttggaaatgtcgtttgtagaacaagatgatatttttagaatagttgaaaaacttttaataaatacatttaaaaaattttcagacaaaaaaatcatgtatgaaaaatttccaaaaatttcttat

SEQ ID NO: 297789 - DNA, 421 bp, Unknown
  Bacterial polypeptide expressing nucleotide sequence isolated from the Sargasso Sea
ttgttctccaaaaaatataagatctaaagattctgaaaactttaaaaaagaaattgagaactctacagcaaatgcttatgacctagttctcaatggattagagttaggaggtggctctttacgtattcatgaagcgaacttacaaagagaagttttgaaaacggtaggacttactgataaagagattgatgaaaaatttggatttttaatagaagccttagaaatgggagctcctcctcatggtggaatagcgtttggattagatcgtattaccatgctgatcattggtgcagattcaatcagagaaaccattgcttttccaaaaaatcaacaagcaaaatgtcttctcacaaatgcaccttcaaatgtctcagagtcacaattaaaagaattggatattgaaataacaattgatgaataa

SEQ ID NO: 297790 - DNA, 391 bp, Unknown
  Bacterial polypeptide expressing nucleotide sequence isolated from the Sargasso Sea
aagtgataaagatctaaaaaatcctttggatatattagcttatcaatatgatattgtgtgtaatggggtagagctttcgtctggagcgattagaaaccataaacctgaacttatgtataagctattttcaattgcaggttatgaaaagagccaagttgatgaaaaatttagtggtatgattaatgctttaagttatggagctccaccacacggaggtattgcccctggtatagatagaatagtaatgttattggctaatgaaaaaaatattagagaagttacaatgtttcctatgaatcagaacgcacaagatttgatgatgaaagcaccatcagaagtgactgaagatcaattaaaagaacttagtcttaatttaaaattaaaaaagtaa

SEQ ID NO: 297791 - DNA, 232 bp, Unknown
  Bacterial polypeptide expressing nucleotide sequence isolated from the Sargasso Sea
taagtttggatttttgcttgatgctcttaaaactggatgtccacctcatggcggtatagctctaggtcttgatagaattgtcatgttgcttactcaaactgaaaatataagagatgtaattgcattcccgaagactcagagcgcatcatgtcttcttacagatgcaccaaatattgttgatgagtctcaacttaatgaactgcatattaaaaaagatcttgatgaggaataa

SEQ ID NO: 297792 - DNA, 372 bp, Unknown
  Bacterial polypeptide expressing nucleotide sequence isolated from the Sargasso Sea
acccattagatatacttgcttatcaatatgacatagtttgtaatggtattgaattatcttcaggggcaattagaaatcataaaccagaacttatgtataaacttttctcgattgcaggatatgataaaaatcaagtagatgaaaaatttagtggcatgattaatgcacttagttatggtgcaccaccacacggaggaatagcacctggtattgatagaatagtaatgttacttgctaatgagaagaatattagagaagttactatgtttccaatgaaccaaaacgcacaagatttaatgatgaatgcaccatctgaggtaaatccagatcaattgaaagaattaaatttagctttaaaaacaaaaaaataac

SEQ ID NO: 297793 - DNA, 789 bp, Unknown
  Bacterial polypeptide expressing nucleotide sequence isolated from the Sargasso Sea
gtactttcccaagaataacatatgaggaggcaatggaaacatatggctccgataagccagatatcagatatgaaatgaaactagtcgatttaatatcatacacagatagatcagatttcaacgcgtttaactctgttgaatccgtgtatggtattatagtagaaaaaggagcagcgtattccagaaaaatcattgatgaattaacggaggaagtaaaaaagcacaatgctaaaggccttgcttggatgaaatatgaaagcggtaaatttggcggaggggtatcaaagtttttttctgattcgttgcaaaaagaaatagtcaaaaatctaaacataaatgatggcgatattctatttatggttggagataaaaagaatattgcatgcaaagcccttggaaatcttagggtattggtcgctcaaagagaggggcttataaataaagatgaatataaaccaatatgggttacagaatttcctatgtttgattatgatgaagataatgataggtatatcgcaatgcatcatccgtttactgctcctagagagtctgacatagataagttagatagtgaccctgggaatgctcttagtcgagggtatgatttgactatgaatggtcatgaaattgcaggtggatctattcgtattcattctccagcgattcaggaaaaagtattctctctattaggtctaagtcatgagcaagctgtagaaaaatttggatttttagttgaagctttacaatatggtgctcctcccccatggagggatagcatttggctttgat

SEQ ID NO: 297794 - DNA, 865 bp, Unknown
  Bacterial polypeptide expressing nucleotide sequence isolated from the Sargasso Sea
agaaattaccttgataaaaatgaatttcatgagattgaaacgccaatattaaccaaagctactccagaaggtgctagagattatattttaccaagcagaattcagcctggtagtttttacgctttacctcaatcacctcaattatttaaacagttattgatgattggcggtttagataaatattatcaaattgcacgatgttttagagatgaggatttaagagcagacaggcaaccagaatttacccaaattgatattgaggcatctttccttaatcaggaagaaattatgaagctcagcgaaaaaatgattaaagatgttattaaagaattttctggagaaaagcttgaaaaatttaagatgattgattggcacgatgctatggaggattatggatgtgacaaaccagatctaagaattcccttgaagcttatagaaatatcagatcttgttaagaatgaagaattcaaagtattttctgatcccgctaaaaaggaaggatcaagagtggttgctttaaaagtacctaacggaaatacaatgtcaagaggtcaaatcgatgactatacaaaatttgtatctaagttaggcgcaaagggacttgcttacataaagattaatgatgttaaagatcttgtaagtggcattcagtctcctattttgaagtttttaaataaagaaacaattcaaaatatttttaaaacccttgaagtgaaaacagatgatttaatcttttttggagctggaactgaatctattgttaacttatcaatgagtagccttataaaaaaattaggacatgatttagatttatatgtttcaaagtgggctccctgttggatagtgaattttccaaatgtttgag

SEQ ID NO: 297795 - DNA, 742 bp, Unknown
  Bacterial polypeptide expressing nucleotide sequence isolated from the Sargasso Sea
aatgagaactaatttttgcggtgaattaaataaaaaatttattggaaaagaaataactatatgtggttggattcacagaagaagagaccatggaggagtaatattcctagatataagagatacaacgggtatcgttcaagtagttatcagaccagaagccaaagaaacttttaaaattgcagaacaagtaagatctgaatttgtattaaaagcttctggtattgtagaagaaaggccagaagattctgaaaatacaacacttacaacaggagagatagaaattaattgcagttcaatagaagttcttaatactgcagagactccagcctttcctttagatcaatcatcagaagttggtgaagatgtaaggctaaagcatcgtacgcttgatcttagaagaccagttatgcaagaaaatttaagaataaaatctaaacttacaaaatctattagagattatctagaaaaacattcttttgttgatattgagactcctatcctaactaaagccaccccagaaggggctcgtgattatttggttccaagcagaacaaatcctggtaacttttttgccttaccacagtctccgcaattatttaaacagatgctaatgatttctggatttgatagatattatcaaattgcaagatgttttcgagatgaagatttaagggctgatcgacaaccagaattttctcagattgatatagaggcctcttttgtagaagaaaatgatgtaatg

SEQ ID NO: 297796 - DNA, 882 bp, Unknown
  Bacterial polypeptide expressing nucleotide sequence isolated from the Sargasso Sea
ttagatatggaaatgtcctttgttgagcaggaagatatttttaaaattgttgaaccaatctttagtgagttattttcaaaattcggaaaaggtaaaaaaattaataaatttccttttccaagaatttcttacaaaacatctttagataaatatggcaccgataaaccagatttaagaaatcctatcgaactttgtaatgttacaaatatttttaaatctgacgatgttaaactaaaaatttttaaagaattgattaacaaaggtgctattgtaaaagctattccactaaaaaatacagtctctcagccaagaagttttttcgataatttaaataattgggcaatttcagagggtgcaagtggtttggcgtatataacttttgaaaaaaataatggaaaaataacaggcaaaggacctataggaaagtttttttctgaaaaaggtatttcggaaattttaaaactatgcaaattagatgaaaaaggttctgttttttttgtatgtaacaaggaagaagaagcaaataaatttgctggtattgcaagacaaaaaattgctgaagaattgaatttaatagataattcattatttaatttttgttggatagttgatttcccaatgtttcattacgatgagaaagaaaaaaaaattgatttcagtcacaatcccttttctatgccccaaaccgagattgaagattttgatcaaattgatccattgaatgttttagcttaccagtatgacttagtttgtaacggatacgaattgtcttcgggagcaataagaaatcacattacagaatatttgtttaaagtttttaagaaagtgggatactcaaaagaaatggttgaaaaaaacttttctggaatgattaaagcactt

SEQ ID NO: 297797 - DNA, 436 bp, Unknown
  Bacterial polypeptide expressing nucleotide sequence isolated from the Sargasso Sea
aaaaattaaatttagccataatcctttttcaatgcctcaaggagatattgataatttagatctttcagatccactaaaattaaaagcatttcaatatgatattgtttgtaatggtattgagttatcttctggtgccataagaaatcataagccagatctaatgtataaattattcaatattgctggatattctagagaaacagttaatgaaaaatttagtggtatgattaatgcattaagttatggagcacctccccatggaggtattgctcctggaattgatagaattgtgatgttgctagctgatgaaaaaaatattagagaagtaacaatgttcccaatgaaccaaaatgctcaggatttaatgatgaatgcaccatctgatgttgatgagaatcaactgaaagaacttaatatttcaaaaagaaaaaaataa

SEQ ID NO: 297798 - DNA, 624 bp, Unknown
  Bacterial polypeptide expressing nucleotide sequence isolated from the Sargasso Sea
aaaaaactaatgctgaagtaggcgatagtatttttttagcctgcaataaaaaagatgaagtagaaaaaattacttctttagcaagagacaaaatcgctcaagatttaggtttaatagatgataacgtttttgctttttgttgggtagttgattacccgatgtatgaaaaagatgaaattacaaataagataaaatttagtcataatccattttccatgccgcaaggagatttgagacaaattaattttgaaaagcccttagatattcttgcttatcagtatgatattgtctgtaatggaatagaactttcatcaggagctataagaaatcatattcctgaattaatgtataaactattctctattgctggctatgataagaaaaatgttgatgaaaaatttagtggtatgataaatgctttaagttatggggcacctccacatggtggaatagcaccaggtatagacagaatagtcatgcttttggcaaatgaaaaaaatataagagaagttacaatgtttccaatgaatcaaaatgctcaagatttaatgatgaatgctccgtctgaaattaatgaaaatcaattaaaagaattaaatttatctttaaaattaaaaaaataag

SEQ ID NO: 297799 - DNA, 729 bp, Unknown
  Bacterial polypeptide expressing nucleotide sequence isolated from the Sargasso Sea
tcaaaaccagagactgttttaaaaataattggaaaagatgtaaaaagatcaagcggaactgaaaatctagatttgaaaacaggtaaaatcgaaatttctattgaatctgtagaagttttgtcaaacgcaaaagaattacccatgccagttttcggtgaacaagactatcctgaagatattagattaaaatataggtttttagatttaagaagggatgaaatgcataaaaatataattttaaggtcacaagtaatttcttttattagatctgagatgttgaaattaggttttttagagtatcaaactcctattcttacctcgtctagtcctgagggagctagagattttttagtacctagcaggttaaatcctggaaaattttatgccttaccccaagcgccacagcaatttaaacaattaattatggtttctggttttgataaatattttcagattgcaccatgttttagagatgaagacgctagagcggataggagccctggtgaattctatcaattagatttggaaatgtcttttgtcgaacaagaggatgtttttaacattgttgaaaaattaatgatcaatttatttaaaaaattttcgtcgaagaaaatattagaagaaaaatttcctagaattccttatcaggaagcgatgagaaaatatggaaccgataaaccagatttaagaaacccattaataataaatgaaattacagatttatttaaa

SEQ ID NO: 297800 - DNA, 925 bp, Unknown
  Bacterial polypeptide expressing nucleotide sequence isolated from the Sargasso Sea
tatgagcttagaaagaacaatggttggtaaaagtataattatttcaggctggattaataaaaagcgtgaccatggaaatctattatttatagatcttagggataattttggaattacccaatgtataataaatcaagaaaataaaaactttaaagaattagaaaaaatacaacttgaaacagtaataaaagttgaaggtaaggtcgttaatagatctaaagaaactattaataaagatattgaaacaggtgaaatcgagatttcaattgaaaatttcacagttttaggaacttgtaaagaattgccaatgccagtttttactgaccaagagtactctgaagagattagattaaaatataggtatttagatttacgaagaaaaaaaattcatgaaaacattattttaagatcaaaagttatttcatttataagagctgaaatgaataataatggttttttggaatttcaaacacctatacttacttcttcgagtccagagggtgcaagagactttcttgttccaagtagattgaatcctggaaaattttatgccttacctcaagcgccacaacaattcaaacagcttataatggtttctggatttgataaatattttcaaattgctccatgttttagagatgaagatgctagagctgatagaagtccaggagaattttatcaattagatctagagatgtcatttgttgaacaagaagatgtcttcaaggtagttgaaaaactattaattaatacttttaaaaaattttcaaacaaaaaattaatttctgaaaaatttccaagaatttcttatgctgaggcattagcaaaatatggaagtgacaaacccgatctaagaaatccattaataataaatgatattactgaaatttttttaggggatgatgtatcttttgaaaatctttaa

SEQ ID NO: 297801 - DNA, 854 bp, Unknown
  Bacterial polypeptide expressing nucleotide sequence isolated from the Sargasso Sea
tccatctagaattaataaaggaaaattttatgctttacctcaagcaccccagcaatttaaacaattaataatggtttcaggttttgacagatattttcagatagcgccttgttttagggatgaagatagtagagctgatagatcaccaggtgaattttatcaactagatctagaaatggcctttgttgaacaacaagatgttttcaacgctactcaaccagtaatttacgaggtttttaagaaatttagtaacaaaaaagttgataaaaattttgaaaagataactttcaaggatgctatgatcaaatatggaactgataaaccagatttaagatttgatatagaaattcaagacgtcactgatgtattcataggttcagattttaagatttttgccaacagtattaattctggttctgttgttagagctttaccaggaaaaaaatgtggttcaagatctattgctgataaaatgaattcatgggcacagactcaaggatcgccaggcatgggttacattatatatggtgaaggagaggcaaaaggtcctatagctaatgccataggttctggaaaatcttctgagttaaaaaatagatttaatttaaatgatggtgatgcattgtttttttgttgttcaaaagagagtgttgcttcagatttagctggcaaagcaagactaatgattgctgaagaaatgaatatgattgacaaaaatctattcaaattttgttggattgttgattatcctatgtacgaaattaatgatcaaactaataaaattgaattctcacataatccattttctatgccccaaggtggtttaaaggcgttatatgaaaaaaatccacttg

SEQ ID NO: 297802 - DNA, 661 bp, Unknown
  Bacterial polypeptide expressing nucleotide sequence isolated from the Sargasso Sea
aagggaaataaaaactttttagatttggaaaaaactcaactagaaactgtcataaagatagagggaaaagttgttaatcgttcaaatgaaactgtcaataaagatatcaaaacaggagaaatagaagttgcaattgataaatttgaaattttaggaacatgcaaagaattaccaatgcctgtctttagtgatcaagagtacgctgaagaaatcagattaaaatatagatttttagatttaagaagaaaaaaaattcatgaaaatataattttaagatctaaagtaatttcttttattagagatgaaatgataaaatttggttttttagaatttcaaacacctatattgacttcatctagtcctgaaggtgcaagagactttcttgtacctagtagattaaacccaggaaaattttatgctttacctcaagcaccacaacaatttaaacaattaattatggtttcggggtttgataaatattttcaaattgcaccttgctttagagatgaagatgcaagggctgacagaagcccaggagaattttatcaactagatttagaaatgtcttttgttgaacaagaggatatttttaatgttgttgaaaaattattagttaatacttttaaaaagttttcaaataaaaaattaatgtatagtaaat

SEQ ID NO: 297803 - DNA, 700 bp, Unknown
  Bacterial polypeptide expressing nucleotide sequence isolated from the Sargasso Sea
aaacaattattgatgatggcaggttttgataaatattttcaaattgctccttgttttagagatgaagacagtagagcagatagatcccctggcgaattttatcaattggactttgaaatgagttttgttactcaagatgatgtatttaatgcaatagaaccagttttatatgaagtttttgatgaaaataaaaactatcatactgatgaaaaaataaccgtaagcagttatccattcaaaagaataccttatgatgaagctcttgaattatatggaactgataaaccagatttgagaaatccattattaataaaagattgtacagatatttttaaaggatcagaatttaaaatattcagtaatttgattgaaaaaaaatataaagttaaaggtattgttgtaagtaatacagctgataaaccaagaagtttttttgataaattaaataactgggcaagagaagagggtgctgctggacttggatatattagctatgatgatgaacataaaggacctattgcaaaaaatttagataatgaaagactaaaacaacttaaattaaaagataatgagtctattttctttgtttgtgataatcaaaaagatgctcaattatttgctggcaaagtaagagataaattgtgtttagatttgaatttactcaataaaaacgcatttgaattttgttggatagtagatt

SEQ ID NO: 297804 - DNA, 565 bp, Unknown
  Bacterial polypeptide expressing nucleotide sequence isolated from the Sargasso Sea
tatgtcatttagatcattatcctgtgggtctgttagtcaagaccacattgaccaagaaatagaagtagctggatggattcatagaagaagagaccatggaggagtaatattcttcgatttaagggactcttcaggcttactacaagttgtatataaccccgaagacagagaagttttttctatagcagagggatgtagaaatgaatttgtaatcaaagcaaaaggaattgtatgcaagaggcctgaagggacagttaatccaggtcttcctactggcatggttgaattgaatgcctctaatttagaaatacttaatccttctaaaccgttacctttttctttagatgaacatacttcagttggagaggaaactcgacttaaatataggttcttagatttaagaagagaagaaatgcaaagaaatcttagattaaggtctaaagtttcccaagagattagaaaatatctagaaaaaaatgattttcttgagatagaaaccccaatattaacaaaagctacgcctgagggagcaagagactatatagtcccaagtagaacctatcct

SEQ ID NO: 297805 - DNA, 832 bp, Unknown
  Bacterial polypeptide expressing nucleotide sequence isolated from the Sargasso Sea
gacttaagagataattatggattgactcagtgtgttatagataaaagtaattctatatttaaagatatagaaaaattgccgttggaaacagtattaaaaataaatggagaagttttagagagaacaaaagaaacaataaatctaaatattcaaactggtaaaattgaactttcgataaaaaaatttgaaattcttggtatgactaaagaattacctatgcccatcttttctgatcaggaatatgcagaagagattagactcaaatatagatttttagatcttagaagaaaaaaaattcaccaaaatattattttaagatcaaaagtaatatctttcataaggtctgaaatgcaaaaattgggctttctagaatttcaaacgccgattttaacatcttcaagccccgagggtgctagagattttttggttcctagtagattaaatcctggaaaattttatgcattacctcaggcgccacaacaatttaaacaattagtcatgatatctggatttgacaagtattttcaaatagctccatgttttagagatgaagatgctagagcagaccgaagtcccggtgagttttatcaattggacattgaaatgtcatttgtagaacaagaagatatatttaatgttatagaaaaattatttgttcaagtttttaataaattttcaagtaaaaaaatattaaaagataaatttcctagaatttcattttctgaagccatgttaaaatatggatctgacaaaccagatctaagaaaccctatattaatttatgatctgactgaaatatttaaaagagacgatgtaaaattgaaattttaaa

SEQ ID NO: 297806 - DNA, 667 bp, Unknown
  Bacterial polypeptide expressing nucleotide sequence isolated from the Sargasso Sea
gggaaaattttttagtgaaaactctctaaaagagcttatgaaaaaatgtaatgcagaagtaggcgacagtgtattcctagcttgtggtaaaaaaaaagaaatagaaaaaattttgtctttagcaagagataaaattgcaaatgatttgaacttgattgcaaaagatcaattttctttttgttggataattgattatccaatgtatgaattcgatgaaaattccaaaaaaattgtatttagtcacaatccattttcaatgccccaaggaaatatcaataatttgaatttagacaaaccattagatctaaaagcctatcaatatgatattgtatgtaatggagtagaattatcatctggtgctatacgaaatcatattccagaattaatgtataagttatttgcaatagcaggatatagcatcaatgaagtaaataataaatttagcggaatgattaatgccttaaattatggagcgcctcctcatggtggtatagctcccggtatagatagaatagtgatgctacttgcagaaaaagaaaatattagagaggttactctttttccgatgaatcaaaatgcccaagatttaatgatgcaagcaccgtctgaaatagatgataaacaattaaaagagttaaatattaaaaaagatattaaaaacaattag

SEQ ID NO: 297807 - DNA, 881 bp, Unknown
  Bacterial polypeptide expressing nucleotide sequence isolated from the Sargasso Sea
aatagaactcgttgatgttactaatttatttgactctagcgacgtcactttaaaaatttttaaggataaaataaaaaaaggaggaatagtaaaagctattcctgttccaaacaccaatgaaaaaccaaggagtttttttgataaccttaataattgggctatttcagaaggtgcttcaggcatggcttatattacttttgaaaaaaataaagataaaattattggcaaaggtccaattgctaaatttttttctgaaaaagctatttctgaacttattaaaattttaaagttaacagaaaaagactcagctttttttgtatgcaatcaacctttagaggctttgaaattttctggcatagcccgacaaaagatcgcacaagaattggaattaatagataaaaataaatttagtttttgctggattgttgattttccaatgtatcactatgatgaaaatgaaaaaaagattgattttagtcataacccattttctatgcctcaggaaaaattagaagattttgacaaaaaagatcctttgaaaattttagctcatcaatatgatcttgtttgtaatggatatgaattgtcctctggagcaataagaaatcatatgcctgaatatctttttaaagtttttgaaaaagtgggatattctaaagaaatggtgacgaaaaacttttctggtatgattaacgctctttcctacggagcacctcctcatggcggaatggctcctggaatagacagaatagtgatgcttttagcaaatcaaaaaaatattagggaagttactctttttccactcaatcaaaatgcagaagatttattaatgggcgctccctcgagtattgatgaaaaacaactaaaagaactaaatatta

SEQ ID NO: 297808 - DNA, 742 bp, Unknown
  Bacterial polypeptide expressing nucleotide sequence isolated from the Sargasso Sea
tgataatggatctgtggtcaaaggtattgtagtaaataatactgctcatcagccaagaagtttctttgataaattaaataattgggcaagagatgaaggagctgcaggattaggttatatttctttgattgataatagttttaaaggacctattgcgaaaaatttaaatgagggtcagttattagccttgaaacttaaagataatgagtcaattttttttatttgtgataaattaagagaagctcaaatattttctggaaaggtgagggaaaaaatctgtaatgatttaaatttaattgataaaaatttgtttgaattttgttggatagtggattttccaatgtatgaaattgatgaaaaaactaataagattcagtttagtcataatcctttttcgatgccacagggcgaaatgcaagctttagaaaataataatcctctagaaataaaagcttatcaatatgatattgtttgtaatggagtagaattatcatcaggagcaattagaaaccataaacctgaaataatgtataaagcttttgaaatagcaggttattccaaaaaagaattagaagataagttttcaggtatgctaaatgctctaaagtttggagctcctccacatggaggtagtgcgcctggtattgacagaattgttatgttacttgctgatgagccaaacattagagaagtaatagcatttccaatgaatcaacaagctatggatttaatgatggatgcc

SEQ ID NO: 297809 - DNA, 661 bp, Unknown
  Bacterial polypeptide expressing nucleotide sequence isolated from the Sargasso Sea
aatgagaagtcatcattgcggtaatttaaatatcaaaaatcttaatgaagaagtaactatttgtggctggatacacagaagaagagatcatggtggtgtaatttttcttgatgttagagataccactgggattgtgcaagttgttgtaaatcctgaaaatgttgaagccttcaagatagcagaagatataaggtctgaatacgtcattaaagcatttggacaagttgaaggaaggcctgaagattctcaaaatgatcaattaacaacgggtgatattgaaattaaatgtagttcaattgaattactgaatgaagcagagacgccagcatttccattagatcaatcatctgaagttggtgaggacgtaagacttaaaaatagaactttagatctcagaaggcctgagatgcaaaaaaatctaagactaaaatctgacctgacaaaatctattagggattatttggagaaaaataactttgtagacatagagactccaatattgactaaagctacacctgaaggtgctagggattatctggttcctagtaggacaagtgctggcaatttttttgctcttcctcaatcaccacaattgttcaaacaaatgttgatgatttcaggttttgatagatattatcaaattgctagatgttttagagat

SEQ ID NO: 297810 - DNA, 865 bp, Unknown
  Bacterial polypeptide expressing nucleotide sequence isolated from the Sargasso Sea
gaatttactcaaatagatttagaaacctcgttcatgagctcggatcaagtacgtggtatgacggaaaaaatgattcgtgaaatgtggcaatcgttacttaacgttgacttaggcgacttcccgattatgccttattctgaggcgatgagcttatatggttctgataagccagacttacgtaacccaatgaaattagtagacgttgctgatttagtgaaagatgttgagtttaaagtattctcaggccctgcaaacgacgaaaaaggccgtgttgctgtattaacagtaccgggtggcgctaagctttcgcgtaagcaacttgatgattacactaagtttattggtatttacggtgctaaaggcttagcatggatgaaagtaaacgaccgtgatgcaggcgctgaaggcgtgcaatcgccaatcgctaaattcttaaacgaagatgtgatcacacagttacttgagcgtactaatgcacaaactggcgatatcattttattcggtgcagataagcgcaacacagtaaatgaagccatgggtgcactacgccttaaaattggtgtagatttagaaatcactaatcttaacagttgggcaccactttgggttgtagacttcccaatgtttgaagaagacgacgagggcacattacacgctgtgcaccatccgttcaccgcaccaaaagatattagcgcaagtgagcttgaagcaaaccctgcagcggctatttcagatgcctacgatatggtattaaacggctacgaagtgggcggtggctcggtacgtatacataatgcagatatgcaagaagcagcatttagaattttaggaattgatgcacaagagcaacaagacaaatttggct

SEQ ID NO: 297811 - DNA, 805 bp, Unknown
  Bacterial polypeptide expressing nucleotide sequence isolated from the Sargasso Sea
ggaggctcttagtaaaaatattaagttaagaagtagtataatatcgtctatcagaaataggatggttaatcaggggtttcaggagtttcagacaccaatattgacagcatcttctcctgagggcgctcgtgattatttggttccaagtagaattcattctgggaaattttatgccttaccacaggcacctcaaatctttaaacagcttattatggtctcaggttttgataagtattttcagatagctccgtgcttcagagatgaggatgcccgtgctgataggtctccaggagaattttaccagctagatgtcgagatgtctttttgtacccaagaagatgtttttcaaaatttggaaccagtattaagcggggtttttgaggagttttccgagggtaagactgtcacagtctcacccttccctcaaattagatataaagatagtatgttaaagtatgggtctgataaaccagatctaagaaatcccataattatttatgatgtatctgacgaatttcgtgattccaaatttggaatttttgctaaaatagttgctgctggcggtgtcgtgagggctatacccgcggtgggatcagcaaataatccgaggagtttttttgataaattaaatgattgggcgagagaagagggttttggtggtctgggatatatcatgtttaatgatgatgagggcaagggtccaattgctcgtaatttggagtctgaacgcagtatgaccattagagataaattaggacttactaatggggattcagtgttttttgtagcgaacttagatgaagta

SEQ ID NO: 297812 - DNA, 915 bp, Unknown
  Bacterial polypeptide expressing nucleotide sequence isolated from the Sargasso Sea
agttagattatcaggctgggttcacagaaaaagagaccatggcggtcttttgtttattgatttgagagatcattttggcttaacacagttagtttttgatccagatagcagtgctttccaggaagcagaaaaagtaagaaatgagtctgtaataacaattaatggaaaagttgtacaaagatcagatgacacgattaataaggtattaccaactggaaatattgaggtttatgtcgatacacttgaagtaattgggaattcagatgatattccattaccagttttcggtgaacctgattatccagaagaaataagactaaaatatagatttttagatttaagaagagaaactcttcataagaatataatattaagatctgaaattataaattttattagaagtaagatgattgaaaatgattttcttgagattcaaacaccaataatgaccgcatctagccctgaaggcgcaagggattatttggttccttcaaggatacatcaaggtaaattttatgctcttcctcaagccccacaacagtttaaacaactccttatgacttcaggttttgataagtattttcagattgctccatgctttagagacgaggatgctagagctgacaggtctcctggagaattctatcaattagatattgaaatgagctttgttaatcaagaggatatttttgaatcagttgaacctttgttaagagatgtgtttgaaaaattttctaaaaatatggctgttaactcacaatttcctaggatttcttatgcagaatcaattcaaaaatatggaacagataaaccagatctacgagtagaaattgaaattgatgatattaccgaagtatttgttaattctggttttaaaatttttgctgaccaaatctctaaaaatgagaaaataaa

SEQ ID NO: 297813 - DNA, 892 bp, Unknown
  Bacterial polypeptide expressing nucleotide sequence isolated from the Sargasso Sea
ttaacttcatcaagtcctgagggtgcaagagattttttggttccaagtagattgaatcctggaaagttttatgcgcttccacaagctcctcagcaatttaaacaattgataatggtctcaggttttgacaagtattttcaaatagctccttgttttagagatgaagatgcaagagctgacagaagtccaggagaattctaccaacttgatttagaaatgtcatttgtagaacaagaagatgtttttaatgtagtagaaaaattgatgataaacttgtttaaaaatttttcttcaaaaaaacttataaataataaatttccaaaaattccctatgaggaagcaatgttaaaatacggaacagataaacctgatttaagaaatccattattgatatatgatttaacaaatatttttactagagaagatgtaaaatttgatatttttaaaaaattagtaaaatctggatcaaacgtaagggcaattgtaaccaaaaatacaaaagataaaccaagaagtttttttgataatatagataaatgggcaaaaaatgaaggagcctcaggtctagcatactttacaattgaaaatcaaaatgaaatttcagcaaaaggtcctgtgggaaaatttttttcaaaaaaatcattagaggaaattatgaaaattacagaagcaaaagtaggagatagtatcttttttgcttgcggaaaattaaaagaagttgaaaagatttcttcacttgctagagcaaaaatagctgaagatttaaatttaattaatcatgactcttttgctttttgttggatagttgattatccaatgtttgaaatagacgacgaaaataaaattaaatttagtcataaccctttttcaatgccccaaggaaatatgaaaa

SEQ ID NO: 297814 - DNA, 789 bp, Unknown
  Bacterial polypeptide expressing nucleotide sequence isolated from the Sargasso Sea
cttgtttgaaaagattgaaaaaatacctttagagacagttgtgcaatttggaggacaagttgttaaaagagaaaaagatactataaataaggatttaaattcaggcgaaattgaaatcaagattacagattttaaaattctaggtaatacaaaggaattaccactaccagtattttcagatcaagaatattctgaagaaataagactgaaatatagatttttagacttgagaagaaataaaattcacaaaaatatcaatctaagatcaagagtaatatcttttattagaaaagaaatggaaagttttggttttttggaatatcaaactccaatattaacatcatcaagtcctgagggtgcaagagactttttggttcctagtagattaaatcctgggaagttttacgctttaccacaagcaccacaacaatttaaacaactaataatggtttctggatttgataaatattttcaaattgccccatgttttagagatgaggatgccaggtctgatagaagtccaggagagttttaccaattagatattgaaatgtcttttgtagatcaaaaagatatatttgatattgttgaaaaactactgaataaagtatttaaaaaattttcctcaaaaaaaattctaaacgaaaaatttccaaaaataaccttttacgagtcaatgctcaaatatggaacagataaaccagatttaagaaatcccttagtgatttgtgatttgacaaagatctttgaaagacaggatgttaagtttgaaatttttaaaaaatgggt

SEQ ID NO: 297815 - DNA, 430 bp, Unknown
  Bacterial polypeptide expressing nucleotide sequence isolated from the Sargasso Sea
atgaatgcatttaggtctcataattgtgacgaacttaacgcaagtaatgatggggactttgtcagattatctggttgggtacatcgtgttcgggatcacggtggaattttatttattgacctaagagatcattatggtttcactcagattttagcagatccggatagtaaagcgttcagtaatgttgaaaaagttagatcagaatggtgcataagaattgatggccaggtaaagttgcgtggcactgatcttataaacgaaaaaatacctacaggagaaatcgaagtatttattcatgaacttgaagttttggggcagtcagacgaactaccattaccggtgtttggcgagcaagattatcctgaggaaactagattgaaatacagatttttagatcttcgacgggataaacttcataaaaacatgatgc

SEQ ID NO: 297816 - DNA, 754 bp, Unknown
  Bacterial polypeptide expressing nucleotide sequence isolated from the Sargasso Sea
gattcttaaaagatctaagattgtatctaccataagaaatttcttagaagaaagaaactttaacgaaatagaaactccaatactcacaagagccactcctgaaggagcaagggactatattttgccaagtcgtgttcatccaggcagtttttatgctcttccccaatctccccagcttttcaagcaaatgcttatgatgggtggaatggataggtattatcaggttgcaaggtgttttagggatgaagatttaagagcagacagacagccagaatttactcagattgacatagaagcatcttttgttgaggagaaagatattattgagcttggttcaagcttactaaagcttctgcttaaggatttcgcggatcacaatatagatagtattgatgaacttgactatgcggatgctattaataaatacggctctgataaacccgatctaagaatacctcttgagttgatagagatttctgaagaagctaaaaaagaggaatttaaagttttctctgatcctgcaaaaaatgatggatcaagagttgttgctttaaaagtagatggagggaataaacttacaagatctcaaatagatgaatatacaaattttgtaggtaaattgggagcaaaggggcttgcttacataaaaattaatgatgcttctgacatcgaaaatggacttcaatctccaattctcaagtttctttctaaagactttataactgctctttttggcaggttgaatcctgtaaat

SEQ ID NO: 297817 - DNA, 979 bp, Unknown
  Bacterial polypeptide expressing nucleotide sequence isolated from the Sargasso Sea
agactgcatggtaaaattgtttttgttgatttacgtgataggtatggcaagactcaaatagtttttgatcagaatcagttccttgatgattttgatacaataaaaaaattatcttttgaagatgttatctctattaaaggagttgtgaaaagtagagatgaagctgcgatcaaccccaaaatgagaactggggtaattgaagtagtagttgttgaattctctttgttaaataaagctgcaactctgcctttcgttttaaaagatagagatagctccgaagaaccattgaggttaaaatatcgttatttggaacttagatttgaagagctccaaaaaaatctaattattagacacaaaacataccaagccgtaagaggatatttatcggataatgacttcttagaagttgaaacaccaattttaatgaagtctacacctgagggtgctagagattttttggttccaagcaggatacatagaggaaagttttatgctttacctcagtctccacaaatttataaacagattttaatgatatctggttacgatcgttattttcaaattgttaaatgttttcgagatgaagatttaagagcagatagacagcctgagtttactcaaattgatatagagatgtcttttattgatgaagaaataatattcacatttatggaaaatcttaccaggcatgtatttagctcagtaaaaaatttagaccttcctgatccttttcctagaataacctatgctgatgctatggaaaggtatggttcagataagccagacactagatttggtatggagttaattaattttaaaccgttctctgacaaatctgattttaatgcttttagtgatgtcgatagtgttaaagcaattatagttagtgaaggggcaaaatattccaggaaaataattgaacagttgacagaggatgcaaaaaagaatggtgcaaaaggattagcttggatgaagttgc

SEQ ID NO: 297818 - DNA, 832 bp, Unknown
  Bacterial polypeptide expressing nucleotide sequence isolated from the Sargasso Sea
gattttaatgcattccgatcagttgagagagtaaaaggaatcgttgtaaaaggtggtgcaaaatattctagaaaaataattgatgaattaactgagtttgttaaaaaatataaagccaaaggcctggcttggatgaaagtacaacaagatgggtttgaaggtggtattagcaaatttttctctgtagatcttcaagactcactgcaaaacgaattaggtctaaaagaaaatgatattctatttatgatcggtgatgattcgtcgatcgtactaaatgctctgggtcaattacgatcaaaaattgcaaagatggaagaccttgctaacaaagatgaatttaaacctgtttgggtgacagagtttcctatgttcgaccatgatgatgaaatgggtcgatttgtagctatgcatcaccctttcacagcgccacgagaagaagatgtagaattacttgacagcgatccatccaaggccctgagccgaggatatgatctaacaatgaatgggtatgaaattgctggtggatcgatcaggatacatgctccaaagattcaggaaaaagtattttctttacttggattaagccatgatgaagcagttgaaaaatttggatttttagtcgaggctcttacttatggtgcaccaccgcacggaggcatagcgttcgggtttgataggcttgtgatgttactagctggaactgaaaatataagagatgttatagcattcccaaagacaacttcggcaacttcgttaatggatcaaagtccaagttctgtcagtcaatcgcaattaaaagaattaggcatcacaattaatgatccagaagatt

SEQ ID NO: 297819 - DNA, 613 bp, Unknown
  Bacterial polypeptide expressing nucleotide sequence isolated from the Sargasso Sea
actaaaatcaatgacaggttcaaaagctggtgatctaacttttataatttctggggacaagaaaaaaacattgacacagctcggttccttaagaatacatgttgctgaaaaacttggtttgagagataaaaataaatttaacgcattatgggtaactgactttcctatgtttgaatgggatgaagattctaaaagatatcatgcaatgcatcacccgtttacatcaccagttgaaaataaaattggggaagatcctggatcaactctagccaatgcttatgaccttgtaattaatggtaatgaaataggtggcggatcaataagaattcatgatcaaaaacttcaagaagaagttttctcaattttagggttttcaaaaaaggaagcatttgatcaatttgggtttttattagaagcatttaattatggtgcacctccacacggtggaattgcatttggattagacaggctagctgctgtaatgaatggtgaagaatcaattagagattacatagcttttcctaaaaacaacagcggccgtgatgttatgattgatagtccatctaaaattgacaaagatcaactggatgatttaaatataaagctcaagtaa

SEQ ID NO: 297820 - DNA, 837 bp, Unknown
  Bacterial polypeptide expressing nucleotide sequence isolated from the Sargasso Sea
cttagattagaagatgccggttctaaagtatcacttgctgggtggattaataggaaaagagatcacggtaatgtactatttgttgacttaagggatcattatggtgttactcaatgtgtaattgagaaaacaaataccatattacttaaattagtagatagcttaagagttgagtccgttattaaaattgatggcaacgttgtagaaagagagcctgatactattaataaatcactaaatacagggaccattgaaatagcagttgatagtgtagaagtattatctgaggcaaaggaattgcccatgccagtttttggcgaaaatgactatccagaagaaattagattgaagtatcgatttcttgatattcgaagagaggaattgcacaaaaatattgtcctaagatcctcaattatttcccacataagaaagcttatgtctgacgctggttttttggaaatgcaaacaccaatacttacagcttctagtccagaaggagctagagattatttggtgccaagtagaattcatccaggaaaattttacgctcttcctcaagctccacagcaatttaagcaattaattatggcgggaggatttgataaatattttcaaatagccccttgttttagagatgaggacgcaagagcagatagaagtcctggcgaattttatcaattagacatggaaatggcatttgttgagcaagacgatgtgtttaacgccattgaacccattttacattctgtatttacaaccttttctgattttaatgttacagaagtaccttttcctagaattacatatgccgatgctatgagaaagtatggatcagac

SEQ ID NO: 297821 - DNA, 899 bp, Unknown
  Bacterial polypeptide expressing nucleotide sequence isolated from the Sargasso Sea
tgagagcaatttaaataaaaaaattgttttatctggttggcttcatagaaaaagagatcatggaaatttattatttattgatcttagggatcattacggaattactcagtgtgtaatagagaataataataatcattttaatattttagaaaaaacaagacctgagtcagttttaaaaattactggaaaagtagttaaacggagtgaaggaactgaaaatatagaattaaaaacaggtaaaattgaagttgcaatagaatcagtcgaagtaatttctactgcaaaggagttaccgattccggtatttggtgaacaggattatccagaggatataagattgaaatatagatttttagatctaaggagagatgaaatgcataaaaatataatcttaagatcaaaagttatttcattcataaggacagagatgctcaagcttggttttctagaataccaaactccgattctcacctcatcaagtccagaaggagcaagagactttttagttcctagcagactgaatccaggaaaattttatgcgttaccacaagctccacaacaatttaaacaattaattatggtgtctggttttgataaatattttcaaatagcgccatgttttagggatgaggatgcaagagccgataggagtccaggtgaattttaccaactagatttagaaatgtcttttgtagaacaagaagatgtttttgaggttatagaaaaactgatgataaatttatttaaaaatttttcttcaaagaaaattgtatcagaaaaatttcctcgtatttcttttagagaatcaatgaaaaaatacggtactgataagcctgatttaagaaatcccttggtgattaacgatataacaaaaattttttcgcgagatgatgtaaaat

SEQ ID NO: 297822 - DNA, 714 bp, Unknown
  Bacterial polypeptide expressing nucleotide sequence isolated from the Sargasso Sea
ttgcttattttacttttgaaaaaaacacagacattgaggccaaagggccagttggaaaatttttttcacctaaagcattaaaggaaataatgaatattactagtgcgaaaataggagatagtatatttttttcatgcgataaagagacaaatgttttacagcttatgtcatcagctagagaaaaaattgcaagagatttaaacttagttgacgagaatgtgtttgctttctgttggatagtagattacccaatgtatgaaaaagataaaattacaggaaagataaaatttagtcataacccgttttcaatgcctcagggagatgaaaaaaagatagattttaaaaatccgcttaatatcaaagcatttcaatatgacattgtatgtaatggaactgaattgtcatcaggagcgattagaaatcataaaccagaattaatgtacaaactttttgaaattgctggttatgataaaactgaagttgaaaacaaatttaaagggatgataaatgcactaaattttggtgctcctccacatggtggtattgcaccaggtattgatagaataataatgttattggcaaatgaaaaaaatattagagaagtaacattattcccaatgaaccaaactgctcaagatttgatgatgaatgcaccgtctgaaataagtgaaaaacaactgaaggaactttatattagtttaaaaaaaaaatagt

SEQ ID NO: 297823 - DNA, 856 bp, Unknown
  Bacterial polypeptide expressing nucleotide sequence isolated from the Sargasso Sea
cccaagcagaactcatcaagggaaattctttgccctaccgcaatctccgcaaatttttaaacaactcctcatgatgtctggttttgatcgatattatcagatcgtaagatgttttcgtgatgaggacttaagggctgatcgccaacctgaattcactcaacttgatattgaaatgagcttcgttgatcagcaatctgtgatgaacaagatgcaagatctaattcgatatgtttttgatcaggtaatgaatatctccctaccagaggtatttccagtaatgccatacgctgaagcaatgaaacgttttggttctgataaaccagatttaagaatacccatggagttggttgatctttcggacataatgaaggaagttgaatttaaagttttttctggaccagcaaaagataaagatgggagagtcgcggcattggccgttcccggaggttcatctctgagcaggaaggagattgatgactacacaagttttgtcgcacgatatggagctaagggcttggcttacataaaaatagaggatatctcaaaaaagaaagatggaatgcagtcacccatattgaagtttttgcctgatgaggtaatagacgagctcgttaatagagttgatataaatgatggcgatattattttctttggagccgataaagagaatattgtgaacgatgctctgggagcgctgagagttagaattggcaaagatttaaatctattagaggaaggatggcagccactttgggtgactgactttccaatgtttgaaaaagataaaaattccaacaattggacatcacttcatcatccatttacagctccatctattgatgacgctgaaaaattg

SEQ ID NO: 297824 - DNA, 784 bp, Unknown
  Bacterial polypeptide expressing nucleotide sequence isolated from the Sargasso Sea
tatgtacagaagtcataattgtggagagctaaaaattagtgatgttggtaagaatgttaagcttgctggatgggttcaaaaaattagaaacaaagggtttttaatttggattgatcttagagatagatatgggataacacagcttattattaattctgaaaaaagttcaaaaaaagttattgaatcagtaaaagatattggtagagaatttgtaattcaagttgaaggagaggtaattaaaagagaagcaattaataagaatatatcaactggtgagattgaaattttagtttcagaaatatctgttttaaactcatctaaacttcctcctttcacaattgaaaatgatactgacggtggagaagagttgagaatgaaatataggtatctagatttaagaagatctattctcaaggacaatattatttttagaaatgaactaacatttcaagttcgtaaatatttaaaagagcaaggattcattgatattgaaactccatatttaattaaatctacacctgagggagccagggattttgtagtgccttcaagaataaatgcgggtgagttttatgccctcccacaatcacctcaaacatttaaacaactactaatggtctcaggatttgacaaatatgttcaaattgtaaaatgtttcagagatgaagatttaagggctgatagacaacctgaatttactcaaattgattgtgaaatgtcgtttgttaatcaagaagatgttctaaatacttttgaaggtttagtacaaaatttattcaaagtt

SEQ ID NO: 297825 - DNA, 379 bp, Unknown
  Bacterial polypeptide expressing nucleotide sequence isolated from the Sargasso Sea
cttgtctaaccctttaaaaattaaagcttatcaatatgatattgtttgcaatgggattgagctatcatcaggagctattagaaaccatattccagaattaatgtataaattatttgagatcgctggttattcaaaaaatgatgttgatggtaaatttagtggaatgataaatgctttgagttatggagcaccaccccatggaggaatagctccaggaattgatagaattgttatgcttttagcaaatgaaaaaaacattagagaagttactatgtttccaatgaatcaaaatgcacaagatttgatgatgaatgcaccatctgaaatttcagatgatcaattaaaagaattaaatttaacaattaaaaataaaaagtaa

SEQ ID NO: 297826 - DNA, 713 bp, Unknown
  Bacterial polypeptide expressing nucleotide sequence isolated from the Sargasso Sea
tatgaatagtttcagatcacataattgcggtgaattatcatcaaaggacattgataagagcgttgtactctccgggtggattaataaaaaaagagatcatgggggacttttatttattgatcttagagaccactatggaataacacaatgtgtttttgattcaaatattaaaaattttaataaaattgaatctcttaaactagaaagtgtactcaaaatatctggtaaagttatagaacgaagtgaagaaactataaaccagtctttattaactggcagggtagaaatattagttgaaagttttgaaattctaaatgagtctaatcagattccttttcagattgcagtagatgacgattctcctgaagaattaagacttaaatatagatatttagatcttagaaggggtgaagttcataaaaaaataaagttaagatctgatgtaattaatagtcttagaaaaaaaatgatctcacggggttttttagaaattcaaactcctattttgacggcttcatctcccgaaggagctcgtgactttcttgttccaagtagactaaacaatggaaaattctatgctttacctcaggctcctcaaatatttaaacaattattaatggtttcaaattttgataaatattttcaaatagcaccatgttttagagatgaagacgcaagagctgatagatctcctggagagttttatcaattag

SEQ ID NO: 297827 - DNA, 535 bp, Unknown
  Bacterial polypeptide expressing nucleotide sequence isolated from the Sargasso Sea
caagatagcgaaagatttaaatttgattaataatgaaatttttgcattttgctgggttgttgattatccaatgtttgagaaagatgagacaacaaaaaaaataggttttagtcataatcctttttcaatgccacaaggagaaatagatcagataaactttgatacacctcttgatattcttgcttatcaatacgacatcgtttgtaatggtgttgaattatcatctggtgcgataagaaatcatattccagaattaatgtacaaactttttttgattgcaggatattcaaagcaagatgttgatgaaaaatttagtggaatgataaatgccttaagttatggagcacctccacatggaggaatcgctcctggaatcgatagaatagttatgctacttgctaatgaaaaaaatataagagaagtgacaatgtttccaatgaatcaaaatgctcaagacttaatgatggatgcaccatcaaatgttagtgataaacaacttaaagagttaaatatcagtctaaaatcaaaaaaataa

SEQ ID NO: 297828 - DNA, 289 bp, Unknown
  Bacterial polypeptide expressing nucleotide sequence isolated from the Sargasso Sea
gcagcagaccgttttccgtgtgctcggcatcagcgaagaagagcagcaggagaagttcggcttcctgctcgatgcgctgaaatacggcgcgccgccccatggtggcctggccttcggccttgatcgtctggtgatgctgatgaccggtgcttcgtcgatccgcgaagtgatcgccttcccgaaaacccagagcgcggcctgcgtcatgactcaggcgccgggtgtggtggacgccaagtcgctgcgcgagctgcacatccgcctgcgcgagcaacccaaggccgaataa

SEQ ID NO: 297829 - DNA, 396 bp, Unknown
  Bacterial polypeptide expressing nucleotide sequence isolated from the Sargasso Sea
attatgacgtaaacaaacttgatagggatcctggttctgctttaagtagaggatatgatttaactatgaatggacatgaaatagctgggggttcaattcgtattcattctcctgaaattcaagaaaaagttttctcattgcttgggttatcacaaaaagaagctgttaagaaatttgggtttttagttgaagctctacgatatggagcaccgcctcatggtggaatagcttttggatttgatagattagtaatgttgcttgctgggacagataatattagagacgtgatagcatttccaaaaactacttctgcaacctctttaatggacgaaagtccaagtaaagtagattcagatcagcttaaagaccttggattgaaactagaagataattaag

SEQ ID NO: 297830 - DNA, 897 bp, Unknown
  Bacterial polypeptide expressing nucleotide sequence isolated from the Sargasso Sea
gacagaggacgtgttttctgaaattgaacccgtgctagcgggtgtttttgaagagttttcaacgtggtccgtgcctcaaccgtttccaaggattccattttcagaggctttgcttaagtatggaacagacaaacctgatctaagaattccaattgaaatttgtgatgtctctgatctttttgcggatagtgagtttgcaatttttgcaaaaactgtagctgacggcggggtggttcgtgcgttaccaggtccaaaatgtggaagtcgagcaatctgcgatcgcatgaactcatgggctcaaagcgaaggggccccagggatgggatatattattctcgcagacggtgaggggcgaggacctattgcctcccggatatcaaaagatgccttggaccaactcaaaggccgtaccggaatgggagatggcgatgcaatatttttttctgcgggtaaagaagctgatgcagcaaaattagctggtaacgcccgcctcaagcttggggatgatcaggatcttatagaaagagatatttataaattctgttgggttgtagatttcccaatgtttgaaaataatgaaattactggagaaattgaattttctcataacccgttctcaatgccccaaggtgggttagaagcgttagaaaacaaggatcctttggatatcttggcatatcagtatgatattgtatgcaatggtatagagttatcttctggagctatccgaaatcatttgccagacgtgatgattaaggccttttctattgcgggctatagcaaagacgaagtcgaggatagatttagtggaatgttgagcgcatttcgttatggcgctcccccgcatggcggatttgccccagggattgaccgcattgttatgctgatagctaatga

SEQ ID NO: 297831 - DNA, 484 bp, Unknown
  Bacterial polypeptide expressing nucleotide sequence isolated from the Sargasso Sea
tgttggattgtagattatccaatgtttgaaaaagatgtctcaacaaacaagattaagtttagtcataatccattttcaatgcctcaaggagatttaagtgaaaaaaattttgaaaacccattagatatacttgcttatcaatacgacatagtttgtaatggtatagaattatcttcaggagcaattagaaatcataaaccagaacttatgtataaacttttctcaattgcaggatatgataaaaatcaagtagatgaaaaatttagtggtatgattaatgcactcagttatggcgcacctccacatggaggaatagcacccggtattgatagaatcgtaatgttactagctaatgagaaaaatattagggaagttactatgtttccaatgaaccaaaacgcacaagatttgatgatgaatgcaccatctgagataaatccagatcaattgaaagaattaaatttagcttttaaaacaaaaaaat

SEQ ID NO: 297832 - DNA, 166 bp, Unknown
  Bacterial polypeptide expressing nucleotide sequence isolated from the Sargasso Sea
tgggctagatcgattagtgatgctaatggctggtgctgagagtattcgtgatgtaattgcattcccaaaaactcagactgctagtgatcttcttacgggcgcccctagcgcagcaagtaccgctcagataaaggaactcggaattcgggttcgttcgcccagctga

SEQ ID NO: 297833 - DNA, 699 bp, Unknown
  Bacterial polypeptide expressing nucleotide sequence isolated from the Sargasso Sea
aaaatgagaaaatttcaggtaaaggccctgtaggtaaattttttagcgaagaatctctaaaagaaataatgaaaatttctaatgccgaagtaggtgacagcatatttttggcctgtggtaaaattactgaagttgaaaaaattttatcaatttctagaaataaaatagcaaaagatttaaatttaattgatgaagcacaatttgcattttgttggattgttgattatccaatgtatgaattggatgaacaaactaaacaagttaaatttagtcacaatcctttttcaatgccacaaggagaaatagataaattagattttaaaaatcctttaaaaattaaggcattccaatatgatattgtttgtaatggtgttgaactatcttcaggagcaattagaaatcatatacctgaattaatgtataaacttttttcaatagctggttatgataaaaaaaaagtggaagaaaaatttagcggtatgttaaatgcattgagttatggagcaccgccacatggaggaattgctccagggatagataggattgtaatgttactagcgaatgagaaaaatattagagaagtgaccctatttcctatgaaccaaaatgctcaagacttaatgatgcaagctccttctgaagttgaacccaaacaattaaaagaacttggaataaagattgatattaaaaaaaattaat

SEQ ID NO: 297834 - DNA, 241 bp, Unknown
  Bacterial polypeptide expressing nucleotide sequence isolated from the Sargasso Sea
tcctgctggacgcgctgaatacggtacgccgccgcacgcgggtctggccttcggtcttgatcgtctgaccatgctgctgaccggtaccgataatatccgtgacgttattgccttcccgaaaacaaccgccgcggcctgtctgatgaccgaagcgccgagctttgctaacccgacttccctgggcgagttaggtattcaggttgtggcgaaagagacaaaagagtctccggagaataagtaa

SEQ ID NO: 297835 - DNA, 887 bp, Unknown
  Bacterial polypeptide expressing nucleotide sequence isolated from the Sargasso Sea
tcatgaatttgaattacttggaagctgtaaagaacttcctttaccagtttttagtgatcaggaatattcagaagaaattcgattgaagtatcgctttctagacttaaggagaaaaaaaattcacgaaaatataattcttagatctaaagtcatttcatttattagaaatgaaatgcataaattaggttttttagaatttcaaactccgattttaacttcttcaagtcctgagggtgcaagagattttttggttcctagcagacttaacccaggtaaattttatgctttgcctcaagctcctcaacaatttaaacaactgattatggtatcaggatttgatcgctattttcaaatagccccatgtttcagagacgaagatgctagagccgatagaagtcctggtgaattttatcaattagatttagaaatgtcttttgttgaacaagaggatgtttttaaagtagttgaaaatttaatggttaatacttttaaggaattttcaaaaaaaaaattattatacacaaaatttccaaagatttcattcaatgacgctatgttaaaatatggaacagataaaccagatttaagaaatccgttaattatttatgaaataactgaaatattttctagggcagatgtttcttttgaaatttttaaaaaattagttaaatctggctctatagttaggtgtattgttgcaaaaaatacaaaagataaacccagaagcttttttgacaatattgataaatggtcaaaagagcaaggtgcttcaggtttagcatattttactttagataaagaggataaaatttctgcaaaaggacccgttggaaaatttttttcaaaggaagccttagagcaaattatgttaaaaactgaaagccaaa

SEQ ID NO: 297836 - DNA, 699 bp, Unknown
  Bacterial polypeptide expressing nucleotide sequence isolated from the Sargasso Sea
ctctggattagcatactttacttttgaaaaagataataaaatttctgctaaagggccagtgggaaaatttttttctgaagaggcacttttagaaataatgaaaattactaaatctgaggtgggggatagtatttttttagcatgtggaaaacaaaatgaattagaaaaaataacagcccttgctagagacaaaattgcgaaagatttagatctaattgatgatgacactttcgctttctgttggatagttgactaccctatgtttgaaaaagatgcaataacaaataagataaaatttagtcataacccattttcaatgccacaaggtgaattaaaagataaagattttgaaaaccctcttgatattcttgcttaccaatatgatatagtttgtaatggaatagagttatcttctggtgcaataagaaatcataaaccaaatcttatgtataaactcttttcaattgcaggttacaacaaagcagaggtagatgaaaaatttagtgggatgataagtgcattaagttatggtgcaccaccacatggtggaattgcacctggaatagatagaattgtaatgctcttagcaaatgaaaaaaatataagagaagttacaatgtttccaatgaaccaaaatgctcaagatttaatgatgaatgcaccatctgagataaataaagaccaattgaaagaattaaa

SEQ ID NO: 297837 - DNA, 844 bp, Unknown
  Bacterial polypeptide expressing nucleotide sequence isolated from the Sargasso Sea
taataaaaatctagatacaggatatattgaaataattatagatgattttaatttgctgtctaattcatctactttacctttgccagttaactctgatattgaatatggcgaagatgttagattaaaacatcgatatctagatttaagaaggaataaattacacaagaatatacttttgcgtaataaaattatttcatcaataagagaaaaaatgaataaaaaaaattttgttgaatttcaaactccaattttaacttctacttcgccagagggtgctagagattatttagttccttcaagaatacatcagggaaagttttatgctttaccgcaagctccacaacaatttaaacaacttttaatgattgcaggctttgataaatatttccaaattgctccatgttttagagatgaagatagtagagctgatagatctccaggtgaattttatcaattagattttgaaatgagttttgtaacacaggaagatgtttttgatgctattgagccagtactttatgagatttttgaagagaacaaaacatacagtaaggataaggaatgtatagtaacaaagtacccttttcctaaaataccttataaagaagcgcttgaaaaatatggctctgataaaccagatttaagaaatccattaataattagagatttcactaatattttcattaaatcaaattttaaaattttcgctaataagattgatgatggatttattgtaaaaggaattgtggtaaatgactctgaagaaaaaccaagaagtttttttgacaaactaaattcatgggctcaaaatgaaggtgctcctggtttaggttatataaatttt

SEQ ID NO: 297838 - DNA, 516 bp, Unknown
  Bacterial polypeptide expressing nucleotide sequence isolated from the Sargasso Sea
cgcaaccaggagatctggtgctcatcgtggctgattcctttgaagtgagttgtaaagcgttgcatacgctcagaaaatggctcggtgacacgcttgaactctatagctcaggagacatgcatttttcttgggttgtagacttcccaatgtttgcacatgacacagaaacaggccaatgggctgcaatgcatcatccgtttacagccccacgggaagccgatctggatcaactggaaaataaccctgccggctgtcgagcgattgcgtatgacctgatcatcaatggctcagaggctggcggtgggactatacgaatccatgacagtgcgacgcaggaaaaagtgctgaaattgcttgggatttctcctgaaatcgcgcaggatcgatttggtttcctgttggatgctttgaaaagtggagcacctccacacggaggaattgctctggggattgatcggtgggtgatgctttttggtggacttgataacatccgtgatgtcatcagcgtttcctaaa

SEQ ID NO: 297839 - DNA, 848 bp, Unknown
  Bacterial polypeptide expressing nucleotide sequence isolated from the Sargasso Sea
tttgagagttttcgtccataagctgatcgataaagactggccgatactaaggtttgaagatgcagtaaagtggtacggtacagataaacctgatttaagaaaccctttaaagatggaaactgtgtctgaacactttgagtcgagtggttttacgatttttgagaatattttgaaagatagtgatagtgaaataagagccatacccgctccaaatggtggcagtagaaaattttgtgatcgtatgaactcctttgcgcaaaaagaaggcctgccaggtatgggctatatattttggagagatggtgactcgggtattgaaggggctggaccgatagcaaagaatattggttcggagaaaagtgaggctattagacatcaattagacctcaatgttggggacgcagccttttttttgggagggaaacccgcagactttgaaagctttgcctcgaaggctagaatggaaattgggagcgagttgaatctaataaatagggaccgttttgcatttgcttggattgtagattttccaatgttcgaaagaaaccctgaaactggagccatcgatttttctcataacccgttttctatgcctcaaggtggcagtaaggctctagatggcgatcccctaagtgtattgggttttcaatacgatttgacttgcaacggttatgaattactctcgggagccattcggaatcatgatctagacttaatgtttaaagcttttagaatagccggatatcaagaggatgaagtgaacgataaatttggtggtatggtgaatgcgtttaagtatggaaccccacctcacggtggttgtgcagccggaatagatagaatagtta

SEQ ID NO: 297840 - DNA, 834 bp, Unknown
  Bacterial polypeptide expressing nucleotide sequence isolated from the Sargasso Sea
ctgctaaagaccaaaattctagagtagttgcaatgagggttccaaatggaaactccttatcaagagggcaaatcgatgattacacaaaatttgtttcaaaacttggagctaaaggtctggcgtatataaaaataaatgatgtgaaagatttagagaatggcattcagtcgcctattctcaagtttctaaaaagtgagacaatctcaaatattgtagatgttttaaaagttaaaactgatgatctaattttctttggagctggacctcaaccagtagtaaatttatcaatgagcagtttgataaagaagttaggagaagatctaaatctttatagttcaaaatgggctccatgttggattgttaattttccaatgtttgagaagaatgctgaaggagacttaactccactacatcatccatttactttacctcaatgttctaaaaaagaattattagaagatccaaaaaaatctattgctcatgcttatgatgttgttctgaatggatatgagattggtggtggctcacttaggatttttgataaagatatgcagcaaagtatatttagtattttaaatatttctaaagaagaagctgataaaaaatttggctttttattaaaagccctttcttcaggatgtcctcctcatggaggtatcgcatttggtttagatagaatagtaatgttagtaacaaatactacaaatataagggatgtaatagcttttcctaaaacacaaagtgcagcatgcttacttacagatgctccaagtaaagtagaaaaagaacagcttgaagaattaaaaatcatcagtacccacaaggaagaataat

SEQ ID NO: 297841 - DNA, 662 bp, Unknown
  Bacterial polypeptide expressing nucleotide sequence isolated from the Sargasso Sea
aggtataagcaaattttttaatgaagatttgcagaatgatcttataaaaaagacaggcataaaatctggtgatattatttttatgattgcagggaactcaaaaacaactttaaaagctctaggtaatcttcgaattgaaatagcaaaacaagaaaacttaattgataataatctatttaaacctgtttgggtcactgattttcctatgtttgattatgatgatgagcaaaatagatatattgcaaagcaccatcctttcacagctccaaagattgagcatgttgatagttttgacaaaaagcctttagaagccttgagtagaggatatgaccttaccatgaatggttatgaaattgcaggaggttctattcgaatccattcaagtcatgttcaagaaaaagtattctccctgcttggtctaagccatgaagaagcagttgaaaaatttggattccttgttgaagctttaaattatggtgctccaccccatggtggaattgcatttggatttgatcgtctagtaatgctattggctcatactgaaaatataagggatgtaattgcattccccaaaacaacttctgcaacttctataatggatcaaagccctagtgaagtctcaaattctcaattaattgatctaggaattaaaataaaataat

SEQ ID NO: 297842 - DNA, 866 bp, Unknown
  Bacterial polypeptide expressing nucleotide sequence isolated from the Sargasso Sea
tattttattaagatctaaaatcatttcatatattagaaaagaaatgacaaccttaggattttcagaatttcaaactccaattttaacatcctcaagccctgaaggagctagagattttttagttccaagcagattaaatcctggaaaattttatgcattacctcaagcaccccaacaatttaaacaattaataatggtatcaggttttgacaaatatttccaaatagcaccatgttttagagatgaagatgcaagagcagatagaagtccaggagaattttatcaactagatattgaaatgtcctttgtagaacaagaagatatttttgaagtagttgaaaagttaatgttaaatttatttaaaaaattttctaataaaaaaatattatttgaaaaatttccaaaaatttcttttcacgatgcgatgttaaaatatgggactgacaagccagacttaagaaatccacttctcataagtgatttaacatatatttttgaaagggaagatgtaaaatttgatatttttaaaaaattagttaagtcaggctccattgtaagagcaataataacaaaaaatacaaaagataagccaagaagtttttttgatggtattgataaatgggctaaagaacaaggcgcatcaggtctcgcatattttacttttgaagaagataaaaatatttcagccaaaggcccagtgggtaaatttttttctgaagaatctttgaaagaaataatgaaaattactggagcaaaattgggagatagtatattttttgcatgcaataaagaaaacgaagttctaaagttaatatcattagcaagagataaaattgcaaatgatttaaatataattgatcaaaata

SEQ ID NO: 297843 - DNA, 934 bp, Unknown
  Bacterial polypeptide expressing nucleotide sequence isolated from the Sargasso Sea
tacccaatgtataattgataaagataataaatatttttctgatttagagaaaatgcaattagaaacagtaattaaagttgagggaaaagttgttaatcgatctaaagaaacaattaattctgaaattgatacaggtgaaatagaggttgttattgagaaacatgaaattttgggaacttgtaaagagctacctatgccagtttttagcgatcaagaatacgcagaagaaataagattaaaatatagatttttagatttaagaagaaaaaaaattcatcaaaatattattttaagatctaaagttatttcatatatccgaaatgaaatgactaaattaggttttttagaatttcaaacaccaattttaacctcatctagtccagaaggtgctagagattttttagtaccaagtcgtttaaatccaggaaaattttatgctctacctcaagctcctcagcaatttaaacaattaataatggtatctggatttgatagatactttcaaattgcaccttgtttcagagatgaagatgcaagagcagacagaagtcctggggagttttatcaattagatttagaaatgtcatttgttgaacaagaggatgtatttaatgttgttgaaaagttaatggttaatacatttaaaaatttttctaccaaaaaactgatgtttgataaatttccaaagatttcatacaaggaatcaatgcttaaatatggtactgataaaccagatttaagaaacccgctcattgtaaatgatataactgaaatttttacaagagaagatgtttcatttgaaatatttaaaaaattagtaaaatctggatctaaagtaagatgtattattacgaaaaatactaaagataagccaagaagtttttttgataatattgataaatgggcaaaagaagaaggtgcttcccggttttag

SEQ ID NO: 297844 - DNA, 607 bp, Unknown
  Bacterial polypeptide expressing nucleotide sequence isolated from the Sargasso Sea
attcggagatactatttttctttcctgtggaaaaaaagatgatgtggaaaaaatattaaatctagctagaaacaaaatagctgaagatttagatttaattgataatgagacattttcattttgttggattgttgattatccaatgtatgagattgacgaaacaacaaaaaaaataaaatttagtcataatccattttctatgcctcaaggagaaataaataaattagacctttctaatcctttaaatattaaagcatatcaatatgacattgtttgtaatgggattgagctatcatcaggggctattagaaatcatgttcctgaattaatgtataaactttttgaaattgctggttattcaaaaaatgacgttaatagtaaatttagtggaatgataaatgccttaaattatggagcaccaccccatggaggaatagctccaggaattgacagaattgttatgcttttggcaaatgagaaaaatattcgagaagttactatgtttccaatgaaccaaaatgcacaagatttgatgatgaatgctccatctgagatctcagattatcaattaaaagaattaaatttagatattaaaaagaaaaaataa

SEQ ID NO: 297845 - DNA, 697 bp, Unknown
  Bacterial polypeptide expressing nucleotide sequence isolated from the Sargasso Sea
aaacgaaaaaggcaaagtagttggtaaaggacctatagctaaattttttacagaaaaagcaacttcagaacttttaaaaaaatgcaaaataacagaaaaagactctgtcttttttgtttgtaatacttatagtgaagctaataaattcgcaggaattgccagaagaaaaatagctgaagatttaaaaattatagacaactctaaatttaacttttgttggataatagattatccaatgtatcactatgacgagaaggagaaaaaaattgattttagtcataatccattttctatgccacaaatagatataaaaaattttgataagactgaccccttaaaaatattagcttatcagtatgatcttgtttgtaatggttatgaattatcgtcaggggcaatacgaaatcacgtttcagaatacttatttaaagtttttagcaaggtgggatattcaaaggaattagttataaaaaatttttctggaatgatcaaagcactttcttttggggccccaccacatggaggaatggctccaggcatagataggatagtaatgctgttagctggtgaacaaaatataagggaaattactttatttccaatgaatcaaaatgcccaagaccttttaatggatgcgccatcagaagtgagtgaaaaacaactgaaagagctaaacataaagattacaaaaaaatga

SEQ ID NO: 297846 - DNA, 334 bp, Unknown
  Bacterial polypeptide expressing nucleotide sequence isolated from the Sargasso Sea
ggaggttggcggcggatcgctccgcatctaccgaagggacgtgcaggagaaggtgttcgacgccatcgggctggggaaggaggaggctgaggagaagttcggatacctgatggaggcgtttcagtttggcgcgccgccgcacggtggcatggcgttcggactcgacaggctggtgatgatgctcgcgggggccaagtcgatcagggacgtcatcgcgtttccgaagacggccaccgcgcagtgcctgctcaccgccgcgcctggcgacgtgtccgactcgcagatggccgagctgcacatcgccaaagccaaaagggagagtgagcagcaatag

SEQ ID NO: 297847 - DNA, 356 bp, Unknown
  Bacterial polypeptide expressing nucleotide sequence isolated from the Sargasso Sea
ctaccaatatgacattgtatgtaatggagtagaactttcctctggagcaataagaaatcacattccagatcttatgtacaaactcttttcaatagcaggatatgataaaaaacaagttgagaaaaaatttagtggcatgataaatgctttaagttttggagccccacctcatggcgggatagccccaggggttgatagaattgtaatgcttttagcagataaaaaaaatattagagagataactctttttccaatgaatcaaaatgctcaagacttaatgatgaatgctccatctgaggttgaggatattcaattaaaagaacttggaattaagaaagatattaaaaaaagttagt

SEQ ID NO: 297848 - DNA, 786 bp, Unknown
  Bacterial polypeptide expressing nucleotide sequence isolated from the Sargasso Sea
tatgaataaatataggtcacataactgctcagaaataagtgaaaaagatgtcggaaaagaagtaagaatatctggttgggttcacagaaaaagagatcatggtaatttactttttttagatttaagagatcattttggcatcacacagtgtgttatagaaaataaagacaagaattttaaagtattagaaaaattaaaacctgagtctgttattttaattaatggaaccgtagtcaaaagatcttcggaaactcaaaacaaagatcttaagactggtttaattgaagttaaaattattgaaattgaaattttatctgaagccaaagaattaccaatgcctgtttttggagaacaagagtatcctgaggatattagattaaaatatagatttatagatttaagaagagatgaaatgcataacaatataaaactacgttctgatgtgatttcttttattagatccaaaatgattaaaaataattttatggaatttcaaacaccaattttaactgcctcaagtcctgaaggagccagagactttttggtacctagtcgtcttcatccagaaaagttttatgccttaccccaggcaccacaacaatttaagcaaatgattatgatagcgggttttgataaatattttcaaatagctccatgttttagagatgaagatggtagagcagatcgtagtcctggcgaacattatcaattagatttagaaatgtcatttgttgaacaaattgatatatttaatgcaattgaacccttattttacgatcttttttc

SEQ ID NO: 297849 - DNA, 565 bp, Unknown
  Bacterial polypeptide expressing nucleotide sequence isolated from the Sargasso Sea
aattagaaaaattactgcactagcaagagataaaattgcaaaagagttagatttaattgatgaaaatgttttcgcattttgctggattgtagattatccaatgtttgaaaaagatgaaacaacaaacaagattgaatttagtcacaatccattttcaatgcctcaaggtgatttaagtgaaaaagattttgaaaacccgttagatatacttgcttatcaatacgatatagtttgtaatggcatagagctatcttcaggagcaattagaaatcataaaccagaacttatgtataaactcttctcgattgcaggatatgataaaaataaagtaaatgaaaaatttagtggaatgattaatgcactcagttatggtgcaccaccacatggaggaatagcacctggtattgatagaatcgtaatgttactagccaatgagaaaaatattagagaagttactatgtttccaatgaaccaaaacgcacaagatttgatgatgaatgcaccatctgaggtaaatccagatcaattgaaagaattaaatttagccttaaaaactaaaaaataa

SEQ ID NO: 297850 - DNA, 334 bp, Unknown
  Bacterial polypeptide expressing nucleotide sequence isolated from the Sargasso Sea
atcgagctttcatctcggtgcaataagaaatcatgtcccagaaataatgtataaagcttttgaaattgcaggtcacaaatctgaggttgttgataataaatttccagcaatgattaatgcttttaaatttggggcacctcctcatggaggtatagctcctggaattgaccgtattgtaatgttattagctgatgaaccaaatataagagaagttattttatttccaatgactggtaaagcagaagatttgatgatgaacgctccaaacgagataaatgatcttcaattaaaagaattaggtattaagttagacaaaaaaactaaaattaattaa

SEQ ID NO: 297851 - DNA, 844 bp, Unknown
  Bacterial polypeptide expressing nucleotide sequence isolated from the Sargasso Sea
atatggaacagacaaaccagatttaagaaacccattgattttaagagatatcactaaagttttagacagagaggatgtaaagtttgatatttttaaaaaattaattaaatctggatctattgttaaagctatagttacaaaaaatactataaaaagaccaagaagcttctttgaaaatatcgataaatgggcaaaggatcaaggagcatctggtttggcttatttttcttttgaaaaaaatgaaaatttttctggaaaaggtcccataggaaaattctttagtgaaaaatcaattcaagaattaatgaagatttgtaatgcacaaataggcgatagtatatttatggcatgtggaaaacatgaagaggtaaacaaacttttgtcaatagctagagagaaaattgctaaggatttaaatctaatagatgagaaaactttcgcattttgttggattattgattatccaatgtttgaactagatgaaaatacaaaaaaaattatatttagccataatccattttccatgcctcaaggttataaaaaaggtaaaccaataacgaatcccttaaaattgaaagcatttcaatatgatattgtatgcaatggagtagaactttcctctggagctataagaaatcatatcccagaattaatgtatgaactttttgcgattgctggatacgacaaacaacaagttgatgataaatttagcggaatgattaacgcattaagttatggagctccaccacatggaggaatagccccaggtatagatagaatagtaatgctcctagccgagaaaaaaaatataagagaaataacaatgttcccaatgaatcaaaat

SEQ ID NO: 297852 - DNA, 793 bp, Unknown
  Bacterial polypeptide expressing nucleotide sequence isolated from the Sargasso Sea
taatactaaacctagaagttttttcgatagtattgataagtgggcaaaagaacaaggttggagtggattagcatattttacatttgaaaaagatgatggaggaaaagttactggcaaaggtccaataggaaaatttttcgctgaagaagctttgaaagaaataatgaaaataacatcttcagaaattggtgatagtatttttatgtcttgtagtaataaaaatgaaattaacgaaataatgtccaaatcaagaaataaaattggagacgatttaggtgttatagataaagatttatttgcattttgttggataactgattttccaatttttgaactagataaagaaacttctaaaataaattttagtcacaatcctttttctatgccacaaggagatccaaataatttagatttgtcagaacctttaaatctaaaagcctatcaatatgatatagtttgcaatggagtggaactttcctctggagcaataagaaatcatataccagaattaatgtacaaacttttttctattgcagggtacgataaaaaagctgttgatgaaaaatttagtggtatgataaatgctttaagttatggtgctccacctcatggtggtatagctcctgggatagatagaattgttatgctattagctgatgaaaaaaatattcgcgaagttaccatgtttcctatgaaccaaaatgctcaggatttaatgatgaatgctccgtcagatataaatgaaaaacagttaaaagagttaaatcttaagcttttaggaaataataaataa

SEQ ID NO: 297853 - DNA, 858 bp, Unknown
  Bacterial polypeptide expressing nucleotide sequence isolated from the Sargasso Sea
gttggttgggattaataaaaaaagagatcatggtaatttactttttttagacttaagagataattatggaataacacaatgcgttattgaaaatagccacaaatcgtttaaagaaatcgaaaaattatctttagaaactgttgtgaaaattactggaaaagttttaaagagaagtaaagaaacagttaatactgagcttgaaactggagaagttgaagtttcaataatttcttttgagatacttggaaataccaaagagctacctatgccgatattttctgaccaagaatactctgaagaaataagattaaaatatagatttttagatttaagaagaaaaaaaatacatcaaaatataattttaagatcaaaggttatttcttttataagagaagaaatgaaaagatttggtttcttagaatttcaaactccaattttgacttcatcaagcccagaaggagcaagagattttttagtacccagtagattaaacccaggaaaattctatgctttaccgcaagctccacaacaattcaaacaattaataatggtttcaggttttgacaaatattttcaaatagcaccatgctttagagatgaagatgctagagcagacagaagtccaggtgaattttatcagttagatttagaaatgtcttttgtagatcaagaagatgtatttgaagtagtagaaaagttaatgattaatgtgtttaaaaatttttcaaacaaaaaaatgattaacaaaaaatttccaaaaattacattttcagattcaatgctaaaatatggaactgataaacccgacttaagaaatcctttaattatatcggacttaacagagatatttataagaaa

SEQ ID NO: 297854 - DNA, 837 bp, Unknown
  Bacterial polypeptide expressing nucleotide sequence isolated from the Sargasso Sea
tttgacatcatcgagtccagaaggtgctagggattttttagttcctagtagactaaatccaggaaaattttatgcacttccacaagccccacagcaatttaaacaattaattatggtagcaggctttgataagtatttccaaatcgctccatgttttagagatgaagatgcaagggcagatagaagtcctggagaattttaccaattagacatagagatgtcgttcgtggaacaagaagatgttttcgaagttgttgaaaagttaatggttaatttatttaaaaagttttcagataaaaaaattaattctgaaaaatttaaaagaatttcatatgaagaatcaatgactaagtatggaactgataaacctgatctaagaaatccattattaatatatgatttaactaatatttttaatcgtgacgatattaaatttgaaatatttaaaaaattagttaaatcaggatctaaagtaaaagcaatagtaacaaaagatacaaaagataaacctagaagtttttttgatacgatcgataattgggcaaaagaagaaggggcatcaggtcttgcctactttactttcgaaaaagataaacaaatttcagcaaaaggtccaataggtaagtttttctctgaggaatctttaaaagaaattatgaaaattacatctgctcaagtcggagacagtatttttctttcttgtggaaaagatggagatctcgaaaaaataacttcccaagcaagagacaagatagccagtcaattgaatttaattgatgaaaacgaatttgctttttgttggatagttgattacccaatgtttgaaaaagatccaat

SEQ ID NO: 297855 - DNA, 694 bp, Unknown
  Bacterial polypeptide expressing nucleotide sequence isolated from the Sargasso Sea
gaaaaataaagaaattcaaggaaaaggacctattggtaaattttttaacgcagagtcaattaaaagaatcatggaaataacgtcagcagaaattggagacactatatttttatcatgtggaaaggttagagaagtggagaaaatactttcattggcaagggataaaattgccaatgatttaaatctaattcaaaaagataaatttgcattttgttggatcgtggattatccgatgtttgaaaaagatgaaataacagataatataaaatttagccataatccattttccatgccacaaggagatttagataaaattaatctttcaaaaccgttggatataaaagcataccaatacgatatagtctgtaatggaattgaattatcttcaggagccataagaaatcatattccagaattaatgtacaagttatttaaaattgcaggatatgataaaaaaaatgttgatgaaaaatttagtggaatgatcaatgcattaagctatggagcacctcctcatggtggtattgctcctggtatagatagaatagtaatgttgttagctggtgaaaaaaatattagagaagttacaatgtttcctatgaatcaaaatgcgcaagatctattgatgaacgccccttcagaagttgacccccaacagttaaaagaacttaatttattaataaaaaaaaaataa

SEQ ID NO: 297856 - DNA, 625 bp, Unknown
  Bacterial polypeptide expressing nucleotide sequence isolated from the Sargasso Sea
ttgacttcatcaagtccagagggagcaagagattttttagttccaagtagattaaatcctggtaaattttacgctcttcctcaagcacctcaacagtttaaacaattaattatggtttctgggttcgataaatacttccaaattgcgccttgttttagagatgaagacgctagagccgatagaagtccaggagaattttatcaattagatattgaaatgtcatttgttgaacaagaagatgtatttcaagtaatagaaactttaatggtaagtttatttaaaaaattttcaaaaaaagtcataaaagatattaagttcccaaggataccctatcaagatgcaatgttaaaatacggaacagataaaccagatttaagaaatcctcttataataaaagatataacaaatatttttttaagggatgatgtaaaatttgatatatttaaaaaattagtaaaaaaagggtcttatgtaagatgtattgtgaccaaaaacacaaaagataaaccaagaagtttttttgataacattgataaatgggctaaacaacaaggtgcatctggtttggcttattttacaattgaaaaaaaagataagctttatggtaaaggacctgttggaaagt

SEQ ID NO: 297857 - DNA, 913 bp, Unknown
  Bacterial polypeptide expressing nucleotide sequence isolated from the Sargasso Sea
tcaggtggtattcgatcctgatcgtgccgagaccttcgccaaggccgaccgcgtgcgcagcgaatacgtggtgaagatcaccggcaaggttcgcctgcgtccggccggtgcggtcaacccgaacatggcgtccggtgccatcgaagtactgggctatgaactggaagtgctcaacgaagcggaaaccccaccgttccctctcaatgaatacaccgacgttggcgaggaaacccgcctgcgctaccgtttcatcgacctgcgtcgcccggagatggctgagaagctgaagctgcgctcgcgcatcacctcgagcatccgccgctacctagacgacaacggcttcctcgacgtcgagacgccgatcctgacccgcgctaccccggaaggcgcacgcgactatctggtgccgagccgcacccacgccggcagcttcttcgccctgccgcagtcgccgcagttgttcaagcaactgctgatggtggccggcttcgaccgctactaccagatcgccaagtgcttccgcgacgaggacctgcgtgccgaccgtcagccggaattcacccagatcgacatcgagaccagcttcctcgatgaaaaagacatcatggacatcaccgagaccatggtgcgcaacctgttcaaggaagtcctggacgtcgagttcggcgacttgccgcacatgactctggccgaagccatgcgccgcttcggctcggacaagccggacctgcgtatcccgctggaactggtcgatgtggaagatcagctcaaggacgtcgaattcaaggtcttcgccggtccggccaatgatccgaaatgccgcgtgaccgcgctgcgcgtgccgggcggggcgagcatgccgcgcaagcagatcgacgactacaccaagttcgtcggcatctacggcgctaag

SEQ ID NO: 297858 - DNA, 814 bp, Unknown
  Bacterial polypeptide expressing nucleotide sequence isolated from the Sargasso Sea
catagttcgaggaatagtagtaaaaaacaccaaagataagccaagaagtttttttgacaatattgacaaatgggcaaagaatcaaggagcttctggattagcttattttacaattgaaaaggattccgaatttaaaggaaaaggaccagttggaaaattttttaaaccagattcaataaaagaaataatgaaaatatccaacgcaaaggaaggagatagtatattttttgcatgtggaaaaactgcagaagtagaaaagttactttctgatgcgagagataaaattgcagatgaattaaaattaattaataatgatatttttgcattctgttggatcattgattatcctatgtttgagaaagatgaaaaaacaaataaaattatttttagtcacaatcctttttctatgccacaaggagatataaataatttagatttgtcagaaccactaaacataaaagcctatcaatatgatattgtttgcaatggaattgaattgtcttctggagcaattagaaatcatattccagaattaatgtataaattattttcagtagcaggatatgacaaaaaaacagtaaatgaaaagtttagcggaatgataaatgcgttaagctatggtgcgccacctcatggaggaatagcccctggtatagatagaatagttatgctgcttgctggtgaaaaaaatataagagaagttacaatgtttcctatgaatcaaaatgctcaagatttaatgatgaatgcaccttcagaggttaaccccgaacaattaaaagagttaaatttatcaataaaaaaaagtaaataa

SEQ ID NO: 297859 - DNA, 898 bp, Unknown
  Bacterial polypeptide expressing nucleotide sequence isolated from the Sargasso Sea
aatgtctcgctgttttagagatgaagatttgagagcagataggcagccagagtttacacaaattgatattgaagcttcttttgttacaactgattcgattaaagctttggcaactaaattaatgaagaaattgttctctatgcctgatgacttttcattaaagtcaatgacctataaagaggctttggacaagttcggaagtgataaaccagataatcgttttgacctttttcattacaacgtaacttcattttttaaagaaagtagttttgcaacttttcaaaaagtatcaaatgaggatggccttattaaggccatgtttttaggctcggatttgggttctctatcccgtaaagatcttgatggctttgttgaaattgtgaagcctcatggaggaaagggggttgctttttttaaggtacaagatggaaagagaagtggtggaatttcaaagtttatagacgatgagactatgtctaagcttgagtcttttcatggtggggatggagtttggatgttcttcgcagatgtttctgaaatggttgttcataactctgcagatgctgtaagacgctttctaggtaagaaatttgacttgattaagccgggctacagctttctttggattcacgacttccctctattagagtggaacccgaaggcgaaaagatacacttccatgcatcacccattcacaatgccaaaaaaagaacatttaaaatggcttaagtctggaaaggttgatgatgaaaaaagtccacttaaagacattttagctgaggcttatgatgttgtttgtaatggctatgaattaggtggaggatctataaggattcatgaccaaagtgtacaaagtgatatgtttaaggcccctggtttttcagaagaagaagccttg

SEQ ID NO: 297860 - DNA, 409 bp, Unknown
  Bacterial polypeptide expressing nucleotide sequence isolated from the Sargasso Sea
tttgactcgcagccgggcgaggccctcgcctgggcgtatgacctggtgtgcaacggcaatgaaatcggtggcggaagtatccgtattcacaacgcggatgtgcagcgacgcgtgttcgacgtgctcggcctcggggacgaagaagcccgggagaagttcggcttcctattggatgctttcgcgtacggaccgccaccccacggcggcatcgccttcggctgggatcgcatttgcatgttgctcgccgatgccgattcgcttcgcgacgtcatcgcattccccaagaccggtggcggtcacgatccgctcaccggagcaccgacgccgatcacggcggaacagcgctccgaagccggtatcgatgtggaccccgagctagccgaggcgtcaccagccggtgacgcgtagg

SEQ ID NO: 297861 - DNA, 931 bp, Unknown
  Bacterial polypeptide expressing nucleotide sequence isolated from the Sargasso Sea
gatgctggatgtggatttaggcaaactgccacaaatgacttattttgaagccatgcgtttatacggctcagacaaaccggatttacgcaatccgatgcagtttgttgatgtggctgatttactcaaagacgttgattttaaagtgttctcaggcccggccaatgatccgaaaggccgtgttgttgcattgaaagtacctggtgctgcggaaaaagtttcccgcaaagacatcgacacttataccgcttttgttggtatttatggtgctaagggcctggcctggttaaaagtgaacgacctgactcaaggcctggaaggcattcagtcgcctgttgccaagtttttaacggcagacatcgttactgaaattttaacgcgcaccggcgcacaaaacggcgacctgatcttctttggtgcagacagggccaaagtcgtgtgtgaagccatgggggcgctgcgcttaaagctgggtgaagatctagcgattacccagcctggctggaaaccactctgggtcgttgatttcccaatgtttgaagaaaacgatgacggcagttattccgctgtacaccatccgtttacttcaccactggacacagctgctttcctgtcaactgataccgacaagctggagcttggcactttattatctaacgcctacgacatggtgctgaacggtactgagctgggtggtggttctgtgcgcattcacacgccagaagtacaagctaaagtattccagttattgggcatcagcgatgaagaagcggctgagaaatttggtttcttattagaagcactgcgctacggtgcaccaccacatgcaggtttagcctttggtctggaccggttagtgatgctgatgaccggtgcaacttcaatccgtgatgtgatggctttccaaaaacagccactgccgcttgtccgctga

SEQ ID NO: 297862 - DNA, 874 bp, Unknown
  Bacterial polypeptide expressing nucleotide sequence isolated from the Sargasso Sea
tttagagatgaagatgctagggcagatcgaagtccaggtgaattttatcaattagatttagagatgtcatttgttgaacaagatgatgttttcgatgtcgtggaaaaattgctagtaaaaacttttaaaaaattttcaactaaaaagttaatatttgaaaagtttcctaaaatatcttaccgagatgctctattaaaatatggtactgataaacctgatttaagaaatccattaatcatatcagatattacaaaagttttttttagaacagatgtttcttttgaaatatttaaaaaattggtaaattctggatcaaaagtaagatgtattgttacaaaaaatactaaagacaaacccagaagtttttttgataacatagataaatgggcaaaagatcaaggtgcgtctggtttagcatattttacttttgaaaaagagaaagatatttcagctaaaggacctattgggaaatttttttctaaagaagccatagaagaaataatgaaaattacaaaggctgaggtaggagatagtattttcttagcttgcaataatcagaatgaattagagaaaattacgtctttagctagagataaaattgccaatgatttagaattaatagatgaaaatacttttgctttttgttggatagttgactatccaatgtttgaattaaatgaacagactaagaagattgaattcagtcacaatcctttctccatgcctcaaggggacctagataaaataaattttaaaaatcctttagaaattttagcttatcaatacgatattgtttgtaatggaatagaactttcgtctggagctataagaaatcatattcaagaattaatgtataagctatttttaattgctg

SEQ ID NO: 297863 - DNA, 217 bp, Unknown
  Bacterial polypeptide expressing nucleotide sequence isolated from the Sargasso Sea
cctgaaggggcaagagattttcttgtaccaagtagattaaatcctggaaagttttatgctcttcctcaggctccacaacaatttaaacaattaattatggtatctggttttgataggtatttccaaattgctccatgttttagagatgaagatgcaagagcagatagaagtcccggagaattttatcagctagatttagaaatgtcatttgtagaac

SEQ ID NO: 297864 - DNA, 853 bp, Unknown
  Bacterial polypeptide expressing nucleotide sequence isolated from the Sargasso Sea
tcgtttgagatatttaaaaaattagtaaaatcaggatccaaagtaagatgtattgttacaaaaaatacaaagaataagccaagaagtttttttgataatattgataagtgggcaaagggagaaggtgcttctggtttagcatattttactcttgaaaaagataaagaagtttcagcaaaaggtcctataggtaaattctttgctcaagacgcattattagagattatgaaaataactaattgtgaaataggggacagtatttttatggcttgtggcaaacaacacgatttagaaaaaattactgctttagcaagagataaaattgcgaaagatcttgatataattgatgaaaatattttcgcattttgttggattgtagattatccaatgtttgagagagatgaattaaccaacaagattaaattcagtcacaatccattttcaatgccacagggtgatttaagccaaaaagattttgaaaatccattagatatacttgcatatcaatatgacatagtttgcaatggtatagaattatcatctggagcgattagaaatcacaaaccagaacttatgtataaacttttttcaattgcaggatatgataaaaaaaaagtaaatgagaaatttagtggaatgattaatgcgctcagttatggagcaccaccacatggaggtatagcacctggaatagacagaatagtaatgttactagctaatgaaaaaaatattagagaggtaacaatgtttccaatgaaccagaatgcacaagatttgatgatgaatgcaccgtctgaggtgaatttagatcaattgaaagaattaaaccttgctttaaaaacgaaaaaataaa

SEQ ID NO: 297865 - DNA, 670 bp, Unknown
  Bacterial polypeptide expressing nucleotide sequence isolated from the Sargasso Sea
atgcgcacagattactgtgggaatatcgattcatcatacattggacaagaagttaccctttgcgggtgggttaataagcgtcgcgatttaggcggtgtaattttcatcgacttacgcgaccgcgaaggtatcgtacaagtggtgttcgacccagatttaccagacgtgctatcggtagctaacacgttgcgtagcgaattctgtgtaaagctaacgggtaaagtgcgtgcgcgccctgaaggtcaagtaaataaagacatgcgcacaggtgagattgagatcctgggcacaggccttgaagtgatcaacaagtctgacgtgcttccactggactggaaccaagaaaactcagaagaacagcgccttcgctatcgttatctagatcttcgccgtcctgtaatgagccagcgtttacaattccgtgcaaaagtaaccggtgctgtacgtcgcttcctagaagaagaaggtttccttgatattgaaacgcctattcttactaaggcaacgccagaaggagcacgagactacctagtgccaagccgcacgcacaaaggtgagttctttgcacttccgcaatcgccacagcttttcaaacagcttctgatgatgtcgggcatggaccgttactatcaaattgttaagtgcttccgcgacgaagatttacgtgccg

SEQ ID NO: 297866 - DNA, 867 bp, Unknown
  Bacterial polypeptide expressing nucleotide sequence isolated from the Sargasso Sea
tcaaaagaaaaactcataaataaacttccgtttccatcctttacttacaaagatagtattaagaattttggatgtgacaaaccagatttaaggaatccattaagacttacaaatgttacaagatattttgagggatctggtcttcaaatttttgaaaacttaattaaaaaaggagccatagtaaattgtattcaagctgtaaattctgagggtaagccaagaagtttttatgataatttaaataaatggtcccaagaacaaggaaaaaaaggtttgggatatataaacttcgaaaatttattacctaaaggacctttagcgaaaaattttaatcaagaaatattaaatcaaatgattaaggataataatttcaaccaaagtgatggattactatttgtgtgtgatttacctgaagagtcatatgatttttcctcaaaggttattgcaaaagtaggagaagatttaaatttaattgataaaaataaatacgagttttgctggatagttgattaccctatgtatgaaaaggatgttctaacaggtaagattgattttagtcataatccattttcaatgccccaaggaggtatggataagttaataaaagaagatcccttaaatgttttagcttatcaatatgacattgtttgcaatggtatagaattgtcctcaggagctataagaaaccatagacctgatattatgaaaaaagcatttgaaatagctggatatggtgaaagcgagattaaaacaaaatttagtgctttatttgaggcttttcattatggagtcccaccacatggaggctgtgcacctggattagatagaataataatgttgcttagtgataatgaaaatataagagag

SEQ ID NO: 297867 - DNA, 904 bp, Unknown
  Bacterial polypeptide expressing nucleotide sequence isolated from the Sargasso Sea
gttgaagagccaacacgacttaggggttggattgatagcgtaagagatcatggcggtgtaatttttatagatttaagagatgaaacaggcataacccaggtagttgtagagcctgaaaataaagagttcttctatatggctgaaagatgtaggtcagaatttgtgctatcagtggatggaaaaattagaagaagacctgacggaactattaataaacaaatacctacaggagaagttgaattgttagtttcttcatttgaaattctatcagaatcatatcccctgccatttcagcttgatgactattcttcagcaggagaggaggtaagattaaaatatagatttttagatcttagacgatctgaaatgcaaaataacattagagcaagatcaaaagtttcatcttcaataagagagtttatggacaaagaaggatttctagatattgaaactccaatgatgactaaagcaactccagaaggagctagagattttcttgttccaagtagaatttcacgcggcagcttttacgctttgccacagtcacctcaattatttaagcaacttttaatggcttctggatttgaaaagtattatcaaattgtacgatgctttagggacgaagatacacgtgcagatagacagcctgaattcactcagctggatatagaaaaggcatttaccgatgaagatgagatcatcaatctatccgaaaaattgattaagttcgtttttaagaagttacttgaaataaagctgcctaaatttccaaaaatgacttactcagaggccatagaaaggtttgggagcgataaacctgatttaagaatcaacttagaattaaaagaagtaaaggaaatcttcctaaattctgatttcaaggttttttctggtcctgcaaacg

SEQ ID NO: 297868 - DNA, 688 bp, Unknown
  Bacterial polypeptide expressing nucleotide sequence isolated from the Sargasso Sea
atgcgttcacattattgcggagatattaatagttcagacattggtagcaatattgagatttctggatgggttcacaagcgaagagaccatggcggtgtaatttttttagatgttcgtgatttacatggaatagttcaagttgtttttaatccggatataaaagaaatatttgacactgcagattcttgcagaagcgagtatgtcgttaatattaaaggattggttagaaagagaattaaaggcgccgtaaatccaaaaatggctaccggagaaatagaaattgaagcaaacggtataaaaatttttagctcagctgttacccctcaatttccactggatgactatcaagatgttaacgaagatgtaaggcttaaacatagatttttagatttaagacgccctgatgtgaatcaaaggttggttaagagatctcagatcacctcaaaaataagatctattttagaaaataataattttcatgaagttgagactccaatattgactaaagctacgcctgaaggagcaagagattatctagttcctagtagagtgcatccaggggagttttttgcattgcctcaatctcctcagctatttaaacaattactgatgattggtgggttggacaaatactatcagattgctaaatgttttagagatgaagatttacgtgcagacagacagcctg

SEQ ID NO: 297869 - DNA, 806 bp, Unknown
  Bacterial polypeptide expressing nucleotide sequence isolated from the Sargasso Sea
tagatctatacgagaatcaatgaacgaattaggattccttgaacttgacaccccaacattaactaaatcgaccccagaaggtgccaaagactttcttgtcccttcacgaaaacaaaatggggccttctacgcattgccccagtcacctcaaatgtataaacaattattcatggtgtcaggttttgataaatactatcaaattgctaagtgttatagagatgaagattctagaaaagatagacagccagaatttactcaacttgatttagaaatatcaaatggatcacctgaaatagtaagggaaattgctgaatctgttgtaaaaaatcttttaactgacgtttttgaattagaagtagaaataccttttattgaaatgacatatgatgaagctataaatacatatggtacagataagcctgatctaagaataaaaagtacaattaaagactttacaaatatatttaaaaaaactgaaattaaatttattaagtcagcaatagaaaataatggatttgtaaaaggatttgttacagaagatattttatctagatcacaaatagatgaattagatgaaatagtaaaagacagtggtagcaatggtcttggttggttcaagatcgaaaataatgaagttagtggtcctttatctaaaattattagcgatgatgaaaaaaataatatattaaaacttggtgaaggaatgctcatttttcaatcaggaacaaaagaaatatatccaatacttgatattttaagaaggtcaatattcaaacctgatgatactctaaattttttatggattt

SEQ ID NO: 297870 - DNA, 807 bp, Unknown
  Bacterial polypeptide expressing nucleotide sequence isolated from the Sargasso Sea
gtatagtcacaaaacaaacaaaagataagccaagaagtttttttgataatattgataaatgggctaaagaacagggttctggtggtttagcatatttcacttttgaaaataataataataaaataagtgcaaagggccctataggaaaatttttttcagaagagtctttaaaagaaattatgagaattacttcctctgaaataggtgatagtatttttatgtcttgtgatatccaaaacaatgtcgaaacgctattgtcacaaactagaaataaattaggaaatgaacttgatttaattaatgaaaaaactttttctttttgttggattgtagattatccaatgtttgaaaaagatgaagtaacaaaaaaaattaaatttagtcataatccattttctatgccccaaggtgatattgataatatagatttaacaaaacctttagaattaaaagcttatcaatacgatattgtttgtaatggaattgaactatcttcaggagcaataagaaatcatatacctgatattatgtataaactttttgagattgctggatatgacaaaaaacacgttgatgaaaaatttagtgggatgattaatgcactgagttacggagcccctcctcatggaggaatagcacctggtattgatcgtattgtgatgttattagcagaagaaaaaaatatcagagaagtaactatgtttcctttgaatcagaatgcccaggatttaatgatgagtgcaccttctgaagtgagtttagaacaacttaaagagttaagtcttacacttaaatcaaaaaaataac

SEQ ID NO: 297871 - DNA, 376 bp, Unknown
  Bacterial polypeptide expressing nucleotide sequence isolated from the Sargasso Sea
agaaacctttggatattcttagcttttcaatacgatattgtatgtaacggtattgagctttcttctggtgccattagaaatcatattcctgaacttatgtataaattattttcaatcgcaggttatgataaaaaacaagtagatgaaaaatttagtgggatgataaatgctttaagttatggagcaccacctcatggaggaatagcaccaggtattgatagaatagttatgcttttagctaatgaaaaaaatattagagaagtaactatgtttccaatgaatcaaaatgctcaagacttaatgatgaacgcaccttctgacgtaaatgaaaatcagttaaaagagttaaatttatctataaagtcgaaaaaataat

SEQ ID NO: 297872 - DNA, 923 bp, Unknown
  Bacterial polypeptide expressing nucleotide sequence isolated from the Sargasso Sea
gacttacgctgaatccatgttgctctacggaactgacaaaccagacctaagaaatccaataaagattgtagatgttacagatatatttgatggaagtggcttttcactatttgcaaatttaatttcaagtaaaaatgcagttgtaagggctgttccaggaccaaaatgtggaagcaggtctgttgctgacagaatgaatagttgggctcaaggagagggtgctcctggaatggggtatataatctttggtgatggagaggctaaagggccagttgcaggtgctcttggaaaagaaaaatgtgatgaaataaaaaataggttaggactccaagatggagatgctgcatttttctcttgttcaaacgaaaaggatgcagctgatttggctggaaaagcaagagttaaaattggcttagatcaaggaatttctgaaactgatggttataaattttgttggattattgattttcctatgtatgagttagatgaaaaaggtaaaattgaattttcacataacccattttctatgccccaaggtggtttagaggcactcaataaccaaaatccattggatattaaagcttggcagtatgatttagtatgcaatggtgtagagctttcttctggtgcaataagaaatcatttgccaaaagtaatgtataaagcatttgaaatcgcaggttattcaaaggaaacagtcaatgctaatttttcaggcatgattagtgcttttaaatttggtgctcctcctcatggaggttttgcacccggaattgatcgcatagtaatgcttattgctaatgagcctaacattagagaagtaattttatttccaatgaatggtaaagctgaagatctaatgatgggggcaccgtctgaagtttcagatgatcaattaaaagagttgaatattaagaaaaaca

SEQ ID NO: 297873 - DNA, 422 bp, Unknown
  Bacterial polypeptide expressing nucleotide sequence isolated from the Sargasso Sea
tccctttactgctccaattgcgggagcaaaagctatagagattgatccaggaaatgctgtttccagagcatacgatgtggttattaatggcagagaaattgggggcggttcaatacgtattcacgaaccggaattacaaagtgctgtgtttcgcatactaggcttaccggaggaagagattaaattgaagtttggatttcttttagacgctctcaaatctggtgcgccaccgcacggaggtatagcttttgggttagacaggctgatcatgattatgacgggggctgactcgctgagggatgtaatagcctttcccaaaacacaaaccgctacatgtctcctaactgaagcgcctggcatggccgattctgagcaactaagtgaattaaatatctcggttagaacccttgacttggattagg

SEQ ID NO: 297874 - DNA, 862 bp, Unknown
  Bacterial polypeptide expressing nucleotide sequence isolated from the Sargasso Sea
atatttaaggattcaggatttaaaatttttttcggagtcaataaaaaaagacgataatattaaagtctggggtatccctgcaaaaggtggaggatcaagagccttttgtgataaaatgaattcgtgggcaattaaagagggccaaccaggccttggttatatattttttaagaaaggatcaggatcgggtccaatttccaaaaatataggagaagagaaaactacctctattagaaataaatttaatcttaacgataatgatgccgtattttttatttgcggtattcctaaaacctttttaacttttgcatctagtgctagagataaaattgctaatgaccttggtctaatagattctaatacctttgagttttgttggattgttgattttccaatgtatgagtttgacgagattaataaaaaaatagatttctctcacaatccgttttcaatgcctcagggtggaatagacgccctagagaacgaagatcctcttgaaataaaagcttttcaatatgatatcgtttgtaatggcgtagagttatcttctggtgcgataagaaatcataaaccagaaattttattaaaagctttcgaggtagctggatacgatgaagttgaagtagaaaaaagatttggtgcaatgagtgatgcttttaaatacggtactccacctcatggaggaattgctccaggtattgataggatagttatgctattatcaggttcagataatattagagaggtcatagccttcccaatgaaccagcaagctcaggatattttaatgggcgctccctcaaaagtatcaaaagaacaattagatgagcttggtataaatattattgaagaggataattag

SEQ ID NO: 297875 - DNA, 601 bp, Unknown
  Bacterial polypeptide expressing nucleotide sequence isolated from the Sargasso Sea
tcaattttctttgcatgcgctaaaggcaaagaagtttatgatattgctgctgcagccagagataaaattgcaattgatctggatctagttgaaaagggagtatttaagttttgctggattgttgattttccaatgtatgaaaaggataaagaaactggaaaaattgattttagtcataatcctttctcaatgccacaaggtggattggaagctctaaacaataacgatcctttaaatgttttaggctatcaatatgatattgtttgtaatggcgtagagctatcatcaggcgctataaggaatcacgttccagagattatgtataaggcctttgaaatagctggctataacaaagatcaagtacatgaaaaatttggaggcatgataaacgcttttacttatggtgtgcctcctcatggcggcattgcaccaggaatagacagaatagtgatgctacttgctcaagaaaaaaatattcgtgaggtaatattgtttccaatgaatcaacaggcccaggatctgatgatgctggcccccgctgaagtcgataggacaacgcttgatgaattgaatgtagaagttaaaccaactgatgaataaa

SEQ ID NO: 297876 - DNA, 913 bp, Unknown
  Bacterial polypeptide expressing nucleotide sequence isolated from the Sargasso Sea
aaacgtacacacacttggtggagaattaggtaagtccaatgtgggcgaagaaatccagttgaatggttggattaataccgtaagacttcatggaaagatagtatttgtagatctcagagatagatatgggaagacacaattaatctttgatgaaaaaaattttcctaaggaattcgaaaagattaaaaaattttccgtagaggatgtcatttcgataaaaggaatagttgagcatcgttctggttcatcgattaatccttctatgaaaactggtgaaattgaagtatctacaaccaattatactatacttaataagtctgagccattgccgtttgtattatcagatcgaaatagtgcagaagaacattttagattaaagtatagatatcttgaactaaggatagatgaattacaaaataatatgatcattaggcataatacttatcaagctactaggaagttcttgtcaaataataattttttagaggttgagactccagttttgatgaaatcgactcctgaaggtgcgagagattatttagtaccaagccgtctgcataatggaaaattttatgcattgcctcaatcgcctcaaatttacaagcagatactaatgatatctggctatgatcgttattttcaaatagtaaaatgttttcgtgatgaggatctgcgtgcagatcgtcagcctgaatttactcaaatagatatagaaatgtcatttgtcgatgaagaagatgtttttctaaatatggagaatcttactagagatatcttttcatccgttagaggaataaaactgcctagtacttttccaagaataacctataaggaggcaatggaaacatatggctctgacaagccagatacaagatacgaaatgaaactggtagatttaaaatcatacacagat

SEQ ID NO: 297877 - DNA, 178 bp, Unknown
  Bacterial polypeptide expressing nucleotide sequence isolated from the Sargasso Sea
tatgagaagtatttattgtggggatgttggagctaaagaagaaggtcaagaagtaactgtagctggatgggttcatagaagacgagatcatggcggagttatatttattgatcttagggatcgtgaaggactcgtccaggttgtctttaaccctgagagaaaaagaaattttcactga

SEQ ID NO: 297878 - DNA, 717 bp, Unknown
  Bacterial polypeptide expressing nucleotide sequence isolated from the Sargasso Sea
tcacctgaaggagctagagattatttagttccttctagaattcatcatggtcagttttatgctctacctcaagcccctcaacaatttaaacaactattaatgatggcaggtttcgataaatattttcaaattgccccatgttttagagatgaagatagtagagctgacagatctcctggagagttttatcaattagattttgaaatgagttttgttacccaagaagatatatttaacgaaattgagccagtattgtatgaaatatttgaggaaaataaaaattaccatactaatgaaaatgtaacagtcagcagttatccttttaagaaaataccgtttgaagaatctctagaattatatggaactgataaacctgatttaagaaatcctttattaattaaagattgcactgatatttttaaaggttcagaatttaaaatatttgctagcttaattgaaaaaaattataaagttaagggtatagtagtaagtaatacagcagataaaccccgaagtttttttgataaattaaataactgggcaagggatgagggtgcagcaggtcttggatacataagctatgctgaaaattcacataaaggaccaattgctaaaaatttagattctgctagattaaatcaatttaaattaaaagataatgaatctattttttttgtatgtgataatcagaaagaggctcaattatttgctggtaaa

SEQ ID NO: 297879 - DNA, 775 bp, Unknown
  Bacterial polypeptide expressing nucleotide sequence isolated from the Sargasso Sea
ggcggcagtagaaagttttgtgacagaatgaacgcctttgctcaaaaagaaggtctgcctggaatgggatatatattctggcgagacaatggtgatgggatggaagccgcgggaccgctcgcaaaaaacattggctcagagagaacagaagccttgcgtgcccagctaggccttgggataggggatgccgctttctttttgggcggtaagcctaaaaatttcgaaaaagttgcaggtaaagctagagacgtaattggtgatgagctcaatctgacagatcatgatcgctttgcttttgcatggatcgttgattttccaatttatgaaaaagacgaagaaaccggcagaatagattttgagcacaatccgttttcaatgcctcaaggtgggatggaggcgctagaatctgatcctttgcaggtaagaggttttcaatatgatttggcatgcaatggctatgaattagtctccggcgctattagaaatcatcggcctgagattatgtttaaggcatttgaaattgctggctatgatgaaaacgaagttaaaaatagatttggcggaatggtaaatgcttttcagtacggagctccaccccatggaggttgcgctgcgggaattgataggattgtcatgctactggcagatcagcaaaatattagagaagtaattatgtttccaatgaatcagagagctgaagatttaatgatggaagctcctagcgaaccattgccggatcaattaatggaattaaacttgcgagtattccgcaaga

SEQ ID NO: 297880 - DNA, 840 bp, Unknown
  Bacterial polypeptide expressing nucleotide sequence isolated from the Sargasso Sea
cttttcattgatctaagagatcattatgggataacacaatgtgtaattgataaagaaaataaattttttaaaaaattggaaaagcttcaacttgaaacagttataaaaataaatggaaaagttatagaaagaactaaagagacaattaataaagatcttttaacaggggagattgaagttgcaattgaaaaatttgaaattgtgggaaaaacaaaagagttacctctccctgtttttagtgatcaagaatattctgaggagataagacttaagtacagatttctagatttaagaagaaaacaaattcataataatattatcttaagatcaaaagtaatttcctttattagaaaagaaatggagaagatggattttttagagtttcaaacccccatattaacttcatcaagtcctgagggagcaagagactttcttgttccgagtagattaaatcctggaaaattttacgctttgccccaggcaccgcaacaatttaaacaacttataatgatttcaggatttgataaatactttcaaattgcgccctgcttcagagatgaggatgcaagggcagatagaagtcctggtgaattttatcaattggatatggagatgtcatttgttgaacaagaagatgtattttcagtaattgaaaatctctttcttaaattgtttaaggaattttcgaataaaaaactagcaagtgaaaagtttcctagaataaaatattcagaagcaattgaaaaatatggaacagataaacccgaccttagaaatcctttggtaatctcaaatatttcagaaatttttagcagagaggatgttaaatttgatcttttt

SEQ ID NO: 297881 - DNA, 861 bp, Unknown
  Bacterial polypeptide expressing nucleotide sequence isolated from the Sargasso Sea
cttctatttattgatttaagagataattacggtttgacacaatgtgttattgataaaagtaataaatattttaaagacttagaaaaaattcagctagagagtgttgttaagattagtggaacagtcatcgaaagaagtaaagagacaattaattctgaacttaaaactggagaagtggaagtaaatatagtttcatttgaaatacttggcatttgtaaagaattgccaatgcctatctttagcgatcaagactatgccgaagaaataagactaaaatatcgatttttagatttaagaagaaaaaaaattcatgaaaatataattttaagatctaaggttatttcttttataagaaataaaatgcaagaactagattttttggaatttcaaacaccaattctaacttcatcaagtcctgaaggtgctagagattttttggttcctagcagattaaatccaggaaaattttatgcgcttccgcaagctcctcagcagtttaaacaattggtcatggtttcaggttttgataaatattttcaaatagcaccatgtttcagagatgaagatgcaagagcagatagaagtccaggggaattttaccaactggatttagaaatgtcttttgttgaacaagaagacatatttaatgttgttgaaaaattgatggtcagtttatttaaaaaattttcatctaaaaatataattaatgaaaaatttccaagaatttcatatgaagatagcatgcttaagtatggtacggataagccagatttgagaaatcctttgttaataagtgacttaacaaatatattcacacgtgatgatgttgaatttgatatatttaaaaaattagtcagcaaa

SEQ ID NO: 297882 - DNA, 781 bp, Unknown
  Bacterial polypeptide expressing nucleotide sequence isolated from the Sargasso Sea
cctagaagtttctttgataatttaaataattgggcaatagcggagggagcaagcggattagcttatattacgtttgaaaaaaacaaagataaaatttctggaaaaggaccgatatcaaaatttttttctgaaaaagctatatcagaacttatgaattcttgcaaaataacggaaaaagactctgttttttttgtatgcaatcaggaattagaagcaaataaatttgcaggtatagcgaggcagaaaattgcagaagaattaaaaatgattgataaaaactcttttagtttttgctggatagttgattttcctatgtatcaatatgatgacaaagagaaaaaaattgactttagtcacaaccctttttccatgccacaagttgacataaaaaactttgataaattggatccacttgaaattttagcttaccaatacgatcttgtttgcaatggttatgagttatcttctggagcaataagaaatcatatacctgaatatctatttaaagtttttagcaaggtaggatattcaaaactgatggttgaaaaaaacttttctggaatgctaaaagctctgtcttatggagcaccacctcacggaggtatggcgccagggatagataggattgttatgcttttagccaatcaaaaaaacattagagaggttactttatttccacttaaccagaatgctcaggaccttttaatggaagcaccagctgaagtgagcgaaaagcaattaaaagaactaaatattaaaactgttaaaaataaaacttagc

SEQ ID NO: 297883 - DNA, 840 bp, Unknown
  Bacterial polypeptide expressing nucleotide sequence isolated from the Sargasso Sea
tatgagagaagatactcgtttaaaatttagatttttagacttaagaagagctaaaatgcaaaaaaatattttgttaagaaataaagtaatttcattaataagagatggaatgattaaacaaagttttacagaaatacaaactccaattttaacagctagttccccagaaggggcaagagactatttagtgcctagcagggtgcatcctggtaaattttatgctttaccacaagctcctcaacaatttaaacaattattaatgattgcaggctttgataagtattttcaaattgccccatgttttcgtgacgaagatagtagagctgatagatctccaggagagttttatcaattagattatgaaatgtcttttgtaacccaagaagatgttttcagtgccttagagccagtattatttgatatttttacaaaacttacaaaaaacttttctatttccaaaccaccttttaaaaaaataccttttgatgagtgtgtaaaaaaatatggaaacgataaaccagatttacgtaatcctttaattttgtccgatgtcacagatatttttaaaggttccacttttaaattatttgctgaaaatattaataaaggatcaattgtaattgcaattccagctcccaatagtaaagatcaaccaagaaccttttttgataaactaaataattgggctaaagatgaagggcagggcggcatgggttatatacagtttatcaaaaatgagggaaaggggccaatagcaaataatcttgataaagaaagaataaataaatttttaaaaattgaaggcgtcgatggaaatagctcaatattttttctttgtgg

SEQ ID NO: 297884 - DNA, 324 bp, Unknown
  Bacterial polypeptide expressing nucleotide sequence isolated from the Sargasso Sea
gaggaagtatcaggatacataggagggatattcagcaaaaaattttcagtttgcttaacctttcaaatcaggagatagaaaataaatttggtttcttgatggaagcccttacttacggtgctccgccacatggtgggattgcgcttggatttgataggataatgatgttccttcttaaaactgaatctattcgagatgttatcgcttttccaaaaacacagaaagcaggatgtttaatgactgacgcgccttcagttgtcgatagtgagcagctagatgacttgcatataagagttaaggcctcggctcagcaagcagagtaaa

SEQ ID NO: 297885 - DNA, 679 bp, Unknown
  Bacterial polypeptide expressing nucleotide sequence isolated from the Sargasso Sea
aaggggcctattgcaaaatttatcccctctgaaattcaagaaatgatattaaacaaagcaggtcttaaggccggagactcaattttctttgcatgcgctaaaggcaaagaagtttatgatattgctgctgcagccagagacaaaattgcaatagatttggatctagttgaaaagggagtatttaagttttgttggattgtcgattttcccatgtatgaaaaggataaagaaactggaaaaattgattttagtcataatcctttttcaatgccacaagggggattggatgcgctaaataattcagatcctttaaatgttttaggttatcaatatgacattgtttgtaatggtgtagagctatcatcaggcgctatacgaaatcacattccagaaattatgtataaggcctttgaaatagctggctataacaaaggtcaagtgcatgaaaaatttggaggcatgataaatgcttttacttatggcgtacctcctcatggcggcattgcaccaggaatagacagaatagtcatgctgcttgctcaagaaaaaaatattcgtgaggtaatattgttcccaatgaatcaacaggcgcaggatctgatgatgctggctcctgctgaagtcaataagactacacttgatgagttgaatttagaagttaaaccaactgatgaataaa

SEQ ID NO: 297886 - DNA, 444 bp, Unknown
  Bacterial polypeptide expressing nucleotide sequence isolated from the Sargasso Sea
aaaaaataatttttagtcataatcctttttctatgcctcaaggaagtattgaaaaactaaattttgaaaaacccttagaaatgaaagcttatcaatatgatatagtttgtaatggtgttgaattatcatctggcgctataagaaatcatattcctgaattaatgtacaaattattttctattgcaggatatgacaaaaatgaagttaataaaaattttggtggtatgataaatgctttaagttatggagcaccacctcatggcggaatagcaccgggtatagataggatagtaatgttactggcaaataaagaaaatatcagggaagtaactttatttccgatgaatcaaaatgcccaagatttaatgatgcaggctccatctgaggtagacaataaattattaaaggaactcggtataaaattagatacaaagaaaaattagt

SEQ ID NO: 297887 - DNA, 804 bp, Unknown
  Bacterial polypeptide expressing nucleotide sequence isolated from the Sargasso Sea
ttgttaaaaatatttctaataaaccaagaagtttttttgataatttaaataagtgggcaattgactcaggtgctaagggtttagcatatattgcttttgagaagaatgagaccaaaataatcagcaaaggaccgattgcaaaatttttttcacaaaatgctctagactcactcgttaaagacgccaatgtatcaccaaacgattgcatatttttcattagtgataaatatagtgaggcaataaaatttgcaggattggtaagaactaaaattggcacagacttaaaactaatagacgaagatcaatttaatttttgctggatagttgattttcctatgtatcaatatgatgaagttgagaaaaaactagaattttcacacaatcccttttccatgcctcaagcaaatatagacgagtttgataagatggatcctttgaaagttttggcatatcaatacgatttagtttgtaacggatacgagatttcatcaggagcaattaggaatcatcttccagattatatgtataaagtttttaaaaaagttggttacgaaaaaaaagatattgataaaaaattttcaggcatgataaaagctctatcttacggggctcctccacacgggggtatggcgccaggtattgacagaattgtaatgttactagctggtcaaaaaaatataagagaggtaactctttttccaatgactcaaaacggtcaagatttattaatgggcgcgcctgctgaagttaatgaaaagcaattaaaggaacttggtttaaagattaatattaaaaaagattaat

SEQ ID NO: 297888 - DNA, 766 bp, Unknown
  Bacterial polypeptide expressing nucleotide sequence isolated from the Sargasso Sea
attaagtatggttttttagaattccaaacaccaatattaacttcatcaagtcctgaaggtgcaagagattttttagttccaagtagattaaatcctggaaaattttatgctttaccacaggcacctcaacaatttaagcagttagtgatggtctctggatttgataagtattttcaaattgcaccgtgttttagagatgaagatgctagagcagatagaagtccaggcgagttttatcaattagatttagaaatgtcttttgtcgaacaggaagacgtttttgaagttgttgaaaaattgtttgaaaatatctttcaaaaattttcaaaaaaaaaattgttatttagtaaatttccaaaaatttcttacaaagactctatgttaaaatatggaaatgataaaccagatttaagaaatccacttataataagtgatattacagaaattttttttagagatgatgtttcatttgaaatatttaaaaagttagtaaaaactggttcgattgtcaggtgtatagttactaaagatacaaaggataaaccaagaagtttttttgataatattgatagatgggcaaaagaacagggtgcttcagggttagcttactttacatttgaaaaagataatgaattatacgcaaaaggccctgtcggaaaattttttaccaaagaagctctagagctattaatgttaaaaactggtgcaaaaataaaggatagtatcttcttagcctgcggtaaaaagaatgatttagaaaaaatca

SEQ ID NO: 297889 - DNA, 565 bp, Unknown
  Bacterial polypeptide expressing nucleotide sequence isolated from the Sargasso Sea
attgtttctgattcgatgggagcactaagaaacaaaatagctgaagattttgatttaatagaagggtcttggaaaccggtttggataacaaattggcctctatttgaagaatctattggaggagatctttctcctgctcatcacccctttaccagcttcaagggctcaatagaacacctcgaggctgatcctggagcagtagtagccaatgcatatgaccttgttataaatgggactgaagttggaggtggatcgataagaattcataaatcttctgagcaggtaaaagttctggaagtgttgggtatttctgaaaacgaggcacaaaataagtttggtttttttcttgatgcattgaattatggatttcctcctcatggcggtatagcttttggtttagatcgactagtaatgctcatgatgggagcagattctattagatcggtgattccctttcctaaaacgcagtcagctttatgtttattgacggatgcccctactagagtggattctgaacagcttgaagagctaggtatttcattaaccgatcctgacggagattaag

SEQ ID NO: 297890 - DNA, 843 bp, Unknown
  Bacterial polypeptide expressing nucleotide sequence isolated from the Sargasso Sea
attgacttcatctagtcctgaaggtgcaagagactttcttgtacctagtagattaaatccaggaaaattttatgctttacctcaagcaccacaacaatttaaacaattaattatggtttcggggtttgataaatattttcaaattgcaccttgctttagagatgaagatgcgagagctgacagaagcccaggagaattttatcaactagatttagaaatgtcttttgttgaacaagaggatgtttttagtgttgttgaaaaattattagttaatacttttaaaaagttttcaaataaaaaattaatgtatagtaaattcccaaaaatttcttattcagatgcaatgttaatgtatggtactgataaaccagatttaagaaatccattaattataaatgatattacagaaatttttacacgtgatgacgtatcttttgaaatttttaaaaaattggtaaaatctggcgctaaagttagatgtatatcaactaagaatacaaaagataaacctagaagtttttttgatggcatcgataagtgggcaaaagatgaaggatattcaggtttagcatattttacaattgaaaaagagggcaatctttcagcaaaaggtcctataggaaaatttttttctaaggaagctataatagaaataatgaaaaaaacaaaagcagaagtaggagatagtatttttcttgcttgtgggaaacaaaacgaattagagaaaattacctctcaagctagagataaaattgctaaagatttggaattaatagacgataatatttttgctttcagttggatagtagattacccaatgtttgaaagagatgaaataacaaa

SEQ ID NO: 297891 - DNA, 762 bp, Unknown
  Bacterial polypeptide expressing nucleotide sequence isolated from the Sargasso Sea
agattctaggatagctgctttatctgtacctaaaggtgaaacgcttacaagaaaacaaatagatgactatacagaatttgttggaaactatggagctaaagggctagcttatataagagtagaagacccttctaaaggtaaagaaggtttgcagtcacctattattaaatttattgacgatgagattattaataaacttcttacggtattggatgctaagaaaggtgacataatattttttggagcagggaaaagaaatatagtgaatgactctctagcagctttaagaaatttgcttggtaaagatctggatttattagagtctgactgggctccttgctgggtagttgattttccaatgtttgaaaagaataacaaaggagagttgactcctttacatcatccctttactgccccaagaggtagtattgatgaattaaaggcagagcctctaaatgcacttactgacgcttatgatgtagttttaaatggcactgagttaggtggaggttcggttaggatacatgatcataagatgcaaaaggcggttctcagcttattagatataaatgaagaacaagctgaagaaaagtttggttttttgaccgcagctctgcagcatggttgtcctcctcatgcaggattagcaattggttttgataggatgattatgttgatgactaattctgaatctataagagatgttattgcctttcctaaaacgcaaactgcctcttgcttgttaaccgatgcacccggaga

SEQ ID NO: 297892 - DNA, 664 bp, Unknown
  Bacterial polypeptide expressing nucleotide sequence isolated from the Sargasso Sea
tttgattctaatttaactaaagagattattgatagtctaaagcttgaagacaattctatttgctttatgattggagacaagttaaatacttccttacaggttttaggtaaaattagaagtaaggtaggagatttaattgaattaaaagataactctatattttcacctgtttggattgttgattttccattatttatgtggaatgaagaaacaaaaaggtatgattcagtaaatcatccgtttactgctcctaaagattctgatttaggtgatgttacttcaaatccttcagaagttatttctaagggatatgatattgttattaatggttatgaggtagctggtggctcaattagaattcatgatcatagtttacaaaaagatatttttaagattatggatttatctgataaagagatttctgaaaaatttggattttttattgatgcattaaaatatggaactcctccacacggtggcattgcatttggtttagatagactagtaatgttattagctggagtaagcaatattagagacgtgattgcatttccaaagacaacatcagcatctgctttaatggaagaagctccaaaccttgtttctgaagaacaattagatgaacttggaataaagattttagatgatgaaaaaaacgtttgaa

SEQ ID NO: 297893 - DNA, 907 bp, Unknown
  Bacterial polypeptide expressing nucleotide sequence isolated from the Sargasso Sea
gaaatagaaactccaatgctgacaaagagtacccctgaaggggcacgcgactatctggttccaagtcggttaaatccacaaaaattttatgcgctgcctcagtctccacaattatttaaacagattttaatggtttcgggaatggacaaatatttccaaatcgttaaatgttttcgcgatgaagacttaaggcaagaccgtcaaccggagtttacccaaatcgatatcgaaatgtcttttggaaatgaaaaaatactttttcaaatgatcgaagagatgatggcaacaatttttaaagaagtgttgaatgaaaaaatttcaactccatttcctatcttgaagtatcaagaggcaatagaccggtttggaacggataagccggacatgcgaattgatatggaaattgtagatctggcaaaaattgttcaaggaactaaattcaaggtttttgcacaggttttggaatctggtgggcagattcgtgccttgaacattaaaaatagtgccgatgctttatcccgaaaagcgctcgatgatttaacagaaattgccaaaacatatggcgcaaaagggatggcctggatcaaagttcaaaaaaatgaattgcaatctcccattatcaagttttttgatcaggaaatgctcgaccgtatgttggagaaactagaaagtaaaccaggtgacactgtcgtattcatcgccgatacgccaaaaattgtggctgatgcattggcccatttgcgtctagctattgccaaactattaaaccttgttgatgaatcgaagaacgctttcatctggattaccgagttcccactggtagaatatgacgaaatagaaaaaagacataatgcgatgcaccatccatttacagctcctcgcgaagaggatttaggcaaattgaatc

SEQ ID NO: 297894 - DNA, 691 bp, Unknown
  Bacterial polypeptide expressing nucleotide sequence isolated from the Sargasso Sea
gatggaaaagggtcaggaccaattgcaaaaaatatttggagatgaaaaaactgaattaattaaaaataaattctcactcgatgatggtgattccattttctttgtatgtggtattcctaataatttcttagattttatttccagggcaagggtaaaaattggaaatgagttagagctggtaaagaaagattctttcgaattttgttggattgttgattttccaatgtttgagtataatgaagaattaaaaaaaatagatttctcccataatccattttctatgccacaaggaggcttagagtccttaaaaaatatggatccattagaaattaaagcttttcaatatgatatcgtttgtaatggcgttgaattgtcatctggagcaataagaaatcatagacaagatattcttttaaaagcttttgagatcgctggatataacatcgatgaaattaagaaacggtttggagcgatgtacgatgcttttggttatggcgcacccccccatggtggcattgctcctggtattgacagaattgtaatgctcattgctggtgtagaaaatataagagaagttattgctttccctatgaatcaacaagctcaagatcttatgatgaatgcaccatccgaagtatcatcagatcagcttaaagaaattggcattaagattatcgagaagaaagaatag

SEQ ID NO: 297895 - DNA, 905 bp, Unknown
  Bacterial polypeptide expressing nucleotide sequence isolated from the Sargasso Sea
caattcaaacaactgattatggtatctggttttgacaaatattttcaaattgcaccatgttttagagatgaagatgcaagggctgataggagtccaggtgaattttatcaattggatcttgaaatgtcatttgttaatcaagaggatatttttgatgtagttgaaaaattattagtcaaaacatttaaagaattttccaataaaaaattactttttaataaatttccaaaaataacatatagggaagccatgttaaaatatggaactgataaaccagatcttagaaaccctctaattattgatgatgtaacagatatatttttaagagaagatgtatcatttgaaatttttaagaaacttgtaaaaactggttcaaaagtgaggtgtattgtaactaaaaaaactaaagacaggccaagaagtttttttgataatattgacaaatgggctaaagaacaaggcgcctctgggcttgcctattttactctagaaaaagaaaaagagatctcagcaaaagggccaattggaaaatttttttctaaagaatctttgaaagaattaatgaaattaactggagctgaaataggtgacagcatattcatggcctgtgctaaacaaaaagaacttgaaaagattacttctctagctagagctaaaatagctaaagatttagatttgattgacaataatgtttttgcattttgctgggttgttgattatccaatgtatgaaataaacgaacttaccaaaaaaatagaatttagtcataatcctttttctatgcctcaaggagaaatagataaaataaagtttgataaacctctagatattttagcatatcaatatgatattgtttgtaatggtatagagctatcatctggtgctataagaaatcacataccatc

SEQ ID NO: 297896 - DNA, 793 bp, Unknown
  Bacterial polypeptide expressing nucleotide sequence isolated from the Sargasso Sea
gaatttggaggggggaaaaaaatttcaaaacccccatttaaaagaataccgtttagtgaggccatgttgcaatttggcactgacaaacctgatttaagaaatccgatcagaataatagatgttactaattgttatcgtaaatccggttttggtttattttctaagttgattgagaaaggtgcagttgttcgggcaattccagcaaaaggagccgctagtaaaccaaggagctattttgacaaattaaatgattgggctaaagcggaggggtcaggaggattaggctacattatatttgactcagaccaatctgcaaagggtccaatcgctaaaaatcttgagccagatcgaatcaacgacttgaggactatttgtaatgttgatacaggtgatgctttgttttttgtttgtgatgatgagggcaaagcttcgaatttttcgggacgggtaagggagatggtttgtgatgacctaaatgctcgtgcacaaaattgtttcgaattttgttggattgtcgattatccaatgtatgagcgtgatgaagtgactggagggataaaattctctcataatccattctctatgccccaaggtggattagaaacattagaaaataaacctcctcttgatattttggcttatcaatatgatatcgtgtgtaatggtattgagttatcctcaggtgctatccgaaaccacagacctgagataatgattaaggcatttgagatagctggttatcccgctcatgaagtggaagagaaatttgcgggtatgcttaaagcatttcgct

SEQ ID NO: 297897 - DNA, 632 bp, Unknown
  Bacterial polypeptide expressing nucleotide sequence isolated from the Sargasso Sea
aaattatgaaaaaaccaaatgcaaatgtcgtgacacagtctttctttcatgtggaaaaaaaattgaggtagagaaaatattaagtgctgctagaaataaaattgctgaggatttaaatttaatcgatgatgcaaccttctcattttgttggattattgattatccaatgtatgaaactgacgaaattacaaataaaataaaatttagtcacaatcctttttctatgcctcaaggtgatttgaaagatttagatttaactgatccattaaaacttaaagcttatcaatatgacatagtttgtaatggaattgaattatcctcaggcgctataagaaatcatattcctgagttaatgtataagttatttaaaattgctggctattcaaaagatgatgtaaataataattttagtggaatgataaatgctttaagttatggagccccacctcatggaggaatagctccaggtatagatagaattgttatgcttttagcaaatgaaaaaaatattagagaagttactatgtttcctatgaatcaaaatgctcaagatctaatgatgaatgcaccatctgaaatatctgatgatctattaaaagagcttaatttgaatatcaaaaagaaaagttaat

SEQ ID NO: 297898 - DNA, 784 bp, Unknown
  Bacterial polypeptide expressing nucleotide sequence isolated from the Sargasso Sea
atgaataaatatagaacacacaattgctctgagttgacagaaagggagaataataaaattgtaactttatctggatggatacacagaaaaagagatcatggtaatttactatttatagatttacgagatcattttggtttgacacaatgtgttatagaaaataaaaataaatttttcaaaatacttgaaaaaataagacctgagtctgttattagcattactggcaaagttttaaaaagagaaaaaggtactgaaaatttagaaatatcaacgggtaagattgaggtaagtattcagaatattaaaattttggctgaagctaaagatttaccaatgcctgtttttggagaacaagactatcctgaagatataagattaaagtatagatttttagatttaagaagagagtcaatgcataaaaatattattttaagatcaaatgtaatatccttcattaggtcagagatgctaagacttggttttttagaatttcaaacaccaattttgacttcttctagtcccgaaggtgcaagagactttttagtacctagtcgactaaatcctggaaaattttatgctcttcctcaagccccacaacaatttaaacaactaattatggtttcaggatttgacaaatattttcaaatagctccatgttttagagatgaagatgctagggcagacagaagtccaggtgagttctatcagctggatattgaaatgtcttttgttgaacaagaagatgtatttaaagtagttgaaactttaatgataaatttattaa

SEQ ID NO: 297899 - DNA, 358 bp, Unknown
  Bacterial polypeptide expressing nucleotide sequence isolated from the Sargasso Sea
ttagcttatcaatatgatatagtgtgtaatggtatagagctttcatcaggggctattagaaaccatgtcccagaactaatgtataaattattctcaatagctggttatgataaaaatcaagttgatgaaaaatttagtggaatgataaatgcacttaattatggcgctccacctcatggaggaattgctccagggatagatagaattgttatgcttttagctaacgaaaaaaatataagagaagttactatgtttcctatgaatcaaaatgctcaagatttaatgatgaatgctccgtctaatgttagtgaaaatcaattaaaagaattaaatatttctttaaaactaaaaaaatagt

SEQ ID NO: 297900 - DNA, 742 bp, Unknown
  Bacterial polypeptide expressing nucleotide sequence isolated from the Sargasso Sea
atggcaaaagagcaaggttcatctggtctagcctattttacattagaaaaagacgataaaattaatgccaaaggaccaattggaaaatttttttcagagaatgcattattagaaatcatgaaactaacaaatgcgaatataggtgacacagtatttctttcttgtggaaagaaaaatgatgtagagaaaatattaagtgttgcaagaaataaaatagctgaagatttaaatttaattgataatgaaatattctcattttgttggattgttgactatccaatgtatgagattgatgagactactaaaaaaataaaatttagtcataatccattctcaatgcctcaaggtgaaataaataaattagacttatctaatcctttaaatattaaagcctatcaatatgatattgtttgtaatggtattgaactatcatctggtgctattagaaaccatattcccgaattaatgtataaattatttgaaattgcagggtattcaaaaaatgatgtagatagtaaatttagtggaatgataaacgccttgagttatggtgcaccaccccatggaggaatagctccaggaattgataggattattatgcttttggcaaatgaaaaaaacataagagaagttaccatgttcccaatgaaccaaaatgcgcaagatttaatgatgaatgcaccatctgaaattctagatgatcaactaaaagagttaaatttatatattaaaaaaaaataat

SEQ ID NO: 297901 - DNA, 946 bp, Unknown
  Bacterial polypeptide expressing nucleotide sequence isolated from the Sargasso Sea
ttcttgttccagccgacttcatcctggtaagttctatgcacttccacaagcgccacaacagtttaagcaacttataatgtgttcaggttttgatcggtattttcaaattgcaccctgctttagagatgaagatgcgcgtgcagataggtcacctggtgagttttatcaacttgacctagaaatggcttttgcagagcaagaagatgtatttaatgtcgttgaaccagtaatgcgtggggtatttgaggaattctctggtcaatctatctcaggtccatttcctagaataacttatgctgatgcgatgttacgttatggtacggataagccagatttaagaaaccctattgaaattactgatcttacagacctttttatcgatgagtctgttaattttaaggcgttcaaaaatataataaataaagggggagtagtacgtgctattccagcaaaagatgtatcaggtagaccaaggtcgttttatgataaattgattggctttgcacaagatttaggagcaccaggcttaggttatataatttttgaggatggacaggcgaagggtcccatagcaaagttcatacctgaaagtattttacacagtatatgcaataaagcagatgttggtaatggggatgcaatttttttatcctgtgattcagaagaaaaagctgcatattattcgggtcatattcgttcagaactaggacatttacttggtctaattgaaaaaaacacttatagattctgttggatcattgattttcctatgtttgaggcagacccagaaagcggtgatatagaatttagccataatccattttctatgcctcaaggaggtctggaagctcttactaatcaagaccccgttgatattcttgcttggcagtatgatattgtttgcaacggtgttgaattatcaagtggggccatacgtaatcatcgt

SEQ ID NO: 297902 - DNA, 695 bp, Unknown
  Bacterial polypeptide expressing nucleotide sequence isolated from the Sargasso Sea
tgaagagggaatttcagcaaaaggaccaattggaaaatttttttctaaagaggctttagaggagataatgaaaaaaactaaagcaaaaataggtgatagcatttttttagcatgtgaaaaaaaaactgaagtagaaaagatcacctccttagcaagagataaacttgctgaaaatttagaattgattgacgaaaatacttttgctttctgctggatagttgattatccaatgtatgaaaaagatgaagtaagtaataagatcaaattcagtcataatccattttcgatgccgcagggagatctaaatcaaataaattttgaaaagccattagatattcttgcatatcaatatgatattgtctgtaatggtatagaactttcatctggagccataagaaatcatataccagaattgatgtataaactcttttcgattgcaggatataataaaaaggaagtgaatgagaaatttagtggtatgataaatgccttaagttacggtgcaccacctcatggaggaatagcccctggaattgatagaattgttatgcttttagccaatgaaaaaaacataagggaagtaacaatgtttccaatgaatcaaaatgctcaagatttgatgatgaatgccccatcagatataagcgataaccagttgaaagatctaaacttatctttaaagttaaaaaaatgat

SEQ ID NO: 297903 - DNA, 697 bp, Unknown
  Bacterial polypeptide expressing nucleotide sequence isolated from the Sargasso Sea
gtcggaagacattgttttatctggatggataaacaaaaaaagagatcatggaaacttattatttgttgatttaagagataattacggtgtaacccaatgtgttattgataaaagcaatcaatatttttctaagttggaaaaaattcagctagaaagtgtcataaaattatcaggaaaagttgttgaaagaagcaaagataccattaacccagaacttcaaactggggaaattgagattgttataaattcttttgagatccttggtcaatgcaaagaacttccaatgcctgtatttacagatcaagagtactctgaagaaattagacttaagtatagatttttagacttaagaagaaaaaaaatacatgaaaatattattttaagatcaaatgtaatttcttttatcagaaaacaaatgaatgaattaggttttttagagtttcaaactccaattttaacttcatcaagtcctgagggtgcaagagattttttggttccaagtagattgaatcctggaaagttttatgcgcttccacaagctcctcagcaatttaaacaattgataatggtctcaggttttgacaagtattttcaaatagctccttgttttagagatgaagatgcaagagctgacagaagtccaggagaattctaccaacttgatttagaaatgtcatttgtagaacaagaagatgtt

SEQ ID NO: 297904 - DNA, 853 bp, Unknown
  Bacterial polypeptide expressing nucleotide sequence isolated from the Sargasso Sea
aaagtggaggtagttgtttcagattactttatgttgaatgaagcggcaccattaccttttgtaattaatgatagagatagtgcagaggaaaatctaagacttaagtaccgctatttagaacttaggatggacgcccttcaacataatatcattacccgtcataaaacttatcaagctacaagatcatttctttccgataataattttatagaagtagagacaccagtattgatgaaatcgacacctgaaggagcaagagactaccttgtgcccagtaggattcatcaagggcaattttatgcactgccacagtctccgcagatatataaacagatattaatgatctctggctatgatcgctattttcaaattgtaaaatgttttagagatgaagatcttagagcagaccgtcaacctgaattcacccaaatcgatattgagatgtcctttgtggatgaagaggatattttttcaaatatggagaatttgactcgccatatctttaaaaaggttaaagatatagaacttccggatccctttcctaggttaacatatcaaaaagcaatggagctatatggctcagataaacctgacctaagatatcagatggagcttatagatctaaaagatttcactgatacatctgacttcaatgcatttagatcagttcaaagagtaaaaggaatagtttgtaaaggaggggcgcattattctaggaagatcattgatgaactaacagagtttgttaaaaaatataaagccaagggattggcatggatgaaatttcaaaataataattttgaaggtggaatcagtaaattattttcagaagaactccaaggttcaattcaaa

SEQ ID NO: 297905 - DNA, 959 bp, Unknown
  Bacterial polypeptide expressing nucleotide sequence isolated from the Sargasso Sea
gataaacccagacatgtccaccggcgagatagaggttttgggtaaagaacttgaaatattaaattcttcgaagacacctccattccaaatggacgaatttacctctgttggtgaagaagtgcgcttaaagtatagatatatggatcttcgtcgaagggagatgcaaaataggctccgtcttcgctcaaaaatcacatctatagtgagaacttttcttgagggtgaagaatttttagatatcgaaactccacttttgactagagctactccagaaggtgctcgtgactatttggttcctagtcggacatatcctggaagttttttcgcactcccccaatccccgcagttattcaagcagcttctcatgatttctggtttcgacaaatactatcagattgctaagtgttttagagatgaagatcttagagcagataggcaaccagagttcactcagatcgatatagagaccgcatttttagatcaattggctattatggatattgcagaaaagctagttaagaatttgttcaaagaacttttgaatattgaccttatagattttccaaagataacttggcatgaggcgcttgataaatacggttcggataaaccggatctgcgcattccattaaagcttacctccttggatgatttaatgaagagtgtagaatttaaagtttttcgagagccagcagatgatccagatagcagagttgcaggtttgagagtcccaggaggcgcaaaatttagccgtaaagaaatagatgaattcacagactatgttggttcttatggtgctaagggattagcttggatcaaggtcaacgatctgtcagaaggaattcaaggattgcaatcgcctatagtgaaatttatacccgatggggttctgtcagagatgcttaagcggcttggcgctgaaaatggagatattattttcttcggtgccggtatttcta

SEQ ID NO: 297906 - DNA, 593 bp, Unknown
  Bacterial polypeptide expressing nucleotide sequence isolated from the Sargasso Sea
ttttctatcctgtggaaaaaaagatgatgttgaaaaaatattaagctttgcaagaaacaaaatagcagaggatctagatttaattgataatgaaacattttcgttctgctggattgttgattatccaatgtatgagattgatgaaataactaaaaaaataaaatttagtcataatccattttctatgccccaaggtgaagtgaataaattagatttatctaatcctttaaatataaaagcttatcaatatgatattgtttgtaatgggattgagttatcatctggagctataagaaatcatgttcctgagttaatgtataaattatttgaaattgctgggtattcaaaaaatgatgttaacagtaaatttagtggaatgataaatgccttgagttacggagctccacctcatggaggaattgctccaggaattgatagaattgttatgcttttagcaaatgaaaaaaatattagagaagttacaatgtttccaatgaatcaaaatgcacaagatttgatgatgaatgctccatctgaaatttctaaggatcaattaaaagagctgaatttaacaattaaaaacaaaaaataat

SEQ ID NO: 297907 - DNA, 982 bp, Unknown
  Bacterial polypeptide expressing nucleotide sequence isolated from the Sargasso Sea
tgttttagagatgaagatgcaagggccgacagagccccggagaaattttatcaactagatttagaaatgtcttttgttgacaaagaagatgtttttaatgttgttgaaaaactattagttaatacttttaaaaagttttcaaataaaaaattaatgtatagtaaatttccaaaaatttcttatttagatgcaatgttaatgtatggtactgacaaaccagatttaagaaatccattaattataaatgatattacagaaatttttacacgtgacgatgtatcgtttgaaatttttaaaaaattagtgaaatctggttctaaagttagatgcatatcaactaagaatacaaaagataaacccagaagtttttttgatggtattgataagtgggcaaaagatgaaggatattcaggcttagcatattttacaattgagaaagatggtgatctttcagcaaaaggccctataggaaaatttttttctaaggaagctataatggaaataatgaaaaaaataaatgcagaagttggtgatagtatctttcttgcgtgtgggaaacaaaacgaattagagaaaattacctctcaagctagagataaaattgctaatgatttggaattaattgacgacaatatttttgctttttgttggattgtagattacccgatgtttgaaagggatgaaataacgaacaatattaaatttagtcataatcctttttctatgccacaaggtgatttgagtaataaagatttagaaaatcctttagatatattggcttatcaatatgatattgtgtgtaacggaatagaactttcatctggtgcaataagaaatcacaaacctgagcttatgtacaaattattttcaatagccggatataataaaagtcaagttgatgaaaaattcagtggaatgattaacgctttaagttatggtgcgccacctcacggaggaattgcacctggtatagatagaatag

SEQ ID NO: 297908 - DNA, 877 bp, Unknown
  Bacterial polypeptide expressing nucleotide sequence isolated from the Sargasso Sea
gaaacaataaataacgaaataccaactggtgaaatagaaataaaaataaattcatttaaaattttgggaaaaacaaaagagcttccattaccagtattttcagatcaagaatatgcagaagaaataagattaaaatatagatttttagacttaaggagaaaaaaaattcataacaatataattctcagatctaaagtaatttcttttattagaaaagaaatggaaaaattaggttttaatgagtttcaaacaccaatattaacttcatccagtccagaaggtgcaagagactttttagtaccaagtagattaaacccaggtaaattttatgctttaccccaagctccacaacaatttaagcaacttataatggtttcaggatttgatagatattttcaaattgctccatgttttagagatgaagatgcaagagcagacagaagtccaggtgagttttatcaattagatatagaaatgtcatttgtagaacaggaagatgtgtttgaagtcgttgaaaagttaatggtaagtttatttaacaatttttctaaaaaaaaaatgttgtataaaaagtttcctcgaattccatttaaagatgcaatggatagatacggaactgataaaccagatttaagaaatccattgctaatccaagatatatcagaaatatttaaaagagacgatgttaagtttgaaatttttaaaaaattatttaaatcaggatcattaataaaatctattgtaacaaaaaaaacaaataccaaaccaagaagtttttttgataatattgacaaatgggcaaaagagcaaggatggggtggattagcatatttttctattgaaaaagataaaagtggaaaaataattgaaaaggacc

SEQ ID NO: 297909 - DNA, 598 bp, Unknown
  Bacterial polypeptide expressing nucleotide sequence isolated from the Sargasso Sea
tatgaaacaaactaatgcaaatactggtgatacggtatttctttcttgtggaaaaaaacatgatgtggaaaaaatattaagtattgcgaggaataaaatagctgaggatttaaatttagttgacaataattgtttttcattttgttgggttgttgactatccaatgtatgaagttgatgaaataacaaaaaaaattaaattcagccacaaccccttttctatgccacaaggtgatttaaaaaaattggatttatctagtccattgaaactcaaggcatatcaatatgacattgtatgcaatggaatagaattatcatcaggtgctattagaaaccatattccagacttaatgtataaactatttgaagttgctggatattcaaaaaatgatgttaatagtaaatttagtggaatgataaatgcattaagctatggggctccaccacatggtggtatagcaccaggaattgatagaatagtaatgttactagccaacgaaaaaaatataagagaaattactatgttccctatgaatcaaaatgcacaagatttgatgatgaatgcaccatctgaagtgaatgatgatcaattaaaagaa

SEQ ID NO: 297910 - DNA, 859 bp, Unknown
  Bacterial polypeptide expressing nucleotide sequence isolated from the Sargasso Sea
ctttctttgcgtaccgcaatcgcttcaactgtacaaacagcttttgatgatgctggatttgaccgctatgtgcaagtggcaaaatgttttcgagatgaagatctacgggcagacagacagcctgagttcacacaactcgacgttgaaatgtccttcgtcgatgcacatgacgtgacgagtgttattgaaagtcttgtggctaagacagcaaaagacattcttgatttggatatcgccctcccactaccacagctcacctggtctgaatgtatggaacggtatgggcatgatgctccagacatgcgatttggccttgagatcgttgatctcactgaggtcgcaaaggatagtgacttccgcgtattcaagggtgcggtggagtccggcgggagagtcagaggaattcttgtttccggtgctgctgaaaaattctccagaaaagatctcgatgggctcacagcgatggcagttgaagcaggcgcaaagggtcttgtgtggctcaaactcgactcttctgaatcatggaccgggccggttgccaaaaacttaggttctgatgtagcggaaaacattcgtaaatcactgtcggcaaaacctggtgatctggcgcttatatcagcggatagttttgaaactacttgcaagactttacacgcactccgaaaacatcttggtaaagaacttgaattgtacgatgaaaataccatgcacgtgtcatgggttattgattttccgatgttcgcccgtgatgaagaaactggaaactgggctgcaatgcatcaccctttcacagcacctcatcctgaagacctagaaaaacttacgtcgaacccatcagagtgccgtgcaattgcttatg

SEQ ID NO: 297911 - DNA, 904 bp, Unknown
  Bacterial polypeptide expressing nucleotide sequence isolated from the Sargasso Sea
aatagaggtcgttatagagaagcatgaagttctagggacctgtaaagaattacctatgccaatctttagcgatcaagaatatgccgaagaaataagattgaaatatagatttttagatttaagaagaaaaaaaattcatgaaaatattattttaagatcgaaagttatttcatacattcgaaatgaaatgactaaattaggttttttagaatttcaaacaccaattttaacttcatctagtccagagggcgcaagagattttttagtaccaagtcgtttaaatccaggaaaattttatgcattacctcaagctcctcaacaatttaaacaattaataatggtttcagggtttgatagatattttcaaatcgctccttgttttagggatgaagatgcaagagcagacagaagtcctggagagttttatcaattagatttagaaatgtcatttgttgagcaggaagatgtatttaatgtggttgaaaaattaatggttaatacatttaaaaatttttctagtaaaaaactgatgtttgataattttccaaagatttcatacaaggaggctatgcttaaatatggaacagataaaccagatttaagaaacccgctaattgtaaatgatataactgaaatttttacaagagaagatgtttcatttgaaatatttaaaaaattagtaaaatctggatctaaagtaaggtgtatcattacaaaaaatacgaaagataaacctagaagtttctttgataatattgataaatgggctaaagaagaaggcgcttctggtttagcttattttacttttgaaaaagatacagatatttctgcgaaaggccctataggaaaattcttttctcaagatgcattggttgaaatcatgaaaaaacaaactgtgaaatag

SEQ ID NO: 297912 - DNA, 673 bp, Unknown
  Bacterial polypeptide expressing nucleotide sequence isolated from the Sargasso Sea
taaaaataatttaagtgaagagcatatagctgatattttaaaaatcacagaagcaaaagatggagacttaatcctcttaggagctggagataaacaaattgtcaatcagtcattagatagggttagacaatatatcgcaaaagacttaaatctcattgataaaagtaaatggaatttcttatgggtaactgacttcccgatgtttgagagaaatgaagaggaaaatagatatgaagctttacatcatcctttttgttctccaaaaaatataaaatctaaagattctgaaaacttgaaaaaagaaattgagagctctacagcaaatgcttatgacttagttctcaatggattggaattaggaggtggctctttacgaattcatgaagggaacttacaaagagaggttctgaaaacggtaggacttactgataaagagattgatgaaaaatttggatttttaatagaagccttagaaatgggtgctcctcctcatggtggaatagcgtttggattggatcgtattaccatgctgatcattggtgcagattcaatcagagaaaccattgcttttccaaaaaatcaacaagcaaaatgtcttctcacaaatgcaccttcaaatgtctctaaatcacaattaaaagaattagatattgaaataacaattgatgaataa

SEQ ID NO: 297913 - DNA, 678 bp, Unknown
  Bacterial polypeptide expressing nucleotide sequence isolated from the Sargasso Sea
aatgagaactaatttttgcggtgaattaaataaaaaatttattggaaaagaggtaactatctgtggttggattcacagaagaagagaccatggaggagtaatattcctagatataagagatacaacgggcatcgtccaaattgttatccgaccagaaaccaaagaaacttttaaaattgcagaacaagtaagatctgaatttgtattaaaagccactggtaatgtagaagaaaggccagaagaatctgaaaatacaacacttacaacaggagagatagaaattgattgcagctcaatagaagttcttaatactgcagaaactccagcctttcctttagatcaatcatcagaagttggcgaagatgtaaggttaaaacatcgtacgcttgatcttagaagaccagttatgcaagaaaatctgagaataaaatctaaacttacaaaatctattagagattacttggaaaaacattcattcgttgatatagaaactcctatactaactaaggccactccagaaggagctcgtgattatttagttccaagcagaacaaatcctggtaatttttttgctttgccacaatctccacaattatttaaacagatgttaatgatttctggatttgataggtattatcaaatcgcaagatgttttagagatgaagatttaagggctga

SEQ ID NO: 297914 - DNA, 763 bp, Unknown
  Bacterial polypeptide expressing nucleotide sequence isolated from the Sargasso Sea
tatggatattagaacacatacatgcggtgagcttcgtttatctaactctggagaatctgtagttctaaatggatgggtaaattccgttcgacttcatggtcaggtagtttttgttgatctgagagataggtatggaaaaacccaagttgtttttaatgctgatgaccttagatcagattttgatcaaataaaaaaactatcaatggaagacgtcttatctgtatctgggaaggttcaagatagagaaaagtctctagtaaattctgaaatagcaactggagagattgaggtttacgctacctctgtagacgtcttgaattttgcagagccattgccatttaccatctcagatagagatagcgcggaagaagacttaagattgaaatatagatatttagaattaagaaccgatgagcttcaaaataatctacatattaggcatctagcctatcaatcagttagaaattacttgtctgaaaataatttcctcgaaattgaaacaccggttttaatgaagtcaacgccagaaggagcaagagattatttagtgccaagtagaattcacgaaggaaaattttatgctctgccgcagtctccccaggtatacaaacaaattttgatgatcgcaggctatgataaatacttccaaattgtaaaatgttttagagatgaagatttaagggcagatagacaacctgagtttactcaaattgacattgaaatgtcttttgttaatgaagaagttatttttgattctatggaa

SEQ ID NO: 297915 - DNA, 556 bp, Unknown
  Bacterial polypeptide expressing nucleotide sequence isolated from the Sargasso Sea
aaaaattttaaatcttgctagaactaaaatagctgaagaattaaaactaattgatgaagattgcttttctttttgttggattgttgattatccaatttttgaaagagatgaaataacaaaaaaaataaagtttagccacaatcctttttctatgccacaaggcgatattaaaaatcttgatttttctgatcctctatcgatgaaggcttatcagtatgatattgtatgtaatggagttgaactatcatcaggcgcaataagaaatcatattccagatttaatgtataaattatttgaaatcgcaggttactcaaagtctagcgttgatgaaaaatttagtggaatgataaacgctttaagttatggcgctccacctcatggaggtttggcaccaggaattgatagaatagttatgcttttagcaaacgaaaaaaatataagagaggtcactatgttcccaatgaaccaaaatgcacaagatttgatgatgaatgctccatcagaaattaatgaagagcaattaaaagagttaaatctatctgttaagaaaaaataa

SEQ ID NO: 297916 - DNA, 732 bp, Unknown
  Bacterial polypeptide expressing nucleotide sequence isolated from the Sargasso Sea
ggccaaaaatgaaggctcatctggtcttgcttatttttcaatttttaaagatgaaaaaataagtgcaaagggaccagttggaaaattttttactgaggaagctttaaaggaaataatgcaaattactgatgctgaggtgggagatagtatatttttctcttgtagtaataaaaaagatgttgaaaaattactttcaattgctagagataaaatagcaaaagatctaaatataataaatcaagataattttgctttttgctggatagttgattatccaatgtttgaattggatgaaaaaacaaagcaaattaagtttagtcacaatcccttttcaatgccacaaggaaatattgaagaactagattttaaagatccattaaatattaaggcttttcaatatgatatagtttgtaatggtatagagctttcatctggagcaattaggaatcatgttccaagtttaatgtataagcttttttctatcgcaggttacaataaatcggatgtagatgaaaaatttagtggtatgataaatgccttaagctttggtgctcctccacatggtggaatagcaccaggtattgatagaattataatgctattagctaacgagaaaaatattagagaagtaacaatgtttcctatgaaccaaaatgcacaagatttaatgatgaacgcaccatcagacatatcagagtcgcagctggacgaattgagattaaaaatacttaa

SEQ ID NO: 297917 - DNA, 571 bp, Unknown
  Bacterial polypeptide expressing nucleotide sequence isolated from the Sargasso Sea
aaaatgaaagttgttaatgactatatgagcagattaatttccagaattggtaatgatttaggtttagttaaagaaggatttaaatcgtgctgggttacagattttgcaatgtttgaagaaaattctgaaggtgggctcacagcattacatcatccatttacaagtcctaaagaacaggatccaagtaaattgaaagattcagattcattagaaattaattcaaaggcatacgatatggttttgaatggtgttgaaattggtggtggttcaattcgtattcatgattcagaattacagcaagaaatattcaatattcttggcttatctaaagaagagcaaaatgaaaaatttggattctttttaagaacgctgcaatctggatgccctccacatggtggcatagcatttggactagataggctagcaatgctcatggtaggcgcagagtcaattagagatgtaatagcatttccaaaaacacaatctgcactttgtcttttatctgaggcaccgggctctgttccagatgatagtcttgaagagcttcatattaaaaaaattgaggagtagt

SEQ ID NO: 297918 - DNA, 730 bp, Unknown
  Bacterial polypeptide expressing nucleotide sequence isolated from the Sargasso Sea
tgctggtttaggttatattgtttttgataaaagctcttctggcgtagaaggaaagggccctattgcaaaatttatcccctctgaaattcaagaaatgatattaaacaaagcaggtcttaaggccggagactcaattttctttgcatgcgctaaaggcaaagaagtttatgatattgctgctgcagccagagataaaattgcaatagatctggatctaattgaaaagggagtatttaagttttgttggattgtcgattttcctatgtatgaaaaggataaagaaactggaaaaattgattttagtcataatcctttctcaatgccacaaggtggattagaagcgctaaataatacggatccaataaatgtcttaggttatcaatatgatattgtttgtaatggcgtagagctatcatcaggcgctatacgaaatcacgttccagaaattatgtataaggcctttgaaatagctggctataacaaagatcaagtacatgaaaaatttggaggaatgataaacgcttttacttatggtgtgcctcctcatggcggcattgcaccaggaatagacagaatcgtgatgctacttgctcaagaaaaaaatattcgtgaggtaatattattcccaatgaatcaacaggctcaggatctgatgatgctggcacctgctgaagtcgataagactacacttgatgagttgaatttagaagttaagccaactgaagaataa

SEQ ID NO: 297919 - DNA, 715 bp, Unknown
  Bacterial polypeptide expressing nucleotide sequence isolated from the Sargasso Sea
ggttataaaaattgaaggtgaagttatagaaagaacaaaagaaacaataaatcaaaacataccaactggagaaattgaagtttcaataaaaacttttgaaattttaggatctacaaaagaattacccatgccaattttttctgatcaagaatactcggaagaaattagacttaagtatagatttttagacttaagaagaaaaaaaattcatcaaaatattattttaagatcaaacataatatcatttataagatctgaaatgcaaaaattaggttttttagaatttcaaactcctatattaacttcatcaagtccagaaggagcaagagattttttagttccaagtagattaaatcccggaaaattttatgccttaccacaagctccacaacaatttaaacaattaataatggtatctggatttgataagtattttcaaattgccccatgttttagagatgaggatgcaagagcagatcgaagccccggtgaattttatcaattagatgtagaaatgtcatttgtagatcaagaagatgtatttgaagtatttgagaaactttttttaaaagtttttacaaaattttccaataaaaaaattttaaatgataaatttcctaaaataacttattcagatgcaatgttaaaatatggaactgataaaccagatttaagaaatcccataactatatttgatataacaaatgtttttcaa

SEQ ID NO: 297920 - DNA, 532 bp, Unknown
  Bacterial polypeptide expressing nucleotide sequence isolated from the Sargasso Sea
tgcaaaagaattaaacctaatagacgaaaaccaatatgctttttgttggattgttgactatccaatgtttgaaatagatgaacaaacaaaaaaagttaagttcagtcataatcctttttctatgccccaaggtgatatagaaaaattaaattttaatgaaccgttaaaaattaaagcgtatcaatatgatattgtatgcaatggcgtggaactttcttcaggagcaataagaaatcatattccagagttaatgtataaaatattttcaatagctggatacgaaaaaaaagaggtaaatgagaagttcagcggtatgataaatgcattaagctatggcgcacctcctcatggtggaatagcaccaggagtggatagaatagtaatgctactagctgaagaaaaaaatattagagaagtgactttatttcctatgaatcaaaatgcacaagatttaatgatgaaagctccatcagatgtagatgataaacaactaaaagagttaagcatcaaaaaagatataaagaaaagttaa

SEQ ID NO: 297921 - DNA, 967 bp, Unknown
  Bacterial polypeptide expressing nucleotide sequence isolated from the Sargasso Sea
agtatgtttaaatggtgggtaaatgctgttcgtttccatgtcaaaattgttttgtgggatttaagagatcgttatggaaagactcagattgtttataatcaagatgattttaatggcgatttcgaattagttaaaaaaatatctatggaggatgtcctttctgttaaaggtatcgttcaggaaagagatcaaaactcgcaaaattcaaatatttcgaccggtgaaattgaagttattatatctgaacatgagattttaaatgaagcacatcctctaccttttataattacagatcgaaatagtgctgaggaaaatcttcgactaaaatttcgttttcttgaattacgtacaaatgaattacaggaaaatataaaagtcagacataatacttatcaagctgtgcgaacctttttatcagataataatttttttgaagttgaaactcctgttcttatgaaatctactcctgaaggagctcgagattatttagtaccaagtagaatacacaatggaaaattttatgccttaccacagtctcctcaaatgtataagcaattattaatgatttctggatttgatagatatttccaaattgtaaaatgttttcgagatgaagatttaagagctgatcgtcaacctgaattcactcaaatagatatagaaatgtcttttgtagatgaaaatgatataatgaaaaaatgcgaagaattaacgagatatatttttaataaagttcaaaatattgacttaataaaaccttttccaaagatgacttataatgatgctatgtcaaagtatggtactgattgcccagatttacgttatgatttattattaaatgattttaagcctttttcagaaaaaagtgaattcaaagcttttcattcggttgaaagcgttatgtgtattgttgtacctggtggagctaaatattctcgtaaagacattgatcattatacagaacatg

SEQ ID NO: 297922 - DNA, 646 bp, Unknown
  Bacterial polypeptide expressing nucleotide sequence isolated from the Sargasso Sea
aatgaataaatatagaacacataattgctctgaattaagcgaaaaagaaataaataaaatagtgcacctttctggttggttacacagaaaacgagatcatggaaatttattatttattgatttaagagatcattatggtatcacccaatgtgtaattgaaaataataataaattttttcctttaatagaaaaatcaaaacctgagtctgtcttaaaaattattggcaaagtagttaaaagagccattgggactgaaaatttagatttaaagacaggtaaaattgagattcaaattcaatctatggaagttttgtcagatgcaaaagaattaccaatgcctgttttcggcgagcaagattatccagaagatataagacttaaatatagatttcttgacttaaggagagaagagatgcacaaaaatattattcttagatctaaggttatttcatttataagagctgaaatgcttaaattaggttttttagagtatcaaactccaatattaacatcttcaagtcctgaaggggcaagagattttttagttcctagtagattgaatccaggaaagttttatgcactacctcaagcaccacaacaatttaaacagttaataatggtctctggttttgataaatattttcaa

SEQ ID NO: 297923 - DNA, 876 bp, Unknown
  Bacterial polypeptide expressing nucleotide sequence isolated from the Sargasso Sea
agatcgcatttatgctctgaattatcaattaataatttaggaaataaggttactttatctggatgggcagatacaattagagatcatggtaacttactatttatagatttaagagataattatggaattacacagtgtgttattgacggaactcactctttatttgaagaaataagtaaattaagcaatgaaagcgttctcacaattactggagaagttgttaaaagatctgatgatacaattaacaacaatcttcaaacaggtgaaattgaaataaagattcaagattacaaaattttatctaaatctgaaatacttcctttacctgttaactctgatatcgaatatggagaagaaataagattaaaatatagatttttagatttaagaagaaataaactacacaaaaatattattttgagaagtaaaataatatcagacattagaaagaaaatgattgatagaaactttgttgaatttcaaactcctatccttacttcatcatctccagaaggagcaagagattatttagtcccatctagaatacatcaaggtaaattttatgctcttcctcaagcacctcaacaatttaaacaattattaatgattgccggttttgataaatattttcaaattgcgccatgttttagagatgaagacagtagagcagatcgttctccgggtgaattctatcaattagactttgagatgagttttgtaactcaagaagatgtgtttgaggctattgagccagttttatttgagatatttgatgaaaataagacaaataatgaaattaaggtaagtccttatccatttaggagaataccctacaaggattcaatggaagtttatggttctgataaacctgattta

SEQ ID NO: 297924 - DNA, 926 bp, Unknown
  Bacterial polypeptide expressing nucleotide sequence isolated from the Sargasso Sea
taagtatagatatctagatttaagaagggggaaattactagaaaatttaaaaacaagacataagattattaaagttgctagagaatatcttgataattttggatttacagaagtagagactccattacttaccaaatcaactccagaaggcgctcgcgattttcttgttcctgcacgtctttcggatggcgaattttttgctctacctcaatccccacaactatttaaacaacttttaatggttggaggcttgcacaagtattatcaaatcgcaaaatgtttccgcgatgaagacttaagggcagatagacagcctgagtttactcaattagatattgagatgagctttattagtgaagaagaaataatttcttttaatgaaaatctcataaaaaaaatatggaaagaagtgttaaatattaattttgataatgcttttccaagaatgtcatggcaagcagcaatggataattacggcactgatagaccagatactagatatcaaatgttattaaaagatttaggagaagtattaggtgatattggctttaatattttcaccaaggcaattcagtctggaggttatataaaatccataacagtcaaaggaggtaattcaagtattagcaacgtaagaattaaaccaggaggtgatatcttccaagtagctcaagatgcaggagctggtggcttggcctttataagggttaaaggagatgagcttgagactattggggcaattaaaaataatttaagtgaagagcatatagctgatattttaagaatcaccgaagcacaggatggagacttaatcctcttgggagctggagataaacaaattgtcaatcagtcattagatagagtgagacaatacatagcaaaagacttaaatctcatagataaaaataaatggaatttcttatggg

SEQ ID NO: 297925 - DNA, 761 bp, Unknown
  Bacterial polypeptide expressing nucleotide sequence isolated from the Sargasso Sea
tgatggcatagataaatgggcaaaagagcaaggctcatctggtctagcttattttacattagaaaaagcttataaaattaatgccaaagggccaattggaaaatttttttcagaaaatgcattattagaaattatgaaactaacaaatgcgaatataggcgatacagtatttctgtcttgtggaaaaaaaaatgatgtagaaaaattattaagtgttgcaagaaataaaatagctgaagatttaaatttaattgataatgaaacattctcattttgttggattattgactatccaatgtatgagattgatgaaactactaaaaaaataaaatttagtcataatcctttctcaatgcctcaaggtgacacaaataaattagacttatctaatcctttaaatattaaagcctttcaatatgatattgtttgtaatggaattgagttatcatctggtgctattagaaaccatgttcctgaattaatgtataaactatttgaaattgcagggtattcaaaaaatgatgttaatagtaaatttactggaatgataaatgctttgagttatggggctccgcctcatggaggcatagccccaggaattgataggatcgttatgcttttagcaaatgaaaaaaatatcagagagattactatgtttccaatgaatcaaaatgctcaagatctaatgatgaatgcaccatctgaaatttctgagaatcaattaaaggagctgaatttatccttaaaaaagaaaagttaat

SEQ ID NO: 297926 - DNA, 367 bp, Unknown
  Bacterial polypeptide expressing nucleotide sequence isolated from the Sargasso Sea
tctcgaattaaaagcttatcaatatgatattgtttgcaatggtgtagagttatcttcaggagcaataagaaatcatatacctgagttaatgtataaattattttcaatcgcaggttatgataaaaactcagttgataaaaaattcagtggaatgattaatgctctcagctatggagcaccacctcatggtggaatagccccaggaatagataggattgtaatgttgttagcaaatgaaaaaaatattagagaggttaccatgtttcctatgaatcagaatgcacaagatttgatgatggatgctccttcagatgcgaatgaaaaacaattaaaagaacttaatcttaaaatcttagaaaagaaataa

SEQ ID NO: 297927 - DNA, 826 bp, Unknown
  Bacterial polypeptide expressing nucleotide sequence isolated from the Sargasso Sea
ttttctgatttagaaaaaatgcaattagagactgttattaaagttgagggaaaagtagttaatagatctaaagaaacaataaattctgaaatagacacaggtgaaatagagattgttattgagaagcatgaagttttagggacttgtaaagaactacctatgccaatctttagtgatcaggaatatgcagaagaaataagattgaaatatagatttttagatttaagaagaaaaaaaattcatgaaaatattattttaagatctaaagttatttcttacatcagaaatgaaatgaataaattaggttttttagaatttcaaacaccaattttaacttcatctagtccagagggcgctagagattttttagtaccaagtcgtttaaaccctggaaaattttatgcattacctcaagcccctcaacaatttaaacaattaataatggtctcaggttttgacagatattttcaaattgcaccttgttttagagatgaagatgcaagagcagacagaagtccaggagaattttatcaattagatttagaaatgtcatttgttgagcaggaagatgtatttaatgtagttgagaaattaatggttaatacatttaaatatttttcaaaaaaaaaattgatgtttgataaatttccaaagatttcatacaaggaggcaatgcttaaatatggtactgataaaccagatttaagaaacccgctaattgtaaatgatataactgaaatttttataagagaagatgtttcatttgaaatatttaaaaaattagtaaaatctggatctaaagtaagatgtattattacaaaaaata

SEQ ID NO: 297928 - DNA, 983 bp, Unknown
  Bacterial polypeptide expressing nucleotide sequence isolated from the Sargasso Sea
agagattaaaataaattcctatgagattttaggaacatgcaaagaactcccacttcctgtttttactgatcaagaatatgcagaggaaattagactaaaatatagatttttagatctgagaagaaagaaaattcattcaaatattttactaagatctaaagttatctcattcataagagaagagatgaataaatttggttttattgaatttcaaacaccaattcttacatcatccagccctgaaggtgcaagagattttatagttccaagcagactaaaccctggaaaattctacgcattacctcaagcaccacagcaattcaaacagttgattatggtctctggttttgacaaatattttcaaattgctccgtgttttagagatgaagatgcaagagctgatagaagtcctggggaattctatcaattagatttagagatgtcatttgttgaacaagaggatgtgtttaaagtagtagaaaatcttcttaataaagtatttaaaaaattttcaaataaaaaatttttacatgaaaaatttccaagaattccttatgaagatgcaatgcttaaatatgcaacagataaaccggatcttagaaatccactagaaatctatgatttaacaaaaatatttcaaagagaagatgtaaaatttgaaatttttaaaaaacttgtaaaatctggatcaattgtaagatcaataataacaaaaaatactaaagataaaccaagaagtttttttgataatttagacaaatgggcgaagtctcaaggagcctctggacttgcatacttcacattagaaaaagaaaaaaatatcacagctaaaggtccagtaggtaaatttttttcatctgaagcattaattgaaattatgaaaataactggagcaaaagttggcgatagtatatttttttcatgtgataaagagcataacgtactacagctaatgtcccctaccagagataaaattgcaaatg

SEQ ID NO: 297929 - DNA, 1003 bp, Unknown
  Bacterial polypeptide expressing nucleotide sequence isolated from the Sargasso Sea
actcaatgtgttatagataagagcaatgaaatttttaaaaaaattgaaaaattatctttggaaactgttgtaaaaatcactggtatcgtaatggagagatcagatgaaacaataaacaaaaatatttcaactggagaaatagaaattaaaataaaaagtatagatgttttaggtgaaacaaaagatctaccaatgccagttttttctgatcaagaatatgcagaagaaataagactaaaatatagatttttggatttacgaagaaaaaagctgcatcaaaatattgttttaagatcgaaagtaatttctttcattaggaacgagatgcaaaaccttggctttttagaatttcaaactccaatattaacctcatcaagccctgaaggtgcgagagatttccttgttccaagtagactcaatgctggaaaattttatgctttgccacaagcacctcaacaatttaagcaacttataatggtgtctggttttgacaaatattttcaaatagcgccatgtttcagagatgaggatgcaagagctgatagaagtcctggagaattttatcaactagatgtcgaaatgtcatttgttgaacaagaagacgtttttgaagtgatcgaaactttatttttaaaactatttaaaaaatttagtgaaaaaaaaatccttcatgaaaagtttccgagaatttcatatgaggatgcaatgttaaaatatggatcagataaaccagatttaagaaatcctttagagattactgatttaacaaatatttttgaaagagatgatgtaaaatttgatatttttaataaattagtgaaaaaaggttccgttgttagatgtttagtagcttataatacaaaagataaacctagaagttttttcgatggaattgataagtgggcaaaagatcagggttcgtcaggactagcatattttacattagaaaaaggggataaacttagagcaaaagggcccatcggaaaatttttttcagagaatt

SEQ ID NO: 297930 - DNA, 916 bp, Unknown
  Bacterial polypeptide expressing nucleotide sequence isolated from the Sargasso Sea
tttaagatcaaaagtaatttcatttataagagaaaaaatgattagtaatggattttttgaatttcaaactccaatattaacagcatcaagcccagagggtgctagagactttttagtaccaagtagaatgcatccaggaaaattttatgcattaccacaggcccctcaacaatttaaacaaatggttatgatttcggggtttgataaatattttcaaatagctccttgttttagagatgaagatggacgagctgatagaagtccaggtgaacattatcaatttgatattgaaatgtcatttgttgaacaagaagatatttttaaggttttagaacctttattttttgaggtatttaataaatttagtaaaggaaaaaaaatttctaatattccttttaaaaaaattaaatacaaagaatccatgttaaagtatggaacagataaacctgatttaagaaatccaatagaaatagcagatgttacaaaaataatttcaagaaaagatgttaaactagatatatttaaaaaattaatcgataagggtgcagtagtaagagcaataccagctccaaatacttcatcaaaaccaagaagtttttttgatgagtataataattggtctaaggacgaaggtggaaagggattaggttacataattttagaaaaaaaaggtaaaaaaatatttggaaaaggacccatagcaaaattcttttccgaagaagctatggacgaattgatcaaaacttctaaattaaaagaaaatgactctgtatttttttcttgtgataaggaaaaaaatgcagaaaaaatttctgggatggctagacaaaaactaggtaaagatcttaatcttatagataacaaaacttttcatttttgctggattgttgattttccaatgtataaatatgatgaa

SEQ ID NO: 297931 - DNA, 746 bp, Unknown
  Bacterial polypeptide expressing nucleotide sequence isolated from the Sargasso Sea
tgttaagtttgaaattttcaaaaaattatttaaatctggatcattaattaaatctattgtgacaaaaaaaacaaatacgaaaccaagaagtttttttgataatatcgataaatgggcaaaagagcaaggatggaacggattggcatatttttctattgaaaaagatcaaagtggaaaaataattggaaaaggaccagttggaaaatttttttcagaagactcattaaaggagataatgaaaataaccacagctgaagaaggagatagtatttttatgtcatgtagtaaagagaacgaaattcatgaaattatgtcaaaatctagaaataaaataggagaggacttaggtatagtagatcaaaattcatttgctttttgttggataactgactttcccatttttgaattagataaagagacatcaaagataaactttagtcacaaccctttctcaatgccccaaggagacccaaataatttggatttatcaaagccattagatctaaaagcttatcaatatgatatagtttgcaatggagtagagctatcttctggagcaataagaaatcatattccagaattaatgtataaacttttttctatagcgggttatgaaaaaaatatagttgataaaaaatttagtggaatgataaatgctttaagttatggagctccacctcatggaggaattgcgcctggtatagatagaattgtaatgttattggcaaatgaaaaaaatataagag

SEQ ID NO: 297932 - DNA, 714 bp, Unknown
  Bacterial polypeptide expressing nucleotide sequence isolated from the Sargasso Sea
acataacatttgagaaaactaataataaaattactggaaaaggacctatagctaaatttttttccgaaagagctgttctagagctgttaaaagattgcaaaattactgaaaaagattctgttttttttgtatgcaacaaagaaaaggaggcaacaaaattttccggtatagcaagacagaaaatagcggaagaactaaaattaattaacgaaaaaagtttccatttttgttgggtgactgattatccgatgtatgaatacgatgaaaaagaaaaaaaaatagattttagtcacaatcctttttcaatgcctcaagttgaaatgaaagagtttgataagactgatccgctaaaaattttggcttatcaatacgatttagtttgcaatggatacgagctatcttctggcgctattagaaaccatatacccgagtatttatttaaggtttttgataaagtgggttactcaaaaagcatggttgaaaaaaatttttcaggcatgatcaaagcactttcatacggtgcacctcctcacggaggtatggctccaggaatagacagaattgtgatgcttttagctgaccaaaaaaatataagagaggttaccttgtttcctctcaatcagaacgcagaagatcttttaatggaagctccttcagaggcaacagaaaagcagctaaaagaattgagcatcaaaactgtaaaaaagaattagt

SEQ ID NO: 297933 - DNA, 881 bp, Unknown
  Bacterial polypeptide expressing nucleotide sequence isolated from the Sargasso Sea
aagttcttaaaagaagtaaagaaaacgaaaatccttgaattaaaaacaggaagaattgaagttaaaattaactcaattgaagttttgtcaagcgcaaaagatttacccataccagtttttggtgaacaagattacccagaggacattaggttaaaatatagatttctagatcttcgaagagaggaaatgcataataatatgattttaagatcagaagttatttcttttataagaactgaaatggtaaaattaggttttttagaatatcaaacacctattttaacttcatcgagccctgaaggagctagagattttttagttccaagtagattaaaccaaggaaaattttacgctttgccccaagctcctcagcaattcaaacagttaattatggtatctggttttgataaatattttcaaatagctccttgttttagagatgaagatgctagagcagacagaagtccaggtgaattttatcaattagatttagaaatgtcttttgtagaacaagaagacgtttttaatgttgttgagaaattaatgtttaacttatttaaaaagttttcaacaagaaaaattcttaatgaagtatttccaagaattacttataaggactctatggataaatatggtacggataaacccgatctaagaaatccattaattataaatgacctgacaagagtgtttacaagagaggacgttaaattcgacatttttaaaaaattagtaaaatcaggatcaatagtaaaaggaattgtaacaaaaaacacaaaagataagccaaggagtttttttgataatattgataaatgggcgaaagaccagggagcttctggattagcatattttacgtttgagcaagataagtcaattaa

SEQ ID NO: 297934 - DNA, 893 bp, Unknown
  Bacterial polypeptide expressing nucleotide sequence isolated from the Sargasso Sea
tgaaaaaagttcaaaaaaagttattgaatcagtaaaagatattggtagagaatttgtaattcaagttgaaggagaggtaattaaaagagaagcaattaataagaatatatcaactggtgagattgaaattttagtttcagaaatatctgttttaaactcatctaaacttcctcctttcacaattgaaaatgatactgacggtggagaagagttgagaatgaaatataggtatctagatttaagaagatctattctcaaggacaatattatttttagaaatgaactaacatttcaagttcgtaaatatttaaaagagcaaggattcattgatattgaaactccatatttaattaaatctacacctgagggagccagggattttgtagtgccttcaagaataaatgcgggtgagttttatgccctcccacaatcacctcaaacatttaaacaactactaatggtctcaggatttgacaaatatgttcaaattgtaaaatgtttcagagatgaagatttaagggctgatagacaacctgaatttactcaaattgattgtgaaatgtcgtttgttaatcaagaagatgttctaaatacttttgaaggtttagtacaaaatttattcaaagtttgtattggagcttctttagaaaaattcgatcgtatatcttacagcgatgcgatggaactttacggatcagacaaacctgatacacgatttggaatgcagtttgtaaccctctcagaaaaggctaaaggaagtggtttcaaaatttttgattctagtgaatctatttatggttttaatattgaaaatggagaatctttttcaagaaaagaaattgattattacactgattgggtgaagaggcctcaaattggtgcgctcggttgat

SEQ ID NO: 297935 - DNA, 523 bp, Unknown
  Bacterial polypeptide expressing nucleotide sequence isolated from the Sargasso Sea
aaacttaattaataaaaaccaatttgctttttgttgggttgttgattatccaatgtttgaattagatgaaaaatcaaaaaaaattgtttttagccataatcctttttcgatgccacaaggagatataaaaaagcttgatttaaaaaatcctttaaaattaaaagcttatcaatacgatattgtttgtaatggtgtggaattatcttcaggagcgataagaaatcatatccctgaattaatgtataaattgtttgctgtagcaggctacaataaaaaggatgttgatgaaaaatttagtggtatgataaatgctttaagttatggggcgccacctcatggtggaatagcaccaggaattgatcgaatagttatgttacttgcaaatacaaataatatacgtgaagtaactctttttcctatgaaccaaaatgctcaagatttgatgatgcaagcgccgtcagaggtagaaagtaaacaattaaaagaacttggaattaaacttgatttgaaaaataaaaattaa

SEQ ID NO: 297936 - DNA, 795 bp, Unknown
  Bacterial polypeptide expressing nucleotide sequence isolated from the Sargasso Sea
attgaacaaatttagaactcataaatgcaatgaattaagaagggaaaacgttggagaagaaataactctttctggctggataaataaaaaaagagatcatgggaatcttttgtttatagatttgagagataattatggaataacacaatgtactattgataaagaaaattctgattttaaaaaattagaaaaaatacaattagaaacggtaattaaaatttatggaaaagtagttgaaagatcacaggaggcaattaataaggacattgaaactggaaagattgaagttgtaattaaaaactttcaaattcttggtgaatgcaaggaactacctttaccagtttttagtgatcgtgagtattcagaagaaataagactgaagtatcgctttttagatttaagacgaaaaaaaatccatgaaaatataatattaagatcaaaagtcatttcatttatcaggaatgagatgaacaaactaggatttttagaatttcaaacaccaattttaacgtcttcaagtcctgaaggagcaagagattttttggttccaagtagattaaatcctggaaaattttatgcacttccacaagcacctcaacaatttaaacaactggtgatggtttctggttttgataaatatttccaaattgcaccttgttttcgagatgaagatgctagagctgatagaagtcctggagagttctatcagttagatttagaaatgtcatttgtggaacaagaggacgtatttaatgtggtagaaaaattgtttgttaatacatttaagaagttttc

SEQ ID NO: 297937 - DNA, 899 bp, Unknown
  Bacterial polypeptide expressing nucleotide sequence isolated from the Sargasso Sea
tgatattacaaaatgtttcattactagtgagttccaagtcttccagaaggtcattgaagacggaggtgttgtccaaggaatcgtagttcctggtcaaggaaacatgtctaggaaaaagctggacaagctggttgaaaaggctcgacaattaggtgctcaaggattggtttggattggcttaccagaagagcttgcatctgaagactatgatttagaaaatattagatcttcgatatccaaatatataactcaagaagaattgaaaaaggttgtattagctaccaaatcttcagcgaatgacctgttgttaatagtttcgggtgaaaaaaaactgactcaaactgtattaggacaacttcgaaactcgcttgccctgagtctagaattagtggatcaaaatcagttggaatttgcctttataattgattttcctttatttgaacctggtgataacgaaggacagtggacagctgctcaccatgcttttactatgccaaaagaaggccaagcagctaaattggaaacagatccaggttccgttatagcagattcatacgatttagtatgcaatggcttagagattgccagtggcagtattagagtacatgatcgggaattacaagaaagaatactaaaagtgctagggtataacttggaacaaataaatgagcggtttggccaattattggaatcattcgattatggagcaccgcctcatggaggcatagcaccgggaattgatagattagtcatggtgctagcaggactggatagtatcagagatactatcgccttccctaaaacgcagagcgcggttgatcccttatttggttcacctggaccagtagaagacatccatttggatgaactaaaaattagggttcttgatagtgaataga

SEQ ID NO: 297938 - DNA, 700 bp, Unknown
  Bacterial polypeptide expressing nucleotide sequence isolated from the Sargasso Sea
aaatcaggtaataaaattgttgctaaaggacctatagctaaatttttttctgaaagcgcagtttcagaattaataaaaatttgtaaaataacagtaaaagactctgttttctttgtatgtaattcacaaaaagaagcaaccaaattttcaggtatagcaaggcagaaaatagctaacgaaatgaaaataattgatgaaaaacaatttcatttttgttggattactgattatcctatgtatgaatatgacgaagaagagaaaaaaattgatttcagtcataaccccttttctatgcctcaagttaaaatgaaagatttcgataaaatggatcctttgaaaattttagcttaccagtacgatctagtatgcaacggttatgaattgtcctcaggggctataagaaatcatttaccagattatttgataaaagtgtttgaaaaggtaggatactctaaaaacctggttaaaaaaaatttttcagggatgattaaagcactctcatatggagcaccaccccatggaggaatggcacccggcattgatagaatcgttatgcttttggctaaccaaaagaatattagagaagttactttgtttcctttaaatcaaaatgcagaagatcttttaatggaggctccatctgaagcaacagaaaaacaattgaaagaattaggcatcaaaacggtcaaaaaaaattagt

SEQ ID NO: 297939 - DNA, 892 bp, Unknown
  Bacterial polypeptide expressing nucleotide sequence isolated from the Sargasso Sea
acctgtatttctgatcaagaatatgctgaagaaataagactaaaatatagatttttggatctgagaagaaaaaaaattcataacaatattattcttagatcaaaagttatatcctttataagaaaagagatggaaagattgggatttaatgagtttcaaacaccaattttgacatcatctagtcctgaaggagcaagagattttttagttccaagtagattaaatccaggcatgttctatgctttaccccaagcacctcaacagttcaaacaactaataatggtatctggttttgatagatactttcaaatagcaccatgttttagagatgaagatgctagagcagacagaagtcccggagaattttatcaactagatatagaaatgtcatttgtggaacaagaagatgtttttaaagttgtagaaaaattaatggttagtctttttacaagtttttctaaaaagaacatagtttttgaaaaatttcctagaattccttacaacgagtcaatgaataaatatggaacagacaaaccagacttaagaaatccacttataattaatgatatatctgaaattttcaaaagagatgatgttacattcgaaatttttaaaaaactttataaatctggggcatcaattaaatgtattgtaactcgtcaaacaaacaaaaaaccaagaagtttttttgataatatagacaaatgggccaagcaacaaggatggagtggattagcatatttttcaattgaaaaagatgaaagtgataaattaattggcaaaggacctgttggaaagtttttttcaaatgaagcattaagcgaacttataaaaattacaaatgctcaggttggagacagtatatttatgtcttgcagtgatgaggatcaaa

SEQ ID NO: 297940 - DNA, 475 bp, Unknown
  Bacterial polypeptide expressing nucleotide sequence isolated from the Sargasso Sea
tgattatcccatgtacgaaatcgatgaaaaaaccaataaaatccaatttagtcacaatccattttcaatgccacagggtgaaatggaatcattaataaataaagatcctttggatataaaagcttatcagtatgatatagtatgtaatggtgtagaattatcttctggagcaattagaaatcataaacccgaaataatgtacaaagcttttgaaattgctggatataaaaaacatgaagtagaaactaaatttacaggaatgctaaatgctctaaaatatggagctccaccccatggaggcagtgcccctggaatagataggataataatgcttttagcagatgaaccaaacattagagaagtaatagcatttcctatgaatcaacaagctgttgatttgatgatggatgctccttctgaagttgatcaagaaagattggaagaatttggtttaaaattagtagataaagattaa

SEQ ID NO: 297941 - DNA, 793 bp, Unknown
  Bacterial polypeptide expressing nucleotide sequence isolated from the Sargasso Sea
tttccaagaatttcatattcagatgctatgcttaagtatggttcagataagcctgacttaagaaatccaataattatatctgacttaaccgagatttttaaaagagatgatataaagtttgagatatttaaaaaacttgttaaatcaggatcaatagtcagaggattggtagcaaaagataccaaagataaaacacgaagcttttttgatggaattgataaatgggcgaaagatcaagggtcttctggtttagcttattttacattggaaaaaaatcaaaaaatatctggcaaaggccccgtaggtaaatttttttcagaagatgcattaaaagagataatgaaaaaaatggatgcaaaaataggagataccgtctttttatcttgtggaaaaaaagagaatgtagaaaatatactaggtttagctagagaaaaaataggaaatgaacttaaagttattgataaaaatattttttcattttgttgggtagttgattatccaatgtttgaattagatgcaaattcaaaaaaaattaaatttagtcacaatcctttttctatgcctcaaggaaacgtgaataatttagatttatctaatccattaaatttaaaagcttatcagtatgatatagtgtgcaatggcgtagaattatcttctggtgcaattagaaatcatattcctgaattaatgtataaattatttgatattgctggatattcaaaaaaagatgtagacgaaaaatttagtggcatgatcaatgcattaagctatggcgcaccaccacatggtggta

SEQ ID NO: 297942 - DNA, 886 bp, Unknown
  Bacterial polypeptide expressing nucleotide sequence isolated from the Sargasso Sea
actgacatcacagaaatatttaaaagagatgatgttaattttgaaatatttaaaaaattagtaagcaaaggatcaatcgtaagaggtatagtaacaaaaaatacatctgaaaaaccaagaagtttttttgatggaattgataaatgggcaaaagaagaaggatcttcaggtttagcttatttctctattgaaaattcagaaaagttaatagccaaaggacctgttggaaaatttttttcagaagaatgccttaaagagataatgaaattaatgaatgccgaggtaggagatactatttttatgtcttgtggaaaaaaacctgaggttgaaagtttattaagcaatgctagagctaaaatagcaaatgaacttaatttaattgatgagagtattttttcattttgttgggtagttgattatccaatgttcgaaattgacgaaagtacaaaaaaaattgaatttagtcataaccctttttcaatgccacaaggtgatattgataatttaaatttgtctgatccattaaaattaaaagcatatcaatatgatattgtttgcaatggtatagaattgtcctcaggcgcgataagaaaccataaacctgatttaatgtataaattatttgaaatagctggctactctaaagagaaagtgaatgagaaatttagtggcatgattaatgccttaagttatggagcaccccctcatggtggtattgcacctggtatagatagaattgtaatgttattagcagatgaaaaaaatattagagaagtaacaatgtttccaatgaatcaaaatgcccaagatctaatgatgaatgcaccatctgaagtagacgaaaaccaactcaaagaactcaatatttcaaaaagaaaaaaatagt

SEQ ID NO: 297943 - DNA, 883 bp, Unknown
  Bacterial polypeptide expressing nucleotide sequence isolated from the Sargasso Sea
tttttatgctcttcctcagtctcctcagcttttcaagcaaatgctcatgatgggtggaatggataggtattatcaggttgcaaggtgctttagggatgaagatttaagagcagataggcagccagaatttactcagattgatatagaagcatcctttgttgaggagaaagacattattgagctgggctcaagcttactaaaggttctgcttaaagattttgcaaatcataatttagatcatattgatgaaattgactatgcgcatgctattaataaatacggctccgataaacctgatctaagaatacctctagagctattagagatttctgatgaagctaaaaaagaggaatttaaagttttctctgatccagcaaaaaatgatggatcaagagttgtcgctttgaaagtagatggaggaaataaacttacaagatctcaaatagatgaatatacaaatttcgtaggaaaattaggagcaaaaggacttgcttatataaaaataaatgatgtttctgacatcgaaaatggactccaatctcctattcttaagttcctttcgaaaaagttcataactgcactttttagtaagttaaatcctgcaaatgatgacttaattttctttggtgcaggttcttctgaaatagttaatttaagtatgagttctttaataaaaagacttggaaaagatttagatttatatcaaaaagattgggcgccttgttggataactaatttcccaatgttcgaaagtgatgctgataatttgaaggcactccatcatccatttacaagacctaaagaggatttagaaaactttagaaaggatccatctgaggctcaagcttatgcatatgacttagttcttaatggttatgagatt

SEQ ID NO: 297944 - DNA, 961 bp, Unknown
  Bacterial polypeptide expressing nucleotide sequence isolated from the Sargasso Sea
caggtgtcattgtgtgggtgggtcaaccgtcgccgtgacttaggtggtttgatttttattgacctgcgcgaccgcgaaggcctggttcaggtattctttgatccggatttaactgacttattcactcaggctgccgacttacgcaatgagtattgtgtgcaattaactgggacagtgcgtgcccgtccagattcacaggtcaacagcgagatggccacaggtgaagtggaagtgtacgcatccagcctgactattctgaataaatctgcgccaataccgctggatccaaaccagaacaacagcgaagaacagcgcttaaaatatcgttatattgatttacgccgtcctttgatgagcgaccgtttaaaattccgcgctaaagtcaccagctttgtgcgtaattttatggacagccagggctttttagatgttgaaacgccaatactaaccaaagccactccagaaggtgcgcgtgactatttagtgccaagccgtactcataaaggtcagtttttcgcgttgccacaatcgcctcagttgtttaaacaattgctgatgatggctggcctggaccgctattaccaaatcgttaaatgtttccgcgacgaagatttacgtgctgaccgtcaaccggaatttactcagatcgatatcgaaacctcattcatgacttctgagcaggtgatggaagtcactgagcagatggtgcatcagatgttccttgagctgttgaatgtcgatttaggcaaaatgccacgcatgacctacaacgaagccatgcgtttatacggttcagacaaaccggatctgcgtaaccctatgcaattcgtagacgtggcagacttattaaaagatgttgaattcaaagtattctctggcccggccaatgataaaaaaggccgcgtggtggcattaaaagtgccaggcgctgcagagaaagtttcgcgtaaagacatcgaca

SEQ ID NO: 297945 - DNA, 757 bp, Unknown
  Bacterial polypeptide expressing nucleotide sequence isolated from the Sargasso Sea
tttgagaagggaggaaatgcataaaaacatagttttaaggtctcaggttatttcgtttataagatctgaaatgttaaaactaggtttcttagaatatcaaactccaattttaacttcctcaagcccagagggtgccagagattttttagttccaagcagattaaatccgggaaaattctatgcacttcctcaagcaccacaacaattcaaacaattaattatggtatcgggatttgataagtattttcagattgcaccttgttttagagacgaggatgcaagagctgatcgaagtcctggtgagttttatcaattagatttagaaatgtcatttgttgaacaagaagatgtttttaatgttgtggaaaaattaatggtaaatttgtttaagcatttttctaaaaaaaaattattaaatgataaattcccaagaataacgtatcaggaagcgatgaaaaaatatggaactgataagccagatttgagaaaccctttgattattcaagatataacaaaaatatttacaagagatgacgtaaaatttgatatttttaaaaaattagttaaatcaggttcaattgtgagagcgattttagttaaagatactaaagataagccaagaagtttttttgataatattgataaatgggcaaaagagcagggcgcttctggtttagcatattttactttcgaaaaagataaacaacttaaaggcaaggggccgattgggaaattttttagtcacgattctttaaaa

SEQ ID NO: 297946 - DNA, 892 bp, Unknown
  Bacterial polypeptide expressing nucleotide sequence isolated from the Sargasso Sea
atgcaaaaaaatctaaaattaaggcatgaattaatcttagaaatatgtaattatttaaataataaagactttgtgcacattgagactccaattctaataaaaagtacacctgaaggagcaagagattatatagtgcctagcagagttcatcctggtgaatattatgctcttcctcaatctcctcaacagatgaagcaaatgttaatggtgtcaggttttgaaaaatattttcaaattgctaagtgttttagagatgaagacttgagggcagacaggcaacctgagcacactcaattagattttgagatgagcttcgttcatcaagaagatgtactaaataattgtgaaaaactatattctcatttatcaaaaaaatttcttggtaaagagatttccacaccacttccaaggttaaaatatgaagaatcaatagaaatttatggcactgataaacctgataccaggtttgacttgaagatacataatttagaaagcaatctttcaggaacagaatttaacgtttttaataatgctctgaaaaataatggaacaataagagggttttcaatacctaaaaacgaaaaaatgacaagaaaattttacgatagtcttaacgaattcgttagagataatggtggtgcaggaatcattccaatttctattgaaaaagatattaatgaaattaaattagaagatattaaaagtccaatatcaaaatttttagatttagaaattattaagaatttatataacttttttaatgttgaccaaaaccaagttattttaatttgtgctggagaaaagaatattgtacttgaatgcttaggaaaagttagaaataagatagctaaagaatttgacttaattgacaatgaaaaatttaattttttat

SEQ ID NO: 297947 - DNA, 688 bp, Unknown
  Bacterial polypeptide expressing nucleotide sequence isolated from the Sargasso Sea
ttgaataagtatagaagtcataattgcagtgagttaagaaaaaaagatgtaaataacaaagctgtactctctggttggattaataagaaacgagatcatgggaacttattatttattgatctaagagataattatggaataactcaatgtataatagataaacaaaattctaattttttaaaattggagaaggtacagcttgagaccgtcatcaaaattgagggaaaagttgttaatagatcaaaagaaacaattaataaagatatagagactggtgaagttgaagtagttattgaaaattatgaaattctaggttcttgtaaagagctacctatgcctgtttttagtgaccaagaatattccgaagaaattagactaaagtatagatttattgatttaagaagaaaaaaaattcacgagaatattatattaagatcaaaagtagtttcttttattagagatgaaatgaataaattaggttttttagagtttcaaactccaattcttacttcttccagtcctgagggtgcaagagattttttagtaccaagtagactaaatcctggaaaattttatgctttacctcaagcacctcaacaatttaagcaacttattatggtctcgggatttgataagtacttccaaattgcaccatgctttagagatgaggacgccaggtctgatagaa

SEQ ID NO: 297948 - DNA, 743 bp, Unknown
  Bacterial polypeptide expressing nucleotide sequence isolated from the Sargasso Sea
cctgggaggagatatttttaaagttgcccaagacgcaggagctggaggtttagcattcataagagttaaaggagatgaacttgaaacaattggggcaataaaaaataatctaaataaagatcatatctctaatattttaaaaataacagaagcaaaagatggggacttgattcttttaggggctggaaatactcaaattgtaaatcaatcattagatagagtcaggcaatatattgcaaaagatttaaagctaatagagaaggataaatggaactttttatgggtcacagatttccctatgtttgaaatgaatgaagaagaaaaaagatttgaagctttacaccatccgttttgttctcctaaaaatattaagcttgaagattcaaaagaattaaaagaaaaaatagagagctctacagcacatgcatatgacttggtactaaatggattagagttaggtggtggttctctgcgtatccatcaagctgaaatgcaaagagaagttcttagaatagttggattaacagataatcaaattaatgaaaaatttggttttttaattgaagctctcgaaatgggtgctccacctcatgggggaatagcatttggggtagatcggataacaatgcttattttgggggaagattcaattagggaaacaatcgcttttccaaaaaatcaacaagcaaaatgtcttcttacaaatgcaccttcaaatgtctccaaatcccaattaaaagaac

SEQ ID NO: 297949 - DNA, 795 bp, Unknown
  Bacterial polypeptide expressing nucleotide sequence isolated from the Sargasso Sea
ttttttcaactttttcttgatttttacgtaacagaaacaccttttccaagaattacatatgccgatgctatgagcaggtatggaacagacaaacctgaccttagaaatccaataaatatttctaatttaactaaggaatttaatgatgacaaagttgaatttagtgcatttaaaaaaattatagaagaggggggcgaggttattggaataccagcacctgactcgagtcaaaaacctagaagtttttttgataatcttaataattgggcaagaaaagaaatgaatgctgctggtttaggttatattgtttttgataaaagctcttctggcgtagaaggaaaggggcctattgcaaaatttatcccctctgaaattcaagaaatgatattaaacaaagcaggtcttaaggccggagactcaattttctttgcatgcgctaaaggtaaagaagtttatgatattgctgctgcagccagagataaaattgcaatagatctggatctaattgaaaagaaagtatttaagttttgttggattgtcgattttcctatgtatgaaaaggataaagaaactgaaaaaattgattttagtcataatcctttctctatgccacaaggtggattagaagccctcaataattcagatcctttaaatattttaggttatcaatatgatattgtttgtaatggcgtagagctatcatcaggcgccatacgaaatcatgttccagaaattatgtataaggcctttgaaatagctggctacagtaaagatcaagtgcatgaaaaattggag

SEQ ID NO: 297950 - DNA, 904 bp, Unknown
  Bacterial polypeptide expressing nucleotide sequence isolated from the Sargasso Sea
tatcaaattgatatggagatgagctttgctacacaagaagatattttagatgttataagtcgtttactgtttgacacttttgataaatttaaatctaaagaaaaatctataaataaacttccatttccaacttttacttacagagacagtattgagaattttggatgtgacaaaccagatttaaggaatccattaagacttacaaatgttacaagatatttcgagggatctggtcttcaaatttttgaaaatttaataaaaaaaggagccatagttaattgtatacaagctttaaagtctgagggtaagccaagaagtttttatgataatttaaataaatgggcacaagaacaaggaaaaaaaggtttgggatatataaactttgagaatttattaccaaaaggccctttagctaaaaattttaatcaagaaaaattaaatcaaatgattaaagacaataattttaatcaaactgatggcttattatttgtttgtgatacaccagaagagtcatatgatttctcctcaaaggttattgcaaaagtaggagaagatttaaacctaatagataaaaataaatatgaattttgctggataattgactaccctatgtatgaaaaagatgctttaacaggcaagattgattttagtcataatccattttcaatgccccaaggaggaatggataagttaaaaaaagaagatcccttaaatattttagcctatcaatatgacattgtttgcaatggtatagagctgtcatcaggagccataagaaaccatagaccagatattatgaaaaaagcttttgaaatcgccggatatggtgaaagtgaaattaaaacaaaatttagtgctttatttgaggcttttcattatggagttccaccaccatggaggctgt

SEQ ID NO: 297951 - DNA, 937 bp, Unknown
  Bacterial polypeptide expressing nucleotide sequence isolated from the Sargasso Sea
ttaaagcatcgtacgttagatcttagagggccaaaaatgcaagagaatctcagaataaaatctagacttactaaatccattagagattacttagagaaacattcatttgttgatatagagacacctattttgacaaaagcaactcctgaaggagcccgtgattacttagttcctagcagaacaagtactggcaatttttttgccttaccacaatctccacaattgtttaagcagatgctaatgatctctggttttgatcgatattatcaaattgcaagatgtttcagggatgaagacctaagagctgacagacagccagagttttctcaaattgatatagaggcatcttttgtaaatgaaggtgatgtgatgaaaatttctgaagatatggttaagcatgccttcaacgaagttcttgattttaagataaaagaaatcccaaaaataaaatggtctgatgcgatgaatagttatggttcagataaaccagatctcagaaacccactaagattaatcgaaataggagaaatttttaaaaatgaagaatttaaagttttttcagatcctgcaaatgatccaaaatccagaattgcatctttagttatagagaatggagatgatattggtagaggtcaaattgatagatatacagattttgtaaaagaatttggagctaaaggtttggcatacattagggtagatgaagctaatgttgaaggtttaaattcccctattattaaatatctatctgagaattgtcagaaaagtattttaaaagaacttaatctaaaaaaaggctcattagtcttttttggagcaggaaacaaaaaaactgttaatgagtacatgagtagacttatgtctaaaattggtggagaccttaatttgttggaagatggatttagattttgttgggtaacagattttcctatgtttg

SEQ ID NO: 297952 - DNA, 880 bp, Unknown
  Bacterial polypeptide expressing nucleotide sequence isolated from the Sargasso Sea
tgaaatgtcatttgttgatcaagatgatgttaaaagtgagatggaatcaatggtcagagaactttttaagtcggtactcgatatagatcttgaaaaacaattttcacaaatcacacatgctgaagcaatggatcgttttggctcagacagcccacatttgggtatagaaatggagcttactgaagtcagcaatctcatgaaggatgttgaatttaaagtttttgctggtccagcaaacgatgatgattctagagtcgcatgtcttgttctgaaagattcttctgatttgtccagaaagcaaatcgatgattatactgattttgtctcgaattacggcgcaaaaggattggcctatattcgagttaatgagattgaaaaagggattgatggtcttcagtcgccaatacttaaatttctaaatgattcagtcaccaaccaactgattgagacactctcattaaaaaacggtgatacggtattttttggagcagataagaaagaaattgtgaatgcttctctgggtgctcttcgagtaaaaatggcagaggatttcggtttaatcaaagatggatggtttcctctttggataactgactttcctatgtttcattgggatgagaaagaaaaaagatggtcctctgaacatcatccattcacatcaccactaaatccagatccagaggaactaaaaaataatccaaaggatgcgctatcaaaaggctatgacatggtactcaatggacatgaaatagggggtggatccattcgtattcattctgaagaaatgcaacaggctgttttttcaatacttggcataaatgaagaagaagcagatgaaaaatttggttttttccttgaggcactaaagtatggatgtcca

SEQ ID NO: 297953 - DNA, 275 bp, Unknown
  Bacterial polypeptide expressing nucleotide sequence isolated from the Sargasso Sea
tttaggtatcggacaagaagaagcctccgacaagtttggttttttattggaggcattaaaatatggttgtccgcctcacggagggatcgcgtttggcctagatcgtttaacaatgattttagcggaaaccgattccataagggatgtaatcgcatttcctaaaacgcagaacgctaattgtctccttacgagtgctccgagcaaggctgaagcagaacaattagaggagttggctatccggctcgtaaggccagaggtgaaggaagatacttaga

SEQ ID NO: 297954 - DNA, 642 bp, Unknown
  Bacterial polypeptide expressing nucleotide sequence isolated from the Sargasso Sea
tatgaaaagaactcataaatgcaatgaagttactagtgagcttattggtgaagaaatttacgtaagtggctggatacacagaagaagagaccatggtggagtaatattctttgacctaagagacgaaggtggattggtccaagttgtttacaatccagactccagggatactttctctcttgctgagtcttgtaggaatgaatacgtcatactttccaaaggtatagttcgggagagacctgaaggaacggtaaatgaaagtttagttacgggtcgtgttgaaatcattgcttcagaacttgaaattttgaatgcctctcttccaatgccttttcagcttgatgaacacacctctgttggagaggaaacacgtctcaagtacagatttttagatttaagacgctctgatatgcaagagaatcttaggctgagatctagagtgtctgggtcgcttagaaattttcttaatgcccaggaatttattgaaatcgaaacacctcttcttactaaggcaactcctgaaggcgcaagagattatctagtaccaagtagaacgtttcctggctcgtttttcgctttgccacaatcccctcaattatttaagcaaactctcatggcttcaggatttgagaagtattatca

SEQ ID NO: 297955 - DNA, 593 bp, Unknown
  Bacterial polypeptide expressing nucleotide sequence isolated from the Sargasso Sea
aatgaataaatatagatcacataattgttccgaattagatgataaagaaataggtaagatagtccatctatctggctggctccatagaaagagagaccatggaaatttattatttgtagatttacgagatcattatggaataactcaatgtgtgattgaaaataataataaattttttccagtgttggaaaagttgaaaccagagtcagttttaaaaattaatggtgaagttattaaaagaagtaaagaaaacgaaaatcttgaattaaaaacaggaaaaatagaagtaaaaattacttcaatcgaagtactgtctagcgctaaagatctgcctatcccagtttttggtgagcaagattatcctgaggacatcagattaaaatatagatttttagatcttcgtagagaagaaatgcataataatataatcttaagagcaaaagtaatttctttcataagaactgaaatgattcaattaggttttttagaatatcaaacaccaattttaacttcatcaagtccagaaggagctagagattttttagttccaagcagattaaatcagggaaaattttacgctttgccacaagccc

SEQ ID NO: 297956 - DNA, 712 bp, Unknown
  Bacterial polypeptide expressing nucleotide sequence isolated from the Sargasso Sea
tcaataagaaacgaatttgtagtccagatacatggtgttgttaagagaagactagaaggaacaataaataaaaatatgtatacaggtgaagttgagatagaggttataaatttaaatattctaaataatgcaaaaacaccagtatttccgatagatgggtaccaggacgttaatgaagatgtgagattaaaaaacagagtgcttgacctaagaagacctgaaatgaatgagagaattataacgagatcaaaaatcacatcattgataagaaattttcttgataaaaatgactttcacgaaattgaaactccaattttaacaaaagccactccagagggtgcaagagactatattcttccaagtagggtgcagcctggaagtttttacgccttacctcaatcccctcaattatttaagcaacttcttatgattgggggtcttgataaatactaccaaattgcaagatgttttagagacgaagatcttagggcagatagacaaccagaatttactcaaatagatatcgaggcttcttttcttgatcaaaaggagattatgaaaataagtgaaaagatgataaaggatatcattttaaaattttgtgatgaaaagcttgaaaaatttgaagtcatcaattggcatgatgctatgcgtgattatggatgtgataagcctgacttaagaatccctctaaaattaattgaaatatcta

SEQ ID NO: 297957 - DNA, 466 bp, Unknown
  Bacterial polypeptide expressing nucleotide sequence isolated from the Sargasso Sea
catgtttgagattgatgaaaaaacaaataaagttgtctttagccataatccattttctatgcctcaaggagatttgaaaaaattagacttatctaaacctttagaaataaaagcatatcagtatgatattgtttgtaatggaattgaactttcatctggagcaattagaaatcacatccccgaattaatgtataaattattctcaatagcaggctacgataaaaaggctgttgatgaaaaatttagtgggatgattaacgcattaagttatggcgctcctccacatggtggaatagctcctggtatagatagaataataatgttattagctggagaaaaaaatattagagaagtaactatgtttccaatgaaccaaaatgcacaagatttaatgatgaatgcaccttcagaagtaagcttaaatcagttaaaagaactaaacctttctattaaaaaaaataaataa

SEQ ID NO: 297958 - DNA, 907 bp, Unknown
  Bacterial polypeptide expressing nucleotide sequence isolated from the Sargasso Sea
atgtgtaattgaaaataaagataaaaattttaaggttttagaaaaattaaaaccagagtctgtaattttagtcgaaggaaaagtaataaaaagatcaaaagaaacagaaaataaagatttaaaaacaggtttgatagaagttaaagttaaaaatattcaagttttatctgaagcaaaagaattacctttacctgtctttggtgagcaagattatcctgaggaaactagattaaaatatagatttattgatttaagaagaaatgagatgcataaaaatattgaattaagatccaaaattttatcctttttaagatcaaaaatgactgaaaataactttttagaatttcaaacacctatacttactgcctctagccctgaaggtgctagagattttttggtaccaagtcgtgttcaccctggaaaattctatgcattaccacaggctccacagcaatttaaacaaatgataatgatttctggttttgatagatactttcaagttgctccatgtttcagagacgaagatggaagagcagatagaagtccaggagaacattatcaattagatatggaaatgtcctttgtggagcaagaggatgttttgaaaactgtagaaccaatattttttgatttatttaagaattttgcaaaaaataaaaagattaataagttcccgtttcctagaattaaatacaacgatgctttaaataaatatggaacagataaacctgatttaagaaatccaattgaattaaaagatgtaacggaaatttttaaatctgatgaagttggactcaaaatttttaaagaaattatatctaaaggtggtgtagtgaaagcagttccagtttccacacccatttctaaccacgtagtttttttgatgggcttaatactggggctatag

SEQ ID NO: 297959 - DNA, 835 bp, Unknown
  Bacterial polypeptide expressing nucleotide sequence isolated from the Sargasso Sea
aaactttttaggtttggaaaaaactcaactagaaactgtcataaagatagagggaaaagttgttaatcgctcaaatgaaactgtcaataaagatatcaaaacaggagagatagaagttgtaattaataaatttgaaattttaggaacatgcaaagaattaccaatgcctgtgtttagtgatcaagattatgctgaagaaatcagattaaaatatagatttttagatttaagaagaaaaaaaattcatgaaaatataattttaagatctaaagtaatttcttttattagagatgaaatgataaaatttggttttttagaatttcaaacacctatattgacttcatccagtcctgaaggtgcaagagactttcttgtacctagtagattaaatccgggaaaattttatgctttacctcaagcaccacaacaatttaagcaattaattatggtttcaggatttgataaatattttcagatcgcaccttgctttagagatgaagatgcgagagctgacagaagcccaggagaattttatcaactagatttagaaatgtcttttgttgaacaagaggatatttttaatgttgttgaaaaattattagttaatacttttaaaaagttttcaaataaaaaattaatgcatattaaatttccaaaaatttcttattcgaatgcaatgttaatgtatggcacagacaaaccagatttaagaaatcctttaattataaatgatattacagaaatatttatacgagatgatgtatcttttgaaatatttaaaaaattggtaaaatctggttctaaagttagatgtatatcaactaagaatacgaaa

SEQ ID NO: 297960 - DNA, 826 bp, Unknown
  Bacterial polypeptide expressing nucleotide sequence isolated from the Sargasso Sea
tacccaaatcgatattgagactacgttcttagatgccgatggcgtaatgtctattaccgagcgcatgattcgtgacttgttcaacaaaatgctaaacgttgaccttggcgacttcccgcgcatgacgtataaagaagccatgacgcgctttggtagcgacaagccagacctgcgtaaccctctagagttgaccgacgttgcagacttgcttgctaacgttgactttaaagtattcagcggtccggcaaacgaccctaaaggtcgcgtagcagctattcgcgtaccaggtggggcgtcactttcgcgcaaacaaattgatgactacaccaaatttgtaggtatttacggcgcgaaaggcctagcatgggttaaagttaacgatgccggtgcaggtcttgaaggtctacagtcgccaatccttaaattcctatcggaagacatcactaacgccatgctagagcgcactggcgcacaaagtggcgatattctattgtttggtgcagacagctacactgtggttaccgaagcgatgggcgcacttcgtcttaagcttggtgaagactttgagcttcttgaaggcgagtggaagccactttgggttgttgacttcccaatgtttgaagagtttgacggtcagcttcacgctattcaccacccgtttaccgcgccacgtggtttaacgccagaagaacttaaagctaaccctgctgaagccttatctgacgcttacgatatggtattgaacggtgttgaattaggcggtggttctgtacgtattcacaatgaagacatgcagtctacggtattcaacattctttggcattga

SEQ ID NO: 297961 - DNA, 646 bp, Unknown
  Bacterial polypeptide expressing nucleotide sequence isolated from the Sargasso Sea
ttgaaaaaatatagaactcacacctgtggagaattaaacaaatctcataaaaaaaaagaaatttctttatctggttggattaataaaaagagagaccatggaaatcttttatttttagatttaagagataattatggagtcactcagtgtgttgtagataaaagtaatgaagtctttaagaaaattgaaaaactttctctggaaactgtaataaaaattacaggaatagtaattgagagatctgatcaaacaataaataaaaatatttctactggagatatagaagttaaaatcaataatattgatattttaggtcaaaccaaagaattgccaatgccagtcttttcagatcaagaatatgctgaagagataagacttaagtatagatttttagatttaagaagaaaaaaaatacatgaaaacattattttaagatcaaaggtaatatcctttattagaaatgaaatgcaaaaacttggttttttagaatttcagaccccaatattaacctcatctagcccagagggagcgagagatttccttgtacccagtagattgaatcctggaaaattttatgccttaccacaagcgcatcaacaatttaaacaattaataatggtttctggttttgatagatatttcaaat

SEQ ID NO: 297962 - DNA, 742 bp, Unknown
  Bacterial polypeptide expressing nucleotide sequence isolated from the Sargasso Sea
ggtgctcgagattttgtggtgcctagcagaatgaatccaacagagttttatgcacttccacaatcccctcagaccttcaaacaacttttgatggttagtggttacgatagatattttcaaattgtaaaatgctttagagacgaagacttaagagcagatcgtcaacctgaatttactcaaattgactgtgaaatggcatttgtagaacaagaagatgtaatacaaacttttgaaggcttaataaagcatctttttgaaaatgaaaaacagattacattcaaggatgaatttccaagaatttcttatgctaatgcaatgatgaaatacggttcagacaaacctgacattaggtttggtatggaattcaattacattaaatctttaacttctgaagcaggcttcaaagtttttgatgaagctgaagaagttattgcaattacattaaaaaattgtgctgattattcaagaaaaaaactagacacacttaccaattgggtaaaaagacctcaaattggagccaaaggtttgatttatgtaaaatgcaatgaagacggttcctttaaatcttctgttgacaaattcttttctagtgactatttaagtagttgggctaaagaatgtaatgctgaaaatggcgatttaattttgattttaagtggcaataagtcaactactcaaaaacaaatgagcgaactaagacttaaacatggtaaagacttaaacctttataaagaaaacgatt

SEQ ID NO: 297963 - DNA, 641 bp, Unknown
  Bacterial polypeptide expressing nucleotide sequence isolated from the Sargasso Sea
ttcgttgcaaaaagaaatagtaaaagatctaaacataaatgagggtaatattctatttatggttggagataaaaagaatattgcatgcaaagcacttgggaatctcagggtattggttgctcaaagagaggggcttacaaataaagatgaatataaaccaatatgggttacagaattccccatgtttgattatgatgaagataatgataggtatatcgcaatgcatcatccgtttaccgctccaagagagtctgacatagataagttagatagtgaccctgggaatgctcttagtcgagggtatgatttgactatgaatggtcatgaaattgcaggtggatctattcgtattcattccccagcgattcaggaaaaagtattctctctattaggtctaagtcatgagcaggctgtagaaaaatttggatttttagttgaagctttaaaatatggtgcccctccgcatggagggatagcatttggctttgataggttagttatgttgttagcaggaactgataatatcagagatgttattgcatttcccaaaacaacttcagcttcttcattgatggatgatagccctaattacgttgatattgatcagctgaatgaattaggactaaaattaaaagattgat

SEQ ID NO: 297964 - DNA, 841 bp, Unknown
  Bacterial polypeptide expressing nucleotide sequence isolated from the Sargasso Sea
gattatccagaagatataagattaaaatatagatttttagatttaagaagagagcaaatgcacaaaaatattattttacgatctaaagtaatatctttcatcagaaacgagatggttaaactaggtttccttgaataccaaacaccaatcttaacgtcttcaagccctgagggagcgagagattttttagtccctagcagattaaatccaggaaagttttatgctttacctcaagcgccacaacaatttaaacaattaataatggtttctggatttgatagatattttcagatagctccatgttttagagatgaagatgcacgatctgaccgaagtccaggagaattttatcaacttgatattgaaatgtcttttgtagagcaagaagatgtttttaaagtcattgaaagtttaatggtcaatctgtttaaagcattttcctcaaagaagatgctttataataaatttcctagaatttcatatgaagaggcgatgttgaaatatggaacagataagcctgatttaagaaatccacttattatctgcaatataaccaaagtttttcatagagatgacgttaaattcgatatatttaaaaaattagtgaaatcaggatgtgatgtaagatgtataattacaaaaaataccaaagacaaatcaagaagttttttcgataatatagataaatgggctaaagaacaaggagcgtcgggtttggcttattttacttttgaaaaaaatgagcaaattacagcaaagggccccgtaggaaaattttttagtgaagagtcattaaaagagattatgaatattactggagcagagataaatgatagtattt

SEQ ID NO: 297965 - DNA, 483 bp, Unknown
  Bacterial polypeptide expressing nucleotide sequence isolated from the Sargasso Sea
ggattgttgattatcctatgtatgagattgacgaaataactaaaaagataaaatttagccacaatcctttttctatgcctcaaggagaattagataaattagatttatctaatccattaaatattaaagctttccaatatgatattgtttgtaatgggattgaattatcgtcaggggctataagaaaccatgttcctgaattaatgtataaattatttgaaattgctggatattcaaaggatgatgtagatagtaagtttagtggaatgataaacgctttgagttatggagccccacctcatggaggaattgctcctggaattgataggattgttatgcttttagcaaatgaaaaaaatattagagaagttactatgtttccgatgaaccaaaatgcacaggatttgatgatgaacgcaccttctgaaatttctgacaatcaacttaaagagctcaatttagcgataaaaaacaaaaaataat

SEQ ID NO: 297966 - DNA, 877 bp, Unknown
  Bacterial polypeptide expressing nucleotide sequence isolated from the Sargasso Sea
cgtgacgaagatttacgtgcagacagacaacctgaatttactcaaatcgactgtgaaatggcttttgttgaacaagaagatattttaaatatgtttgaaggtttaacacgtcatttgttaaaagaaattaaaggtgttgaagtagaaaaatttccaagaattacttatgattatgccatgaaaacctatggaaatgacaaaccagacattcgttttgatataaaatttggagagttaaatgaagtagcacaacataaagaatttagtgtttttaattcagctgaattagttgtcggaatagctgctccaggttgtgcaaattataccagaaaagaaattgatgctttaattgattgggtaaaacgtccacaaattggtgcttctggaatggtttatgtaaaatgtgaagctgacggaactttcaaatcatctgtagataaattctatgaccaagaagatttaaaaaaatgggctgaagcaaccaatgctaaaacaggtgatttaattttagtactttctggaaatgctgataaaacgagaacacaactttctgctcttcgtatggaagttgctacaagattaggtttacgtaaacctaatgaatttgctccactttgggttatagattttcctttattagaatgggacgaagaaacaaatcgttatcatgcaatgcatcacccatttacttctccaaaacctgaagacatcaaattaattgaaacagaaccaggaaaagtaagagcaaatgcttacgacatggtattaaatggaaatgaaattggtggtggttctatcagaattcacgatagagaattacaatcaagaatgtttgatttaataggatttagcaaagaagaagcagaagctcaatttg

SEQ ID NO: 297967 - DNA, 986 bp, Unknown
  Bacterial polypeptide expressing nucleotide sequence isolated from the Sargasso Sea
gatgcaagagcagatagaagtcctgggagaattttatcaattagatgttgaaatgtcttttgttgaacaagaggatgtctttggagtaattgaaactttatttctaaaattatttaagacattcagtaataaaacaattcttcatgaaaagtttccaagaattacctatgaagatgcaatgcttaaatacgggtcagataaaccagatttaagaaatcctttagaaatttcagatttaacaattatttttgaaagagaagatgtgaaatttgatatttttaaaaaattagtgaaaagtggctcactagttagagcgttagttaccaaaaatacaaaggataaacctagaagtttctttgatagtattgatagatgggcaaaagagcaaggtacgtctggtctagcttattttacactagaaaaagatgataaaattaatgccaaaggaccaattggaaaatttttttcagaggatgcattattagaaatcatgaaacttacaaatgcgaatataggtgatacgctatttttttcttgtggaaagaaaaatgatgtagagaaaatattaagtgttgcaagaaataaaatagctgaagatttaaatttaattgataatgaaatattttcattttgttggattattgactatccaatgtatgagattgatgaaactactaaaaaaataaaatttagtcataatccattctcaatgcctcaaggtgaaataaataaattagacttatctaatcctttaaatataaaagcctatcaatatgatattgtttgtaatggagttgagttatcttctggtgctattagaaatcatgttcctgaattaatgtataaattatttgaaattgcagggtactcaaaaaatgatgttaatagtaaatttagtggaatgataaatgccttgagctatggggcaccacctcatggaggaatagctccaggaattgatagaatttgtatgcttttggcaaatg

SEQ ID NO: 297968 - DNA, 895 bp, Unknown
  Bacterial polypeptide expressing nucleotide sequence isolated from the Sargasso Sea
tcaaatttataaacagatattaatgatttcaggctatgatcgatattttcaaatagtaaaatgttttcgagatgaagatctaagatctgaccggcagcccgaatttacccaaattgatattgaaatgtcatttgtaaatgaggaaatgatatacaaccaaatggaaaatttggtgcgatatttgttcaaaaaggttaaagatatctctctaccaaataaatttccaactatgacctatcaggaggccatgaatttatatggttcagataaacctgatcttcgctttgatatgaaaattattgattttaaatcttttgtgctagagtcagaatttcaagcttttaaagaggcggagatggttagaggtttaattgtaaaaaatggtgcaaaattttcaagaaaagctatcgatgttttgactgaatttgttaaaagctatagggctaaaggtctggcttggattaaggtaatagatgaaaaatttagtggtggaattagtaagttctttagtgatactcttcaagcaaaaataattaggaatcaaaatttagagagtggtgatttattattgctggttggagataaatctaaaattacgcttaattgcctgggtaaattaaggaaagaagtcgcaattaaagaaaatttaattcctaatgatattttccaacctttatgggttactgattttccaatgtttgattacgataagaagaggggaacttatacatccatgcatcatccctttactgcacctaaggttaagagttttaaagaatttgaggaagatccttataattgtttaagtagaggttatgatttaactataaatggatatgaagttgctggaggttcgataaggatacactcaacagatatccagaaaaaagtattt

SEQ ID NO: 297969 - DNA, 934 bp, Unknown
  Bacterial polypeptide expressing nucleotide sequence isolated from the Sargasso Sea
aatgagaactgaatactgtgggaatgtaactaaagaacatttaggaaaagatgtttctatatgtggttgggtccatcgaagacgagaccatggtggagttatttttcttgatgtaagagatcttgagggtatttgtcaggcagtcatcgatccatccaacgaagaggcattttctcttgcagataaatgcagaagcgagtttgttgttcagataaaaggaagtgtccgtgagcgacctgagggtactgttaactctaaaatgaagaccggggagattgaaatagaagtcagcgaattagaggttttaaactctgctgcaacaccagcatttccactagatgattaccaagatgttaatgaggatgttcgattaaaaaatagaatcatagatttaagaaggcctgaaatgaataataggattcttaaaagatctaaaattgtatctaccataagaaattttttagaaggtagaagcttcaatgaaatagaaactccaatactcacaagagctactcctgaaggagcaagggactatattttgccaagtcgtgttcatcctggaagcttttatgctcttcctcagtctcctcaactttttaagcaaatgctcatgatgggaggaatggacagatactatcaagttgcaagatgttttagagatgaagatctaagagcagacagacagcctgaatttactcagattgatatagaagcttcttttgttgaggagaaagatataattgagcttggctcaagcttactaaagcttctgctaaaagattttgcaaatcacaacatagataatattgatgaacttgactatgcggatgcaattaataaatacggctcagacaaacctgatctaagaatacctcttgagttgattgagatttctgatgaagctaaaaaggaggaatttaaagttttctctgat

SEQ ID NO: 297970 - DNA, 922 bp, Unknown
  Bacterial polypeptide expressing nucleotide sequence isolated from the Sargasso Sea
tatggaacagataagccagaccttagaaatccgttggaaatttatgacttaacaacaatatttcatagagatgatgttaagtttgaaatatttaaaaaacttgtaaaatctggatcaatagtaagatcaattgtaactaaaaatacaaaagataaacctagaagtttttttgataatttagataaatgggcaaaatcccaaggggcatcagggcttgcatattttacaattgaaaaagataaaaatattatagcaaaaggacccgttggaaaatttttttccattgaggcattaaatgaaattatgaaaataactggagcaaaagttggagacagtttatttttttcatgtgataaagaggtaaatgttttacaattaatgtcgtctgcaagagataaaattgcggatgagctaaatttaattgatcaagatacttttgctttttgttggatagtagattacccaatgtatgaggtggataatgtaacgaaaaaaattaaatttagccataaccctttttctatgcctcaaggagaagagaaaaatttagattttaaaaatccattaaatataaaagctttccagtatgatatcgtgtgtaatggagttgaactttcctctggtgcaattagaaatcacaaaccagagttaatgtacaaactttttgagattgctggatataagaaagatgatgtgcaagaaaaatttagtggaatgataaatgcactaagttttggagcacctccacatgggggcatagccccgggcctagatagaatagtaatgttattggcaggtgaaaaaaacattagagaagttacgctatttcccatgaatcaacacgctcaagatctaatgatgaattcgccatcaaaagttagtgataaacaattaagtgaactaaatataactatcaaaaaaa

SEQ ID NO: 297971 - DNA, 802 bp, Unknown
  Bacterial polypeptide expressing nucleotide sequence isolated from the Sargasso Sea
aactccaattttgactagagctacgcctgaaggagcaagagattatctagtcccaagcagagtccatcctggagagttttttgcattacctcaatctcctcagctatttaaacaattgctgatgattggtgggttggataaatactatcagattgctaaatgtttcagggatgaagatttgcgtgcagatagacagcctgaatttactcaagttgatattgaggcttcatttgtttctactgaagaaataatagaactcggagagcacttggtgacatcgctactctctgaatttacagactatcaaaaagcagaagtgcctagaattacatataaacaatccattgaaaaatatggatgcgataagcctgacctaagaattccacttgagcttaatgatatttctgagcttgtaaaagatgaagaatttaaagtattttctggtccagcaaatgatcaagcttcacgagtggtggccctaaaggttccagaagccgcatctatgacaagaaaaaaaattgatgagtatactgattatgttggtaagttgggtgctaaaggtcttgcatatattaaagttctagatcttgatcaagaaaatggacttcaatcaccaattctaaaattttttcaaaaagaaacaattgattcaattcttgcttctctaaatgttcagaataatgacattatatttttcggagcaggaaaggcagatattgtaaatctctcaatgagttcattaataaaaagactgggtgaagatttaagtttaatcaattcttcatgggctccatgttggata

SEQ ID NO: 297972 - DNA, 919 bp, Unknown
  Bacterial polypeptide expressing nucleotide sequence isolated from the Sargasso Sea
aattgattgtgaaatgagttttgtaaaccaagaagatattttaaatcagtttgaaaatttgatttctcatttaattaaaaaaattaacaactataaacttgataagtttaccagaatgacatatgatcaggctatgagagaatatggtacagacaagcctgacataaggtttgaaatgaaacttgcagatataacaaaaaatgcgaaaggttttggttttaaagttttcgactcaagtgaatcaataattggatttccaattaaaaaagcagctaattatagcagaaaagaaattgattattggataaattgggtgaagcaacctcaaattggagcagaaggaattgtttggattaaatataatgatgataaaactcttaaatcatcagtagataaattttattctcaagatgttctgttaaagtggatgaaaacatttaaagctaatccaggagatttggtttttattctttcgggagagctaaaaaaaatacttaagcaattaggagaattacgactaaatattgcccaaaaaattggacttagagaccctacagtttttgcacccctttggattgtagattttcctctgtttaaatacgatgaggtttctagtaggttacttgccgttcatcacccttttacatcccctaaagaagaagatataaaaatattgaaagataatccagaaaaagttagagcaaatgcttatgacttggttattaatggaaatgaaattggaggggggtcaattcgtattcatgattcgaaacttcaaaaagaaatttttaaacttttaaatttatcagatgaagaagtagatgaacaatttggttttttaattgatgcatttaaatacggtgctcctcctcatggaggaatagcgtttggacttgacaggttggtagctattcttggt

SEQ ID NO: 297973 - DNA, 889 bp, Unknown
  Bacterial polypeptide expressing nucleotide sequence isolated from the Sargasso Sea
gatgcataaaaacattgaattaagatctaaaattttatcctttttgagaataaaaatgactgaaaataactttttagaatttcaaacacctatactcaccgcatcaagccctgaaggtgctagagacttcctggtaccaagtcgtgtccatcctggaaaattttatgcattaccacaagccccacaacaatttaaacaaatgataatgatttctggttttgatagatactttcaaattgctccatgttttagagatgaagatggaagggcagacagaagcccaggagaacattatcaattagatatggaaatgtctttcgttgagcaagaggatgttttaaaaacagttgaaccaatattttttgatttatttaagaaatttggtaaaagtaaaaagataaaccaaattccatttcctagaattaaatacaaagatgctttaaacaaatatggaacagataaacctgatttaagaaaccctattgaattggtagacgctacagagatttttaattctaaagaagttgaattaaaaatctttaaagaaattatatctaaaggcggtatagtgaaagcaattccagtttctaatacacacacaaaaccaagaagttttttcgatggacttaataactgggctattagcgagggtgcaagtgggttagcttatattacttttgagagagttggctctaaaattcttggtaaaggaccaatagcaaaatttttttctgagcaggctttattaaaattagcgaaactttgtaaaattaatgagaaagattcaatcttttttgtttgcaacaaggaaaaggaggcaattaatttctctgggattgtaagacaaaaaattgctgaagagttaaaaataatagacagtgatagtttt

SEQ ID NO: 297974 - DNA, 465 bp, Unknown
  Bacterial polypeptide expressing nucleotide sequence isolated from the Sargasso Sea
tatgcgaagtcacttctgcggtgagttgaatgaatcaaatgttgatgaagatgttgttttgtgtggttggattcacagaaggcgtgatcatggaggtgttatatttttagacttaagagatcgcgaagggttggcacaagtcgtttatgaccccgacactaaggagagttttaaaatcgctgagggagtccgaaatgagttcgtggtggaggtaaaaggcagggttaggctaaggccttcaggaaccattaacgatgaaatgcctactggaagaatagaaattttagggaatgaattaaaggtattaaatgcgtcagaaacgccaccaattcaattggatgagcatgcggaagtaggggaagacgttaggctcaaatatcgttatatcgatctacgtcgccctgaaatggcagcaaggctcagatttcgctcaaaggtcggaaacacgattaggaattttctaga

SEQ ID NO: 297975 - DNA, 804 bp, Unknown
  Bacterial polypeptide expressing nucleotide sequence isolated from the Sargasso Sea
cctgcgtgccgaccgccagccggaattcacccagatcgacgtcgagacctccttcatgaccgcaccccaggtgcgtgaaatcatggaagagatgatccgcaagctctggctgcacatcctgaacgtggacctgggtgacttccccatcatgaccttcgacgaagccatgcgccgcttcggctccgacaagccggacctgcgcctgcccatggagctggtcgatgtggcagatctcttgaccgaggtggagttcgccgtgttcgccggtcctgccaaggatccgaaaggccgtgtggcggccctgaaggtaccgggcggcgcggagctgtctcgcaagcagatcgacgagtacaccaagttcgtcggcatctacggtgccaagggcctggcctggatgaaggtcaacgacgccgggagcggcctcgaaggggtgcagtccccggtggccaagttcctctctgacgccatcgtgcgcgagatcctggcccgcaccggcgcgatggatggcgacatcatcttcttcggcgccgactccaagaaagtggtgtgcgatgccatgggtgccctgcgcctgaaggtgggccgcgatctgggcctggtggagaacgtctggaagcccctgtgggtcatcgacttccccatgttcgaagaagatggcgaaggcggcctggcggccatgcaccaccccttcaccgccccgagcaacctgggcccgagcgagctgaaagcgaacccggtgggcgcttacgccaacgcctacgacatggtgatcaacggctacgaagtgggtggcggctctgtgcg

SEQ ID NO: 297976 - DNA, 643 bp, Unknown
  Bacterial polypeptide expressing nucleotide sequence isolated from the Sargasso Sea
tttgaataaatatagaacacataattgcggagagttaaacaaaaataataaatctacagaagttattttgtctggatggatcaataaaaaacgtgatcatggcaatttattgtttattgatctaagggataattacggtgtaactcaatgtgtaattgataaaagcaatgagcattttgctaaattagaaaaaatccaattagaaagtgttataaaaattttaggtaaagttgttgagagaacaaaagaaacaattaacttagaactcaaaactggagaaattgaagttgtcatcgattcctttgaagtgcttggaagttgtaaagaacttcctatgccagtgttttctgatcaggagtattcagaggagataagactaaagtatcggtttttagacttaagaagaaaaaagattcatgaaaatattattttacgttcaaaagtaatttcttttataagaaaggaaatgaatgaattgggttttttagaatttcaaacaccaattttaacttcatcaagtccagagggtgctagagattttttagttccaagtagattaaatcctggaaaattttatgccttacctcaagcacctcaacaatttaaacagcttattatggtttctggatttgataaatatttt

SEQ ID NO: 297977 - DNA, 958 bp, Unknown
  Bacterial polypeptide expressing nucleotide sequence isolated from the Sargasso Sea
attgaaaaaatacagaacacataattgtaatgagttaagaaaagaggatgtagataaaaaaatttctctttcaggctgggtaaataaaaaaagagaccatggaaatttattatttatagatttaagagataattacggaattacccaatgtataattgataaagacaataaatatttttctgatttagaaaaaatgcaattagaaacagtcattaaagttgagggaaaagttgttaatagatctaaagaaacaattaattctgaaattgaaacaggtgaaatagaggttgttattgacaagtatgaagttttgggtacttgtaaagagctgcctatgccagtctttagcgatcaagagtatgcagaagaaatacgattgaaatatagatttttagatttaagaagaaaaaaaattcatgaaaatattattttaagatctaaagttatttcatacattcgaaatgaaatgactaaattaggttttttagaatttcaaacaccaattttaacctcatctagtccagagggtgctagagattttttagtacccagtcgtttaaatccaggaaaattttatgcattacctcaagctcctcaacaatttaaacaattaataatggtctcaggttttgatagatattttcaaattgcaccttgttttagagatgaggatgcaagagcagacagaagccctggggagttttatcaattagatttagaaatgtcatttgttgagcaggaagatgtatttaatgtagttgagaaattaatggttaatacatttaaaaatttttcaactaaaaaattgatgtttgaaaaatttccaaagatttcatacaaggaagcaatgcttcaatatggcactgataaaccagatttaagaaacccacttattataaatgatataactgaaatttttacaagagaagatgtttcatttgaaatatttaaaaaatta

SEQ ID NO: 297978 - DNA, 1209 bp, Unknown
  Bacterial polypeptide expressing nucleotide sequence isolated from the Sargasso Sea
gcgcagcgaaaccgtgctgcaggttgagggcaaagtgcgggcccggccgggcgagtctctgaacgacaagctggccaccggtgcggtggaggtcttggccagcggcatcaccgtgctgaacagcgtgaagggcaacctgcccttccccgtttcagtgcacgacgaggagaacacccgcgaagagctgcggctgcgccaccgctatctggatctgcgccgcaagcgcatgaacgacaacctgcgcctgcgggcccagacgattcaggccgcccgccgcttcctcgaagacgagggcttcatcgaagtggaaaccccagtgctgacccgctccacccccgaaggcgcccgcgactacgtgctgcccagccgcgtctgcggtggtgaatggtttgctctgccccagtcaccgcagctgttcaagcaactgctgatggtgggcggcatcgagcgttactaccaggtggcccgctgtttccgcgacgaagacctgcgcgccgaccgccagccggagttcacccagctggacatcgagatgagcttcatggatcaagagcagatcctggagctgaacgaatcactgatctgcgccatctggaaggccgtgaagggcatcgacctgccgcgacccttcccgcgcatgacctggcatgacgccatggagcgctatggcaccgaccggcccgacacccgttacggcatggagctcaccaacgtgagcgacatcgtcaaggacatgggcttcaaggtgttcagtggcgccgtgaagtccggcggcgcggtgaagtgcatcgcggtgcccggcggcaacgatgcggtgagcaacgtgcggatcaagcccggcggcgacgtgttcagtgaggcccagaaagccggtgccggtggcctggccttcatccgggtgcgcgacggcggtgagatcgacaccatcggcgccatcaaggacaacctcagcgatgagcagaagcaggagctgctcagccgcactggcgcggaacccggcaccctgctgctgttcggtgccggcgacaccgccacggtgaacaaggccctcgaccgggtgcgccagtatctggccaaggagctgggcatggtcaaggccgacagcgacaacgaccagtggaacttcctctgggtggtggacttcccgatgttcgagttcaacagcgacgagaaccgttacgaggctctgcaccaccccttctgtgctcc

SEQ ID NO: 297979 - DNA, 1249 bp, Unknown
  Bacterial polypeptide expressing nucleotide sequence isolated from the Sargasso Sea
gtagaagttgttataaaaaattttaatgttttaggaacatgcaaagaacttttaatgccaatatttagtgatcaagaatattcagaggagattagattgaaatatagatttttggatttgagaagaaaaaaaattcatgaaaatattattttaagatcaaaagtaatttcctttataagaaatgagatgaataatcttggttttttagaatatcagacaccaattttgacatcatcaagtcctgagggagcaagagattttctagttccaagcaggttaaatccaggaaaattttatgcactcccacaagctccccagcaatttaaacaattaattatggtttcaggatttgataaatattttcaaattgcaccttgttttagagatgaagatgctagagcagataggagtccgggagagttttatcaattagacttagagatgtctttcgttgaacaagaggatgtttttaatgtagtagaaacacttttagtaaatacttttagaaatttttcaaaaaaaaaattattagaaaaaaaatttccaagaattccttacaaggaatcaatgattaaatatggaacagacaagcctgatcttagaaaccctcttataattaatgatataactgagatttttttaagggatgatgttaaatttgagatctttaaaaaattagttaaatctggttccaaagtaagatgtataattaccaaaaatacaaaaaataaacctagaagtttttttgatgggattgacaaatgggctaaagatcagggtgcatctggcatggcttattttacttttgaaaaagacaaagaagtttctggtaaaggacctgttgggaaatttttttcaaaagaagcattagaagaattaatgaaaaaaacaggtgctaaaataggtgatagtatcttttttgcatgtaataaagaaaaagatttagaggtaatcacatcattggccagaaataaaattgctaaagatttaaatttaatagatgaaaatatttttgcattttgttggattgttgactatccaatgtatgagagagatgaagtgacaaaaaaaattaatttcagtcataatccgttctcaatgcctcagggagatatagataaaattgacttcaataaaccactagaaattttagcttatcagtatgatattgtatgtaatggaatagaattatcctctggtgccattagaaatcatattcctaaattaatgtacaaattattttctgtag

SEQ ID NO: 297980 - DNA, 750 bp, Unknown
  Bacterial polypeptide expressing nucleotide sequence isolated from the Sargasso Sea
atactaactatgttggcaagttgggtgctaaaggtcttgcatatattaaagttatcgatcttaagcaagaaaatggacttcaatctccaatacttaaattttttcaacaagaaacaattgattcaattcttgctttcctcaatgtgcaaaatgatgacattatattttttggggctggaaaggcagatattgtaaatctctcaatgagctcattaatcaaaagactgggtgaagatttaagtttaatgaattcttcatgggcaccatgctggatagtagattttccaatgtttgaaagaaataaagaaaataatcttacatcgttgcatcatccatttactttgcccgctgtaacaattgatgaattaaagaaagatccagacaattcattagcctgtgcatatgattttgttttaaatggttatgagcttgggggcggctcattaagagtttatgaaccttcaatgcaaaaagagatattttctatactaggtatttcttctgatgaggctaaggaaaaatttggtttccttttgtcagcattatcatctgggtgtccacctcatggaggtattgcgtttggcttagatagaattgttatgttgttatcagatacaactaatatacgtgatgtaattgcttttcctaaaacgcaaagtgcatcttgtttgctaactgatgctcctggcacagtttctgctgatcaacttgacgagctgagcgtcaagtcaacttttgagccggattaat

SEQ ID NO: 297981 - DNA, 608 bp, Unknown
  Bacterial polypeptide expressing nucleotide sequence isolated from the Sargasso Sea
ggtgaacaaagccctcgaccgggtgcgccagtacctggccaaggagctgggcatggtcaaagccgaccgcgacaacgaccagtggaacttcctctgggtggtggatttcccgatgttcgagttcaacagcgatgagaaccgttacgaggccctgcaccaccccttctgcgcccccaatgccgaggatctcggcagtgatgcctcccaatgggccgacaccctgccggctgcccgggcccaggcctacgaccttgtgctcaatggccttgagctcggcggtggatccctgcgcatccatgactccgccctgcagcgccaggtgttgcagaccgttggcttgccgctcgaggaggcccaggagcagttcggctttctgatggacgcccttgatgtgggcgccccaccccatggcggcctggccttcggcatcgaccggatggtgatgctgctcgcgggtgaggaatcgatccgcgacaccatcgccttccccaagacccagcaggctcgctgcctgatgaccaatgccccaggcggggtcgccaacaagcagctggaggagctgcatgtggccagcacctgggtggatcccagcgacgacgacgcgtgat

SEQ ID NO: 297982 - DNA, 1273 bp, Unknown
  Bacterial polypeptide expressing nucleotide sequence isolated from the Sargasso Sea
attctaacagccccctctccagaaggcgcaagagattatcttgtaccatcaagaatacacaaagggtctttttatgctttaccccaagctcctcaacaatttaagcaactttacatggcctcaggcgtagataaatattttcaaatagccccttgttttagggacgaggatagtagggctgatagatcaccaggcgaattttatcaaattgatatggagatgagctttgctacacaagaagatattttagatattattagtcgtttactatttgacacttttgataaatttaaatctaaagaaaaatctattaataaactcccatttccaacctttacttacagagacagtattgagaattttggatgtgacaaaccagatttaaggaatccattaagacttaaaaatgttacaagatatttcgagggatctggtcttcaaatttttgaaaatttaataaaaaaaggagccatagttaattgtatacaagctttaaagtctgagggtaagccaagaagtttttatgataatttaaataaatgggcacaagaacaaggaaaaaaaggtttgggatatataaactttgagaatttactaccaaaaggtcctttagctaaaaattttaatcaagaaaaattaaatcaaatgattaaagacaataattttaatcaaaatgatggtttattatttgtgtgtgatttaccagaagagtcatatgatttctcctcgaatgttattgcaaaagtaggagatgatttaaacttaatagataaaaataaatatgagttttgctggatagttgattatcctatgtatgaaaaagatgttttaacaggcaagattgattttagtcataatccgttttcaatgccccaaggaggaatggataagttaataaaagaagatcccttaagtgttttagcttaccaatatgacattgtttgcaatggtatagaactgtcatcgggagccataagaaatcatagaccagatattatgaaaaaagcttttgaaatcgccggatatggtgaaagtgaaattaaaacaaaatttagtgctttatttgaggcttttcattacggagtcccaccacatggaggctgtgcacctggattagatagaataataatgttgcttagtgataatgaaaatataagagaggttatagcttttccatttaatcaaagagcccaagatttaatgatgaatgcaccagttaaaattgatagcaaacaattaaaagaattaaatttaaaaaaaattagcgactaga

SEQ ID NO: 297983 - DNA, 1233 bp, Unknown
  Bacterial polypeptide expressing nucleotide sequence isolated from the Sargasso Sea
attgagtaaatatagaacacatacttgtaacgaattaagaaaagaagacgttgataaaaaagtatttctttcaggctggatcaacaaaaaacgagatcatggtaacttattattcatagatttaagagataattacggtgtcacacagtgtattattgataaagataacaaaaattttacaaacttagaaaaaactcaattagaaactgtagttaaaatagaaggtaaggttgtagctcgatctgaagatacaattaacaaagaaataggaactggagaaattgaggtaacaattgatacttacgaagaactaggttcatgtaaagaattgccaatgccagttttcagtgatcaagaatatgctgaggaaataagattaaaatatagatttttggatttaagaagaaaaaaaatacatgaaaatataatcttaagatcaaaagttatttcacacattagaaatgaaatgactaaattaggatttttggaattccaaacaccaatactgacttcctctagccctgaaggtgctagggattttttagttccaagtagattaaatccagggaagttctatgctttacctcaagcgccacaacaatttaaacaactaattatggtatctggttttgataagtattttcaaattgctccttgctttagggatgaagatgcaagagcagacagaagtccaggtgaattttatcaattagatttagaaatgtcttttgtagagcaagaagatgtttttaatgttgttgaaaaattaatggtcaatacctttaaaacattttctaataaaaaattgttaaatgataaatttccaagaatttcttataaagatgcaatgctaaagtatggaagtgacaaacctgatttaagaaatccacttgaaataaaggatattactgagatatttactagagaagatgtatcttttgaaattttcaaaaagttagtaaaatctggttcaagagtaagatgtataataacaaaaaatacaaaggataaacagagaagcttttttgataatattgataaatgggctaaagaacaaggtgcctctggtttagcttattttacatttgaaaaagatactgagttgtctggtaaagggcctatcggaaaatttttctctaaagaagcattgtcagaaataatgaatttaactaatgcagaagtaggggatagtatttttctagcttgtggcaaacaaaatgaattagaaaaaat

SEQ ID NO: 297984 - DNA, 1102 bp, Unknown
  Bacterial polypeptide expressing nucleotide sequence isolated from the Sargasso Sea
agaagtcctgggggaattttatcaattagatttagaaatgtcatttgttgagcaggaagatgtatttaatgtagttgaaaaattaatggttaatacatttaaaaatttttctaataaaaaattgatgtttgataaatttccaaagatttcatacaaggaagcgatgcttaaatatggtacagataaaccagatttaagaaacccgctcattataaatgatataactgaaatatttactagagaagacgtttcatttgaaatatttaaaaaattggtaaaatctggatctagagtaagatgtattgttacaaaaaatacaaaagataaaccaagaagtttctttgataatattgataaatgggcaaaaggagaaggtgcttctggtttggcatattttacttttgaaaaagataaagatattttggcaaaaggccctataggtaaattcttttctaaagacgcattagttgaaatcatgaaaaaaacaaaatgtgaaataggagacagtattttcatggcttgtggaaaacaggatgaattagaaaaaattacttctttagcaagagataaacttgcaaaagatcttgatttaatagatgaaaatatttttgcattttgttggattgtagattatccaatgtttgaaaaagatgaattaactaataaaatagagtttagtcataatccattttcaatgcctcagggtaatttaagtgaaaaagatcttgaaaaccccctagacatactcgcatatcaatatgacatagtctgtaatggaatcgaactttcatctggagctataagaaatcataaaccagaacttatgtacaaacttttttcaattgcaggatatgataaaatacaagtagatgaaaaatttagtggaatgattaacgcacttagttatggcgcaccaccacatggaggaatagcgcctggtatagataggatagtaatgctattagctaatgaaaaaaatattagggaagttacaatgtttccaatgaaccaaaacgcacaagatttgatgatgaatgcaccatccgaggtaaatccagatcaaataaaagaattaaatttaattttaaaaactaaaaaataa

SEQ ID NO: 297985 - DNA, 1054 bp, Unknown
  Bacterial polypeptide expressing nucleotide sequence isolated from the Sargasso Sea
aatggcatttgttgagcaagacgatgtgtttaacgccattgaacccattttacattctgtatttacaactttttctgattttaacgttacagaaacaccgtttccaagaattacatatgccgatgctatgagcaggtatggaacagacaaacccgaccttagaaatccaataaatatttctaatttaactaaagaatttaatgatgacaaagttgaatttagtgcatttaaaaaaattataggagaggggggcgaggttattggaataccagcacctgactcgagtcaaaaacctagaagtttttttgataatcttaataattgggcaagaaaagaaatgaatgctgctggtttaggttatattgtttttgataaaagctcttctggtgtagaaggaaaggggcctattgcaaaatttatcccctctgaaattcaagaaatgatattaaacaaagcaggtctaaaggccggagactcaattttttttgcatgcgctaaaggcaaagaagtttatgatattgctgctgcagccagagataaaattgcaatagatttaaatctaattgaaaagggagtatttaagttttgttggattgtcgattttcccatgtatgaaaaggataaagaaactggaaaaattgattttagtcataatcctttctcaatgccacaaggtggattagaagccctcaacaattcagatcctttaaatattttaggttatcaatatgatattgtttgtaatggcgtagagctgtcttcaggcgctatacgaaaccacgttccagaaattatgtataaggcctttgaaatagctggctacagtaaagatcaagtgcatgaaaaatttggaggtatgataaacgcttttacttatggcgtacctcctcatggcggcattgcaccaggaatagacagaatagtcatgctgcttgctcaagaaaaaaatattcgtgaggtaatattgttcccaatgaatcaacaggcgcaggatctgatgatgctggctcctgctgaagtcgataagactacacttgatgagttgaatttagaa

SEQ ID NO: 297986 - DNA, 962 bp, Unknown
  Bacterial polypeptide expressing nucleotide sequence isolated from the Sargasso Sea
aatgaataaatatagatctcataattgttctgagttaacagaaaaagactctggaaaaacagtttctatatctggctggctacacagaaaaagagaccatggaaatttgctatttatagatttaagagatcattttggattaactcaatgtgttatagaaaataatagtaaatttttttcagaactagaaaaacttagacctgagtctgttttaactgttaccggaaaagttattaaaagagaaaagggcacagaaaatttagaattatcaacaggtaaaattgagattaatattcaatcaattaaaattttatcagagtcaaaagacttacccatgccagtttttggtgaacaagattatccagaagatattagattaaaatataggtttttagatttgcgtagagaagaaatgcataaaaatattatattaagatcaaaagtaatatcttttatcagggctgaaatgttaaaattaggttttcttgaatatcaaactccaattttaacttcgtcgagtcccgagggtgctagagattttttagtacctagcagattaaatccaggtaaattttatgctttaccccaagcacctcaacaatttaaacagctaattatggtttcaggatttgataaatattttcaaattgcaccatgttttagagatgaagatgcaagagctgatagaagtccaggtgaattttatcaacttgatattgaaatgtcttttgttgaacaagaagatgtttttaaagtagtagaaactttaatgataaatttatttaaaaatttttcatcaaaaaaaataatgaatgataaatttccaaaaattccataccaagaggcaatgttaagatatggcactgacaaacctgatttaaggaaccctttattgataaatgatattacaaatatttttactagggatgatgtgaaatttgatatttttaagaaattagtta

SEQ ID NO: 297987 - DNA, 880 bp, Unknown
  Bacterial polypeptide expressing nucleotide sequence isolated from the Sargasso Sea
ttgaataaatatagaacacatacatgtggagaactaaatatctctaataaaggtcaaaaaattattttgtccgggtggattaataaaaaaagagatcatggaaatctgttatttattgacttaagagataattacggccttacccaatgtgtcgtagacaatgaaaacaaagtatttaaagaaatagaaaacctttcactagaaaccgtattaaaaatatctggtaaagtaattgagagaaataaagataccattaatgaaaatttatcaactggtgaaatagaaatttcaattattgattttgaaattttaggacaaacaaaagaactccctatgccaattttttcaaatcaagaatattcagaggaaattagacttaaatacagatttttggatttaagaagaaaaaaaattcatcaaaatattattcttagatcaaaagttatttcttttattcgatctgaaatgaataatttaggatttttagaatttcaaacaccaatattaacatcgtctagtccagagggtgctagagatttcttagttccaagcagattaaacccagggaaattttatgcattacctcaagctccccaacagtttaaacaattaataatggtatcagggtttgataaatactttcaaatagcaccgtgctttagagatgaagacgcaagagccgatagaagcccgggtgaattttaccaattagatttagaaatgtcatttgttgaacaacaagacgtctttgaagtggtggaaaaattgatggttaaagtttttaaaaatttttcagataaaaaattactttttgagacttttccaaagatttcctattctgacgctatgttgaaatatggatctgataaaccagattaag

SEQ ID NO: 297988 - DNA, 997 bp, Unknown
  Bacterial polypeptide expressing nucleotide sequence isolated from the Sargasso Sea
ttgaataaatatagaactcataagtgtaatgaattaagaaaagaggatgtagataaaaaaatttctctttcaggctggataaataaaaaaagagaccatgggaatttgttgtttattgatttgagagataattatggaattacccaatgcataattgataaagataataaatatttttctgatttagaaaaaatgcaattagaaacagtaattaaagttgaggggaaagttgttaatagatctaaagaaacaattaattctgaaattgacactggtgaaatcgaggttgtcattgagcagcatgaagttttaggcacttgtaaagagctccctatgccaatctttagtgatcaagaatatgcagaagaaataagattgaaatatagattcttagatttaagaagaaaaaaaattcatgaaaatattattttaagatccaaggttatttcatacatccgaaatgaaatgactaaattaggttttttagaatttcaaacaccaattttaacctcatctagcccagagggagctagagattttttagtacctagtcgtttaaatccaggaaaattttatgcactacctcaagctcctcagcaatttaaacaattaataatggtttcaggctttgatagatattttcagattgcgccttgttttagagatgaagatgcaagagcagacagaagtcctggagagttttatcaattagatttggaaatgtcatttgttgaacaagaggatgtgtttaatgttgttgaaaagttaatggttaatacatttaataatttttcttccaaaaaacttatgtttgataaatttccaaagatttcatacaaggaagcaatgcttaaatatggtactgataaaccagatttaagaaacccactcattataaatgatataactgaaatttttacaagagaagatgtttcttttgaaatatttaaaaaattagtaaaatctggatctaaagtaagatgtattgttacaaaaa

SEQ ID NO: 297989 - DNA, 1084 bp, Unknown
  Bacterial polypeptide expressing nucleotide sequence isolated from the Sargasso Sea
cccgaatttactcaggttgatattgaagcttcatttgtttctgctgaagaaatcctagaccttggagaggatctggttacatcattgctttctgaatttactgactatcaaaaaacagaagtaccaagaattacatacaaagaatctattgaaaagtatggatgtgataagccagatttaagaatcccgcttgagcttaatgacatctctaagtttgtgaaacatgaagaatttaaagtattttccggtcctgcaaatgatcctgcttctcgggttgtagctttaaaggttccaggcgctgcatctttgacaagaaaaaaaattgatgagtatacagattatgttggcaagttgggcgctaaaggtctggcatatataaaagtcgtagaccttgatcaggaaaatggacttcagtcaccaattcttaaattttttcaacaggaaactatcgactcaattctttcctctatcaatgcgcaaaataatgacattatatttttcggagctggaaaggcaggcattgttaatctctcaatgagctcactgataaaaaaacttggtgaagacttaggtttaatgaattcttcatgggcgccatgctggatagtagattttccaatgtttgaaagaaataaagaaaacaatcttacatctttgcatcatccatttaccttgccggctgtaacaattgatgaattaaaaaatgatccagataatgcattagcatgcgcatatgactttgttctaaatggatatgagcttggcggtggatctttaagagtctatgagccctcaatgcaaaaagagatattttctattctcggaatttcttcgaatgaagccaaggaaaaatttggattccttttgtcaggattatcatctggatgtccccctcatggaggcattgcatttggtctagatagaattgtgatgttgctatctgacactactaacatccgtgatgttattgcctttcccaaaacgcaaagtgcatcttgtttacttacagatgctcccggcatagtttctgatgatcaacttgacgagttaaacatcaaatcaacctttgaacgggagcaataga

SEQ ID NO: 297990 - DNA, 1201 bp, Unknown
  Bacterial polypeptide expressing nucleotide sequence isolated from the Sargasso Sea
atggaacatagaactcatacatgtggccagcttacctcaaaagaaaaagatctcaatgtcgttttaaatggctgggttaatagcattcgtttgcatggacaaattatttttattgacctaagagatagatatggtaaaactcaattagtatttgattctaaaacattcctgggagattttgaaaatgtcaaaaaattatcattagaagacgttctctcaattgaaggtatagtctcgctcagagcagaatctgctatcaatgaagatatcataacaggtcagatagaaattttagtatctaatattctattagttaatgaggccaagccattaccatttgtaatatctgaccgtaacagcgcagaagagaatttaaggttaaaataccgttatctggagctacgaacagaagagcttcagtataatcttattattcgccacaaagcttatcaggctgttcgcagctatctttccaataatgactttttagaaattgaaacaccagtattgatgaaatctacgcctgaaggggctagggattatttagtgccgagcagaatacataagggaaagttttatgctttgcctcagtctccccaactatacaagcaaattttgatgatttcaggttttgatcgttattttcaaattgtaaagtgttttagggatgaagaccttagatcggatagacagcctgaatttactcaaatcgatattgaaatgtcatttgttgatgaagaccatgtaatgaattatatggaaaaattaacaaagcatgttttcaaaacagtaaaaaatatcgaattagatacccctttccaaaaattgacctggtcaaaagcaatggactcctacggttcggataagccagatttaagatttgagcttgagcttattgattttaaggaatatgctttaaaatccagttttaaaactttttttgaagctgatgcaatcaaggctgttatcgtaaacaatgcagatctctttacgagaaaaaaaattgacaatctaaccgatattgcaaaaacgtatggagctagaggattggcttggtttaaggttggtaataatgaattatctggaggtatatcaaaattttttgatgaggacttatctttagaaatgatcgagactttaaatctctctgaaaatgacattttatttattgttgctgattctcacaaagtagcatgtactg

SEQ ID NO: 297991 - DNA, 1516 bp, Unknown
  Bacterial polypeptide expressing nucleotide sequence isolated from the Sargasso Sea
tctcatagaagtaaaaattattagcgcaaaagttttatcggagtcaaaagagcttccgctacctgtttttggcgaacaagattatcccgaagaaataagactaaaatatagatttattgatcttagaagaaacgagatgcacgataatattaaattgagatcggagattttgtcatttttgaggactaaaatgaacaaaaataattttttagaatttcaaacccctattcttaccgcatcgagtcctgaaggtgcccgtgactttttagttccaagcaggcttcatcctggaaaattttatgccctaccacaagcaccacaacaatttaaacaaatgattatgatctcaggttttgaccgatactttcaaattgccccatgttttagagatgaagatggtagagctgatagaagtccaggagaacattatcaacttgatattgaaatgtcttttgttgagcaagaagatgtactaaaagttattgaacctatattttatgacttatttattaaatttggaaatggcaaaaaaataaataaaatacctttcccaagaattaaatacaaagactccctagaaagatttggtactgataaaccagatctaagaaacccaatagagttattgaacgttacagatatatttaaatctgaaaatgttaaattaaaaatttttaaagatataattgctaaaggcggtatagttaaagctatcccggttagtaatacgtcttccaaacctagaagtttcttcgatggactaaataattgggctattagtgagggtgcgagcggtttagcctatatgacctttgaaaagaaagaaaataaaattgttggaaaaggtccaatatctaaattcttttctgaaaaatcaatattagaacttattaaaacatgcaaattaaatgaaaccgactcagttttttttgtatgtaataaagaaaaagaggcaaacaaattttctggagtagtaagacaaaaaattgctgaagatatgaaacttatagacgagaaaagttttaaattttgttggattactgattaccctatgtatgagtatgatgataaagaaaaaaaaatagattttagtcataatccattttcaatgcctcaagttgacatgaaggattttgacaaaactgatcctttaaaaattctagcttaccaatacgatttagtatgtaacggatatgaattatcgtctggcgctataagaaaccatattccagaatatttgtttaaagtttttcataaagttggttattcaaaaagtatggtagaaaagaatttttcaggaatgataaaagcactttcatacggtgcaccgcctcatggaggtatggcacctgggattgatagaatagtaatgttattagcaaatcagaaaaatataagagaggtaactttattccctttaaaccaaaatgccgaggatttattgatggaggcgccatccgaggcttcagaaaaacaactaaaagaattaaatattaagactattaaaaaagattag

SEQ ID NO: 297992 - DNA, 1768 bp, Unknown
  Bacterial polypeptide expressing nucleotide sequence isolated from the Sargasso Sea
catgaaatctcattattgtggtgaaattacatcatctaatctcaaagagaaggttactatttgtggatggatacatagaagaagagatcatggaggagtaatttttttagatgttagggatataaaaggtatatgccaagctgttgtgaatcctgataacaaagaatcattccaattagcagaatcaataagaaacgaatttgttgttcagatagaaggtgttgtaagaaatagacttgaaggaacaataaataaaaatatgcaaactggtgaaattgagatagaggtcgctaatatcaatatcctcagcaaggcaaacactccagtttttccaatagacgaatatcaagaagttaatgaagatgtaagattaaagaatagggtacttgaccttagacgcccagaaatgaatgaacgaattattaaaagatcaaaaattacttctttaattagaaactaccttgataaaaatgaattccatgagattgaaacaccaattttaactaaggctactccagaaggcgccagagattatattttaccaagcagagttcaaccaggtagtttttatgcattacctcaatcacctcaattattcaaacaactcttgatgattggcggcttagataaatattatcaaattgcccgatgttttagagatgaggatttgagggcagatagacaaccagaatttactcaaattgatattgaggcatctttcattaatcaggaagaaatcatgaagcttagcgaaaagatgattaaagatgtaattaaagaattctgtggagaaaaacttgataaatttgaggtgattgattggcatgatgctatggaggaatatggttgtgataaaccagatttaaggattcctttaaagctcaaagaaatatcagatcttgttatgaatgaggaattcaaagtattctctgatcctgctaaaaaggaaggatcaagagtggttgctttaaaagttcctaacggaaatacaatgtcaagaggtcaaattgatgactatacaaaatttgtatctaagttgggtgcaaaagggcttgcttacataaagattaatgatgttaaagatcttgagaatggcattcagtctcccatattgaagtttttaaataaaaaaacaattcaaaatatttttaaaactcttgaagtgaaaacagatgatttaatcttttttggagctggaagtgaatctgttgttaacttatcaatgagtagtcttattaaaaaattaggacatgatttagatttatatgtttcaaaatgggctccttgttggatagtgaattttccaatgtttgaattaaatgccgagggaagtctaacaccgcttcatcatccatttactttacctaaagcatcaaagaaagaacttttagaaaatccaaatgatgttcttgcatatgcatatgatgttgttttgaacggatatgaaataggtggaggatctttaagaatttatgataaaaatatgcaagaagcaatttttgaaattcttaacatttcaaagaaagaagctgagagtaagtttggtttccttctaaaggctttgtcctcaggttgtccacctcatggtggaatcgcattcggactagatagaattgttatgcttgtaacagatactacaaacataagagatgtgattgcattccctaaaactcaaagcgcgacatgtctattaacggatgctccaagtaaggttgataaagatcagcttgatgaacttaaaataattagtacacataaggaagaatag

SEQ ID NO: 297993 - DNA, 1400 bp, Unknown
  Bacterial polypeptide expressing nucleotide sequence isolated from the Sargasso Sea
tatgggaagactcaattaatattcgacgaaaataatttccctacgaaatttgaaaatattaaaaaattttctgtagaggatgtcatttcgattaaaggaactgttgagcatcgttctgattcatcgattaatccctctatgaaaactggtgaaattgaagtatccataaccatttatactatgcttaatgagtctgagccattgccgtttgtattatcagatcgaaatagtgcagaagaacattttagattaaaatacagatatcttgaactaaggatcgatgaattacaaaataatttgatcattaggcatgatacttatcaagctactagaaaatttttgtcaaaaaataattttttagaggttgagactccagtattgatgaaatcaactcctgaaggtgcgagagactatttagtaccaagccgtttgcataatggaaaattttatgcattgccacaatcgcctcaaatttacaagcagatactaatgatatctggctatgatcgttattttcaaatagtaaaatgttttcgtgatgaggatctccgtgcagatcgtcaacctgagtttactcaaatagatatagaaatgtcatttgtcgatgaagatgatgtttttctaaatatggagaatcttactagagatatcttttcatccgttagaggaataaaactgcctagtactttcccaagaataacctataaggaggcaatggaaacatatggctccgataagccagatatcagatacgaaatgaaactagtcgatttaatatcatacacagatagatcagatttcaacgcgtttaactctgttgaatccgtgtatggtattatagtagaaaaaggagcagcgtattccagaaaaatcattgatgaattaacggaggaagtaaaaaagtacaatgccaaaggccttgcttggatgaaatatgaaagcggtaagtttggcggaggggtatcaaagtttttttctgattcgttgcaaaaagaaatagtaaaaaatctaaacataaatgatggcgatattctatttatggttggagataaaaagaatattgcatgcaaagcccttggaaatctcagggtattggtcgctcaaagagaggggcttacaaataaagatgaatataaaccaatatgggttacagaatttcctatgtttgattatgatgaagataatgataggtatatcgcaatgcatcatccgtttactgctccaagagagtctgatatagataagttagatagtgaccctgggaatgctcttagtcgtgggtatgatttgactatgaatggtcatgaaattgcaggtgggtctattcgtattcattccccagcgattcaggaaaaagtattctctctattaggtctaagtcatgagcaggctgtagaaaa

SEQ ID NO: 297994 - DNA, 1370 bp, Unknown
  Bacterial polypeptide expressing nucleotide sequence isolated from the Sargasso Sea
caagcttcgacacgatacgctgcgcgcgttgcgacgcgtgttggaggatgagtacggatttttagaggttgagacgccgacgctgacgcggagcacgccggagggggcgagagattatttggtaccgagtcgtttgcaaccggggggcgcgtacgcgttgccgcaatcgccgcaattgtttaaacaaatgctcatggtggccggcgtcgatcgatattatcaggtggcgcggtgtttccgagacgaggatttacgcgccgatcgccaacctgagttcacgcagttggacatcgagatggcgttcacggacgaggaaggcatcatgaagctggcggaggatttgatgcgcgcggcgttcaagagcggcgtcgatgtcgaccttccctcgagcttcccgaagatgacgtacgccgaggcgatggaaaaatacggaagcgacaaacccgatttacgctacggactggagatggccaccctcgacgcggctttggaggggtgtgaatttaaaatcttttccaccgcgctcgccgccgcaggcggcaccgtcaaggcgctcgtggtgaacgacgacgggaaaatccccaactccaagctcaaacccaagggagacgtcttcaacgaggccgtcgcggccggtgccggagggctagccttcgctcgcgtcgccgcggacggcgtctcgcttgagggcgccaagggtttggtcgaggcgacggcggcgcacgcggcggcgatgatcgccgccgccggcgcgaaaccgggcgaactcttactcttcgccgccggtcacaaggcgttggtgaacaaaactctcgaccgcgtgcgtcaattcgtcgccaagacgtacgggttcgttcccgaaaactcgcacgccgtgacgtggatcaccgagtttccgatgtttgagtacaacgaggacgagtcgcgtttcgaggcgatgcaccacccgttcaccgcgcccaatcaagacgacgttcgcgccgatcccgacgatttaacgaacgcgcgagccatcgcgtacgatttggtgtacaacggcgtggagatcggcggcgggtctctgcgcatctatcgacgagacacgcaagaaaaagtctttgacgccatcggattgagcgccgacgaggcggagaacaaattcgggtatctcatggaggcgtttcaatacggcgccccgccgcacggcggtctcgcgttcgggctcgatcgattggtgatgatgctcgcgggggcaaaatcgatccgagacgtcatcgcgttcccgaaaacggcggcgggacagtgtttactcacgcgcgcgccgggcgcggtgagcgacgagcaatacgcggatttacacgtcgcgtccgtcgcgccgccgcgcgagtgag

SEQ ID NO: 297995 - DNA, 1058 bp, Unknown
  Bacterial polypeptide expressing nucleotide sequence isolated from the Sargasso Sea
aatgagttttgttgaacaagaagatgtctttaaatcaatagagcctgttttatttgaaatttttgatgaaaacaaatcttttaatagagagcatgatgcaaaggtaaatagttatccatttcctagaattccatatcatgaatctttatctaaatatggaactgataaaccagatctaagaaatcctttattaattaaagactatacaaaagtatttgacaattctggatttaaaatttttgcagaaaaaataaatagtggatgtatagtaaagggaattgttattaaaaaaactgaagataaaccaagaagtttttttgataaattaaacaattgggctagagatgaaggatcagcaggtcttggttatatatctcttataaatggcgaatacaaaggaccaattgctaaaaatttgtcgaatgataaattagtaaaattggaattaaatgatggtgattctattttttttatttgtgataatttaaaagaagcggaacttttttctgggaaagtaagagacaaactgtgtttagaaatgaacttactagataaaaattcatttcaattttgttggattgttgactttcctatgtacgagttagatgaaaaaacaaataaaattcaatttagtcataaccctttttctatgcctcaaggtgaattggagtctttagaaacaaaaaacccattagatataaaagcttttcaatatgatattgtttgtaacggagtagaattatcttctggagctattagaaatcacaaaccagaaattatgtataaagcttttgaaattgctggatataaaaaagaagaagttgaaaaaaaattttcaggaatgcttaatgctcttaaatttggagcgccccctcatggaggtagcgccccagggattgatagaatagttatgttattagctgacgagccaaatatacgtgaagtcattgcttttcctatgaatcaacaagcaatggatttaatgatggaagctccagcagaaattaataaagaaagattagaagaattaggcttaaaactaatagagaaaaattaat

SEQ ID NO: 297996 - DNA, 1243 bp, Unknown
  Bacterial polypeptide expressing nucleotide sequence isolated from the Sargasso Sea
attgacaatatatagaacacataactgtaatgagttaaatttaactcataaaggaaatcaaataaccttatctggatggattaataaaaaaagagaccatggtaatttattatttctagacctaagagataattatggtcttacccagtgtgttattgataaaagtaatcctatttttaaaaaaatagaaaaacttcctctcgaaacagttataaaaattgaaggaaatgtcgtagaaagaaccaaggatactataaataaaagtatatcaactggagatatagaagttttaatcaaagcttttgaaatattgggaagcaccaaagaattgcctatgccaatattttctgatcaagaatactcagaagaaattagacttaagtatagatttttagatttaaggagaaaaaaaattcatcaaaatattattttaagatcaaaaataatttcattcattaggtcagagatggaaaaattaggttttttagaattccaaacaccaattcttacttcttcaagtcctgaaggagcaagagattttttagttcctagtagattaaatccaggaaaattttatgcacttcctcaagcacctcaacaatttaaacaattaattatggtgtctggatttgatagatattttcaaattgcaccgtgttttagagatgaggatgcaagatcagatagaagtccaggagaattttatcaattagatgtagaaatgtcatttgtaaaacaggaagatgtttttgaagtatttgaaaaattatttttaaaagtatttacaaaattttcaaataaaaaaattctacaaaataaattcccaaaaattacctattcagaatctatgttaaagtatggaacagataaaccagatttaagaaacccattaataatatcagatataactgaaatttttcaaagagatgatgttaaatttgagatatttaaaaaactagtaaaatcaggttccttggcgagatgtttaattactaaaaatacaaaagataaatctagaagtttttttgataaaatagataattgggcaaaagaacaaggttcgtcaggtcttgcatactttacgattgaaaaaaatgaaaaatttataggtaaaggaccagtaggaaaatttttttctgaggaatctataaaagaaataatgaaacttacaaatgctgaagttggagataccgtatttttatcttgtggaaaaaaaaatgaaatagaaaaaattttaaatatg

SEQ ID NO: 297997 - DNA, 664 bp, Unknown
  Bacterial polypeptide expressing nucleotide sequence isolated from the Sargasso Sea
ataaaaattatagaggattccatcatagagtctttggtatcatctttagaagttcaggaaggagatattattttctttggagcaggaaaaagaaatattgtgaatgattcattggctgcgttgcgggatctcatcgcaaaagatcttgatttacttacttgtgaatgggcaccatgctgggtagtagattttccaatgtttgagaaaaataaaagtggagatttaacaccattacatcatccatttactgctccgaaatgtactgcagatgaactaaaaaacaacccgcttggcgctttaacagaggcatatgatattgttttaaatggtactgagcttggaggcggttctgtaagaatacatgatagattgatgcaagagactgttttgaagcttctcagtattaatgagaaagaggcagaagagaaatttggtttcttaattgcagcattacagcacggctgtccgccgcatgcaggactggcaattggttttgatagaatgattatgcttatgactggttcggattctataagggatgtaatcgcctttcctaaaactcaaacagcatcttgtttacttactgaggcaccaggacaagctgcgcaggaacaacttgaagaattacatattaggttccatggactagaaaaggaggattaag

SEQ ID NO: 297998 - DNA, 607 bp, Unknown
  Bacterial polypeptide expressing nucleotide sequence isolated from the Sargasso Sea
aatgactattagaacacataattgtggtgaactgaataataatcatattgacaagaccgttcaactttcaggatgggtaaactctataagaacccatggtcagattatatttatagatattcgtgatcgttttgggaaaacacaggtgatactaagttctgatgaattaattgaaattggtaaaaccttgtcaaatgaagatgttattcatgtttccggtaaagttactgcaagagaaaaagatttaatcaatcctgatttatcaacaggggaaattgaagttttagtggaaaaaattgatttattaagcactgctgaacctatgcctctatccatacaaaatcgagaagcatcttcggaagagcatagattaaaatatagatatttagagcttagaaattcttctcttcaaagtaatttaattattagacataaaacagctcaggtagtaagaaatttcttatcagaaaataattttttagagattgaaacaccggttttgatgaagtcgactcctgaaggtgctagagattatttagtacctagcagagttcacaatggtcaattctatgctttaccacaatctccacaaatgtataagcaacta

SEQ ID NO: 297999 - DNA, 1009 bp, Unknown
  Bacterial polypeptide expressing nucleotide sequence isolated from the Sargasso Sea
aatgcgttcactttattgcggagatattaatagttcagatgttggcagtgatgttgagatttctggatgggttcataaaagaagagatcatggcggcgtaatttttttagacattcgtgatttgcgcggaatagttcagacagtttttaatccaagtttaaagaaagtatttgaaatggcagactcttgcagaagtgagtatgttgtaaatataaaaggaaaagtaagaaagagaattgatggagcagtaaatccaaaaatgttaactggcgaggtagaaatagaagcaagtgatctatctatttttagttcagcagttactcctcagtttccattagatgattatcaagatgtgaatgaggatataagacttaaacatagatttttagatttaaggcgacctgatgtcaatcaaagattggtacagagatctaaaattacctcagaaatcagatcaattttagaaaaaaataatttttatgaaattgaaacgcccatacttaccaaggctacgccagagggtgcaagagattacctagttccaagtagggttcaccctggtgaattttttgctttgccgcaatccccacaattatttaaacaattacttatgattggcggtttagataaatattatcaaatagctaagtgttttagagatgaggatttaagagcagatcggcagccagaatttactcaggttgatattgaagcttcgtttgtatcaactgaagaaataattgaaatcggagaggatttagtaatatctttgctatctaaatttacagattataaaaagacctctgttcccagaatttcatatgctgaatccatagagaagtatggatgtgataaacccgatttaaggattcctttgcaattaaaagatattgctgagcttgtaaaagatgaggaatttaaagtattttctggccctgcaaatgatcctgcatctagagtggttgcattgaaagtgccagaggccgcaacaatgacaagaaaaaaaatc

SEQ ID NO: 298000 - DNA, 1397 bp, Unknown
  Bacterial polypeptide expressing nucleotide sequence isolated from the Sargasso Sea
gtatttggacttgcggcgagaagttatgcaacagaacatgacattaaggtctgatgtcgttgcatctattcggaaaagaatgtgggatttgaattttagagaatatcaaacaccaatcataacggcttcgagcccagaaggcgcaagagattttttagtaccgtctaggcttcatcctggtaaattttatgcacttcctcaagccccgcagcagttcaagcagctgataatggtttctgggtttgataaatattttcaaattgctccctgttttagagatgaagatccgcgtgcagatcgctctccaaccgatttttatcagcttgatgtggaaatgagttttgttacccagcaagatgtatttgatacaatctctcccgtgatagcaggagtttttgaagaatttggttccaatcgcaaagtagatgatcctgctgagtggcctcaaattagctatgaagattctgcgaagtggtatggaactgataagcctgacttgagaaatcccataaagatgcaagatgtctctgaacattttagaggttctggttttgcaatatttgctaatttattagagcaagaaggtacagaaattagagccattcctgcacctgccggcggcagtagaaagttttgtgacagaatgaacgcctttgctcaaaaagagggtcttcccggaatgggttatatattctggcgagacaatggtgatgggatggaagctgcgggaccgctcgcaaaaaacattggtcctgagagaacagaagccttgcgtgcccagctagaccttgggacaggggatgccgctttctttttgggcggtaagcctaaaaatttcgaaaaagttgcaggtaaagccagagatgtaattggtgatgagctcaatctgacagatcatgatcgctttgcctttgcatggattgttgattttccaatttatgaaaaagacgaagaaactggcagaatagatttcgagcacaatcctttttcaatgcctcaaggggggatggatgcactagaagctgatcctttgcaggtaaaaggttttcaatatgatttggcatgcaatggttatgaattagtatctggagctatcagaaatcatcggcctgagatcatgttcaaggcatttgaaattgctggctatgacgaacatgaagttaaaaatagatttggcggaatggtaaatgcttttcagtatggggcgccaccccatggtggttgtgctgcaggaattgataggattgtcatgctgttagcagatcagcaaaatattagagaagttattatgttcccaatgaaccagagagctgaagatttaatgatggaagctcctagcgaaccattgccggatcaattaatggaattaaacttgcgagtaattccgcaagaataat

SEQ ID NO: 298001 - DNA, 1006 bp, Unknown
  Bacterial polypeptide expressing nucleotide sequence isolated from the Sargasso Sea
attgaataaatatagaacgcatacctgtggcgaattaactaagctgcataaagaaaaagaaatttctttatctggttggataaataaaaaaagagatcatggaaatcttttatttgtagatttaagagataactttggaattacacaatgtgttatagacaaaagcaatgaaatttttaagaaaattgaaaaactttctttagaaacagtaattaaagttacaggaatagttattgaaagatcagatgaaacaataaataaaaatatttctacaggagaaatagaagtaaaaattgataatatagatattttaggtgaaacaaaagaactgccattgccagttttttctgatcaagaatatgctgaagaaataagacttaaatatagatttctagatttaagaagaaaaaaaatacatcaaaatattattttaagatcaaaagtaatttcttttataagaaatgaaatgcaaaaacttggttttttagaatttcaaactcctatattaacctcgtcaagtccagaaggtgcaagagactttcttgtccctagtagattaaatcctggaaaattttatgctttaccacaagcaccacaacaatttaagcaactcatcatggtatctgggtttgacaaatattttcaaatagcgccatgttttagagatgaggatgcaagagcagacagaagtcctggagaattttatcaattagatgtcgaaatgtcattcgttgaacaagaaaatgtttttgaagtaattgaaaccttatttttaaaattatttaaatctttcagtaacaagaaaatccttcatgaaagatttcctagaattacatatgaagatgcaatgcttaaatatggatcggataaacctgatttaagaaatccattagaaatttcagatttaacaaaaatttttgaaagggaggatgtaaaatttgaaatatttaagaaattagtaaaaaatggctcaatagttagagcactagtcaccaaaaatacaaaa

SEQ ID NO: 298002 - DNA, 481 bp, Unknown
  Bacterial polypeptide expressing nucleotide sequence isolated from the Sargasso Sea
ctatttgaatacagcgaggcagaaaaacgttttgtttcaagtcaccatcctttcaccatgcccaacctcgaagatcttgaagcatatggacagaatcagcccgagcgtattcgctccagggcttatgatatcaccctcaatggagtagaaatcggcggaggtagtatccgtattcatcggggggatattcaggaccaggtttttaaattgttgaaacttgaagcggatgaacttgaaagcaaattcggttttctgatgaaagctctctcctacggagcaccaccccatggcggaattgcccttggctttgaccggatcatgatgtttttactgaataccgaatcgatccgggatgtcattgcctttcccaaaacccaaagggcttcctgcctgatgaccgaggcgccctcgaatgtttccgaggatcagctcgaggaacttcagctcaggatccgtgcttctgcggcaaagcagaactgag

SEQ ID NO: 298003 - DNA, 1756 bp, Unknown
  Bacterial polypeptide expressing nucleotide sequence isolated from the Sargasso Sea
cttgtgtgaagacatcgatcattcagatattggtaaacaggtatctgtatcaggatgggtccatcgaagaagagatcatggcggagtgattttcatagacttaagagatgtctcaggaatattgcaattggtttttgaccccgaaaataaagaactctttactacggcagaaaaaataagaagtgaatttgttttgtctgtaacagggatcataagagagagacctgagggaacagctaatgatcagatgaagaccggagcagttgaattgcttgttgaatcaggagaggttctcaattcttcaaaaacacccccatttcatcatgatgaagcaaccaatgaagatatccgccttaaatacagatatctcgatctcaggcgagaagagatgtcaaagaatattaaaatccgacatgagatcacaaggtcacttagagattatttaaataagtctgcttattttgaaattgaaacaccgatcttaacgaaagcgaccccagaaggtgcaagagactatttggttccaagtagaactcagcaaggcaatttttttgctcttcctcaatcgccacaattatttaagcagctcctaatgatgtcaggatttgaccgttattatcagatcgcaagatgttttagagatgaagatctcagggcggatcgccagccagaatttacccaactcgatgttgaaatgtcatttgttgatcaagacgatgtcaaaagtgagatggaatcaatggttagagaactgtttaagtccgtgctagatgtagatctcgaaaatcaattctcacaaatcacacatgctgaagcaatggatcgctttggctcagacagcccacatttgggtatagaaatggagcttactgaagtcagtgatctcatgaaggatgttgaatttaaagttttcgctggtccagcaaacgatgatgattctagagtcgcatgtcttgttctgaaagattcatctgatttgtccagaaagcaaatcgatgattatactgattttgtctcgaattacggcgcaaaaggtttggcctatattcgagtcaatgagattgaaaagggaattgatggtcttcagtcaccaatacttaaatttttaaatgattctgttatcaatcaactgattgaaaaactctcattggaaaatggtgatacggtgttttttggtgctgataagaaagaaatcgtgaatgcttctctgggtgctcttcgagttaaaatggcagaggatttcgatttaatcaaaaacggatggtttcctctttggataactgactttcctatgtttcattgggatgagaaagaaaaaagatggtcttctgagcatcatccattcacctcaccagtaaatttggatccagaggaactaaaaaataatccaaaagacgcgttatcaaaaggctatgacatggtgctcaatggacatgaaataggtggtggatccattcgtattcattctgaagaaatgcaacaagctgttttttcaatactgggcataaatgaagaagaagcagatgaaaaatttggttttttccttgaggcactaaagtatggatgcccaccacatggtggaattgcatttggaattgaccgaattgtcatgctcatgacaggatcttccagtatcagggatgtgattgcattccctaagacacaaactgcgagttgtctactcactgatgcaccaagccttgctggtaaagcgcaattaaatgaattgggtgtctcagtcaaaaagaaaagctaa

SEQ ID NO: 298004 - DNA, 832 bp, Unknown
  Bacterial polypeptide expressing nucleotide sequence isolated from the Sargasso Sea
atgcataattaccgcacacacaaatgtgatgaactaagatcaaataatattggtgaacaagtacgcctctctggttgggtccataggatcagagatcacggaggtttgttatttatagacttacgtgatcattatggtgttactcaatgtgttgttgaaccaggaatggaagcattttcagtcgctgaaaaagttagatctgagtgggttgtttgtctaacagggacagttaaagctcgaatggacgaaacaatcaatgtagataaatcgatttcgtctctacctaccggcgatattgagcttttcataaacgagattgagatactatcaaaatctgaagaattgccactacctatctttggagaacccgattaccctgaagacattagattgaaatataggtttctggatttaagacgagaaactatacataacaatattgtattgcgctcaaaaataattcaatcaattagaaaaagaatgctcgatgctaatttcaatgaataccaaacaccaattctgacagcttctagcccggaaggggcacgggatttcctcgtgccatcgcggatgcatccgggaaagttttacgccttacctcaagcgccacagcaattcaaacagcttattatgatggcgggctttgatcgctattttcaaattgccccatgcttcagagatgaggatgctagggcagatagatcgccaggtgaattttatcaattggatgtagagatgagctttgtaacacaagatgatgtatttaatgctatcgaacctgtcctattaggcgtttttggagaattttctggtagcatgacggttgataaag

SEQ ID NO: 298005 - DNA, 955 bp, Unknown
  Bacterial polypeptide expressing nucleotide sequence isolated from the Sargasso Sea
acatatgaggatgcaatgcttaaatacgggtcagataaaccagatttaagaaatcctttagaaatttcagatttaacaattatttttgaaagagaagatgtaaaatttgatatttttaaaaaattagtgaaaaatggctcactagttagagccttagttaccaaaaatacaaaggataaacctagaagtttctttgatagtattgatagatgggcaaaagagcaaggttcatctggtctagcttattttacattagaaaaagatgataaaattaatgccaaaggaccaattggaaaatttttttcagagaatgcattattagaaatcatgaaactaacaaatgcaaatataggtgatacagtatttctttcttgtggaaagaaaagtgatgtagagaaaatattaagtgttgcaagaaataaaatagctgaagatttaaatttaattgataatgaaacattttcattttgttggattattgactatccaatgtatgagattgatgaaactactaaaaaaataaaatttagtcataatccattctcaatgcctcaaggtgaaataaataaattagacttatctaatcctttaaatattaaagcttatcaatatgatattgtttgcaatgggattgagttatcatcaggtgctattaggaaccatgttcctgaattaatgtataaattatttgaaattgcaggatattcaaaaaatgatgttaatagtaaatttagtggaatgataaatgcattgagctatggggcaccaccccatggaggcatagctccaggtattgatagaattgttatgcttttggcaaatgaaaaaaacatacgagaagttactatgttcccaatgaaccagaatgcacaagatttgatgatgagtgctccgtctgaaatttcagatgatcaattaaaagagttaaatttaactattaaaaagaaaaaataat

SEQ ID NO: 298006 - DNA, 1756 bp, Unknown
  Bacterial polypeptide expressing nucleotide sequence isolated from the Sargasso Sea
atgcgaactcattattgcggtgaagtaaagaaaacggaggtcggacaagaagttgaggtctgcggttgggtgcacagaaggcgtgatcatggaggtgtgatctttttggatgtgcgagatagatctggaatagttcaggtcgtttatgaccctgataccgaggatagttttgcgaccgctgatcgagtgcgtaatgaatttgtcttgagggcgaagggtttggttcgagatcgtcctgacggaactgtgaacccggagatggcgacgggtgaagttgagatattaggtagccaactggaaattcttaatgccgcgctgacaccaccttttcagttagatgagtattcggaggcaggggaggatgttcgtctgaagtatcgttacatggatttgagacgtcccgaaatgcaggaaaagttgaaggtcagagcccagatcaccagtgcgataagatcagtactggaggaagagaattttctggaagtggaaaccccaaccctttccaagtcgacgcctgaaggagccagagattacttggtgcccagtagaacttatcccggacagttttttgctctccctcagtcaccacagatttataaacagcttttgatgatgtctggcctggatagatattaccaagtagctcgctgctaccgagatgaagatctcagagctgatagacaaccagagttcacgcagatagatatagaggcttcttttatcaccgcccatgatgtaatggcgttaacagagactatgctaaaaaaagtttttcagagggtgttaaacgtcgaacttgaagactttccagttctcagttgggaagaagcgatgagggattatggcagtgatcgtcctgacctgagaaatcctttgaaattgaaagacgtagcagatttgatgcgagaggttgatttcaaagtgtttagtgggcctgcaaatgaccaagatagtcgagtcgttgctttgttagcgccaggcggtggaaagctctctcgaaaggtgattgatgactacacgaaatttgtcggagtatatggtgctaaaggactggcatatataaaggtcaacaagaaatccgacggaatcgaaggcttgcagtcgccaattctcaaattcattcccgaaaaaacggttgagtcgttgttagagagagttggagccagcgatggagatattgtcttttttggagctgataaaactaagacggtaaatgacgcgatgggagcgctacgtcagaaattagctgaagatttagagattattgatttaggttttgcaccttgctgggtggttgatttccctatgttttcttcgtcacgcgaagggctcgcagcggaacatcacccttttacgcgaccgacttcatcggttgaggacttattggctgatcctatctcagctaaagcggaagcctacgacgtgatactcaatggttatgagctaggtggtggatcgttaaggattcacgatcaagaaatacaacaagctgtatttaagttattaggtatggatgaaaatgaagtgcaatcaaagtttggatttcttctagacgcactaaaatttggatgtccgcctcatggaggtattgctttgggcttagatcgaattgtcatgcttatgaccgacagtccttctattagagatgtaattgctttccccaaaactcaaagtgcctcttgtttgatgatggcggctccgggagaggtagacgaaaaacaactcaaagagctaagcatccgccttcggtcataat

SEQ ID NO: 298007 - DNA, 499 bp, Unknown
  Bacterial polypeptide expressing nucleotide sequence isolated from the Sargasso Sea
atgtttttttcattttgttgggtagttgactatccaatgtttgaaatagatgaaaatacaaaaaagatcgaatttagtcacaatcctttttctatgccgcaaggggacactgataatttggatctttcagaacccctgaaactaaaagcttttcaatatgatattgtatgtaacggaattgaattgtcttcaggagctatcaggaaccataaacctgatttaatgtataaattatttgaaatcgctggctattctaaggaagaagtggatgaaaagtttagcggtatgattaatgctttaagctatggcgcacctccgcatgggggcattgcacccggaatagatagaatcgtgatgttattagcagaagaaaaaaatattagagaggtgactatgtttccaatgaaccaaaacgcacaagatttaatgatgaatgcaccatctgaagtagacgaaaatcaactaaaagaactttatatttcaaaaagaaaaaaataat

SEQ ID NO: 298008 - DNA, 1315 bp, Unknown
  Bacterial polypeptide expressing nucleotide sequence isolated from the Sargasso Sea
ttgagtaaatataggacacatacttgtggagaactaactttaaataacaaagatcaaacaataaagttatcaggctggataaataagaaaagagatcatggaaatctattatttttagatttgagagatcactatggactaactcagtgtgtgattgatgagggtaaaaaaattttcaaagaaatagaaaaacttccattagaaactgtactacaagttgaaggtaaagttttagctagagaaaaagatacaattaacaaaaatttaaatactggagaaattgaggtaggaattgaaaaatttaaaattcttgcaaggactaaggaattaccactacctgttttttcagatcaagaatattctgaagaaattagattaaaatacagattcttagatttaaggagaaacaaaattcataataatattattttaagatccaaaattatttcatttattagatctgaaatgcaaaaatatggttttctagaatatcaaacacctatattaacttcatctagcccagagggtgctagagactttttagtaccaagcagattaaatcctggtaaattttatgctttacctcaagcgccacaacaatttaaacaattaatcatggtatctggttttgataaatattttcaaattgcaccgtgttttagagacgaggacgcaagagcggacagaagtccaggtgagttttatcaacttgacttggaaatgtcttttgtagaacaagaagatgtattcaaaatagttgaggagttatttgtaaatttattcaaaaaattttcctctaaaaagttactccatgaaaaatttcccagaattccttttgatagggctatgcttaaatatggttctgacaaaccagatttgagaaatcctttagaaatagcagatatcactgaaatttttaaaagagatgatgttaactttgaaatatttaaaaaattagtaagtaaaggatcgatagttagaggaatagttgcaaaaaatacatctgaaaagccaagaagtttttttgacggaattgataaatgggcaaaagatgaaggatcgtcgggtcttgcttatttttctatagaaaattctgataaattgagcgcaaaaggacctgtgggaaaatttttttctgacaaatcccttgaagagataatgataaaaatgaatgctgaaataggcgacacaatatttatgtcttgtggaaataaatctgaagttgagaaattattaagtaatgcgagaagtaaaatagcaaatgaattaaacttaattgacgaaaatgtttttttcattttgttgggtagttgac

SEQ ID NO: 298009 - DNA, 892 bp, Unknown
  Bacterial polypeptide expressing nucleotide sequence isolated from the Sargasso Sea
cccgacactagatttgaaatgcatttggttgaagtaaaaagccataccgatcaatctgaatttaatgcatttaagtcatccccttatgttaaggcagttgtcgttaaatcgggagctaagtattctagaaaaaatattgatgattataccgattatgtcaagaaatacaaagccaaaggtttagcgtggatgaagatggagtctgatgaacttgtagggggcatttcaaaattctttgataacgctattcagaaagatctaattcaatctgccaacatagaagatggcgatattatctttttaattggagatgaaaaagaagttgtgctaaccgcgcttggcgctctgagagtattaattggcaaggaggaaggattgtgcgatccaacaaaattcaaccctgtttggataactgattttcctatgtttgaatttgatagtgattctaataggtatgttgcaagacatcatcctttcacagcgccatcatcttctgatataaaagaccttgattcagatccatcgtcattaaaatcgcgaggttatgaccttaccatgaatggctatgaaatagcaggagggtcaattagaaatcatcagccagattttcaatcaaaaatctttgaattattaggcatggataaaaaagaaatcaattcaaggtttggatttttagttgatgctctaaaatatggaacgcctccgcatggtggcattgcttttggctttgatagattaattatgattttatcaggatcgagcaatatccgagatgttattgcatttccaaaaaccacatcagcatcttcattgatggatgaatctcccagctctgtatccactgagcaattatttgatttaaacattaatataattgataaaaagaaataat

SEQ ID NO: 298010 - DNA, 566 bp, Unknown
  Bacterial polypeptide expressing nucleotide sequence isolated from the Sargasso Sea
cgacgcgatgggcgcgctgcgtctgaaactgggtaaagacctgaacattaccgacgaagccaaatgggcgccgctgtgggttatcgacttcccaatgtttgaagacgatggtgaaggcggactgaccgcaatgcaccacccgttcaccgcgccgaaagatatgacagctgctgagctgaaagctgcgccggaagacgcggttgctaacgcatacgatatggttatcaacggctacgaagtgggcggcggttccgtgcgtattcacaacggcgacatgcagcagaccgtattcggtattctgggcattaacgagcaagagcagcgtgagaaattcggcttcctgctggatgcgctaaaatatggtacaccaccgcatgcgggcctggcgtttggtctggaccgtctgactatgctgctgaccggtactgacaacattcgtgacgttattgctttcccgaaaaccactgctgcagcgtgtctgatgactgaagcgccgagctttgccaacgaagctgcgctggcggaactgagcattcaggttgttaagaaggccgagaataactgat

SEQ ID NO: 298011 - DNA, 1777 bp, Unknown
  Bacterial polypeptide expressing nucleotide sequence isolated from the Sargasso Sea
gatgcgcagtcattattgtggagacgtcaataagtctcacgttggacaagaagttaccttggtaggttgggttaatcgtagccgtgatttgggtggcgtagtctttttagatttaagagacagagaaggtctggtccaagtggtttacgatccagatttacctgaagtgttcaatgtggctagcacactgcgcgctgagttttgtgtgcaggtaaaaggcgtggttcgtgcacgtcctgatagccaagttaacgcacaaatgaaaactggcgaaattgaagtgttgggtaaagcactaactattatcaacagttctgagccactgccgctgagcttagataactatcaaaacaacagtgaagaacagcgtttaaaatatcgttatttagatttacgtcgcccagaaatggcacagcggttaatgttccgcgcgaaagtgaccagtgctgtgcgtcgtttcctcgactcaaacggtttcttagatattgaaacgccgatcctgaccaaggcaaccccagaaggtgcccgtgactatttagtgccgagccgtacatataaaggtcaatttttcgcactgccacaatcaccacagctatttaaacagctgctgatgatgtcaggctttgaccgttactatcaaatcgtaaaatgcttccgtgacgaagatttacgtgctgatcgtcagccagaatttactcaaatcgatatcgaaacgtctttcatgagctcagagcaagtgatggcgaaaaccgaagagatgatgcgtggtctgttccttgagatgctgaatgtcgatttaggcgaattcccgcgcatgacctacaacgaagccatgcgtcgttttggttcagacaagcccgatttacgtaacccattagagctggtggacgtggctgacttgctcaaagaagtagagtttgcggtattctcaggtccagccaatgatgaagaaggccgtgttgcggcgctgcgtattcctggcggtgcaagcctgtctcgtaagcaaatcgacgattacactaagtttgttggcatctacggcgccaagggcttagcgtggatgaagctaaacgaccttactcaaggcctagaaggcattcaatcgcctgtgcttaagttcttgaatgagaacattgttaacgaaatcatcagccgcactggcgcacaaacgggcgatattattctgtttggtgctgatcaagcgactgtggttgccgaatctatgggcgcactgcgtcttaaagccggtgaagactttaatctgcttgaaggtcaatggcgtccattgtgggtggttgacttcccaatgtttgagaagatcaacggcagcttccacgcggttcaccatccatttaccgctccgcgcggcgtgacacctctagagctagaagccaatcctgctaaccgtgtgtcagatgcctacgacatggtattaaacggctgtgaattaggtggtggttcggtacgtatccacaaccaagagatgcagtctgcggtattccgcattcttggcattaccgatgaagaagcgaaagagaaattcggcttcttactcgaagcgttacgttacggtacgccaccacatgcaggtttagcctttggtttagaccgcatcatcatgctgatgacgggcgcaagctcaatccgtgatgtgatggcattcccgaaaaccaccacagcggcgtgcccgttaaccaatgcgccaggttttgctaatccacaacaattagctgaactaggtatttccgtggtgaaagccgcgaagactgaagactaa

SEQ ID NO: 298012 - DNA, 1666 bp, Unknown
  Bacterial polypeptide expressing nucleotide sequence isolated from the Sargasso Sea
atgaaaagaacacataaatgtaatcaagttaccgaggacctaataggtcaagagatttctgtaactggctggattcatagaagaagggatcatggtggtgtcattttctttgatttaagggatgaagatggtcttgttcaggttgtttataaccctgaatcagaaaatactttctcattagctgaaacttgcagaaataaatacgtaatactctctaaaggcttggttagagagagacccgaaggcactgaaaatagtaatttagtaactggtaaagtggaaatagttgcttctgaattagaagttttaaactcttccttaccaattccttttcagttagatgaatatacttcagttggtgaagaaactcgtttgaaatatagatttcttgatttaagaagaccagaaatgcagcaaaatcttaggctgagatcaaaagtttcgtctgtctttagaagttttttggataaccaggattttgtcgaaattgagacgcctttattaacaaaagccactcctgaaggagcaagagactatttggtgcccagtagaacatttccgggacagttttttgcacttcctcagtcacctcagcttttcaaacaaactcttatggcttcaggtttcgaaaagtattttcaatttgcaaaatgttttagagacgaagatttgcgagctgatagacaacctgagttcactcaactggatattgagttgtcatttgcagactcagaagaggtgattacattaattactgagatgattaaacaagtcttcaaagaaaccttatcggttgatttaggtgattttcctaaaattccctatcaagaagccatatcaaaatatggaatagacaaaccagacttaagaaacccgcttgaattaattgaagtaaaagacctatttcttgattgtgattttaaagtctttaatgaacctgcaaatgattcaaactcaagaattgctgctttgcgggtccctaatggaaagctcttaacaagaaaacaaatcgacgactatactgactttgtaggtaattatggtgcaaaaggtttagcttacatacgtgtagaagatccatctaaaggcaaagaaggtttgcagtctccaattataaaatttattgaagactcaatcatcgattctcttttaaaggttctagacgttaaagaaggcgatattattttcttcggggctggtaaaaataatgtagttaatgattcattagccgccttgagagacttagttgccaaagaccttgatcttttgacatgtgaatgggcaccttgctgggttgtagatttcccaatgtttgaaaaaaataaatctggagaattaacaccacttcatcatccttttacagcacctagttgttccatagaagagctaaaaaaagatccattatcagcattaactgaagcttacgatgtggttttgaatgggaccgagttgggtggaggttcagtcagaatccatgacaaagaaatgcaaaaagcagtattggagctcttgaatatagaagatcaagaagccgaagagaagtttggttttcttatatctgctcttcagcacggttgtcctcctcatgcaggacttgccattggtttcgataggatgattatgcttatgacggattcagaatcaataagagatgtcatagcctttc

SEQ ID NO: 298013 - DNA, 713 bp, Unknown
  Bacterial polypeptide expressing nucleotide sequence isolated from the Sargasso Sea
ttctaaattagatattaaagatgttaagtctcctattgccaaatttttgagtgctgaacatgttatagagatattcagtatctttggcgcatctgaaagcgatattatatttatttctgctggcgaaaacgacaaagttaatgaatgtttaggctcgcttagaaataagttagcaaaagatttggaactaatagatgagaataaaattaattttctatttgttactaatttcccgttatttgagtttgataaagaatcaggccaatggctagctatgcatcatgtattttcttccccaaccaaagaaacagaagaatttatggattctgatccaagcaaggtgataggaaatctttttgatttagtttgcaatggggtagagctgggatcaggaagtataagaatacataatagaaaaacgcaagaaaaagttttctcaataattggttattcgaaatctgaagtagaggacagatttggcccccttcttgaatcattcgaatatggtgctccacctcatggaggcatgggattaggtattgataggttagttgcattattttctaacgaagaatcaataagagatgtaatttcatttccaaaaacccaaagtgcctctgatttattatggggtgcaccttccttaatagaagagaaacaaaagaaggaactaaatatcaagagtataaatcaagaaaaggataaaaattgaa

SEQ ID NO: 298014 - DNA, 1189 bp, Unknown
  Bacterial polypeptide expressing nucleotide sequence isolated from the Sargasso Sea
tttgccacagtccccacaattatttaaacagatgctaatgatttctggatttgataggtattatcaaattgcaagatgttttagagatgaagatctaagagctgatcgacaaccagaattttctcagattgatatagaagcctcttttgtagaagaaaatgatgtaatgaaaatatcagaaggcatggttaagcatgcttttaaagaagtgctcaattttgaaataaaagaaattccaaaaataaattggtctgatgccatggagcactatggttcagataagccagacttgagaaacccgctaagactagttgaaataggtgaaattttcaaagaagaagaatttaaagttttctcagatcctgcaaatgatccagagtctagaatcgcagccttagtaattgaaaatggagatagtgtagggagaggtcaagttgataggtatacagattttgtaaaagaatttggcgctaaaggtttggcatacattagggtagaagaagccgatatatctggattaaattctccaattcttaaatacttgtcagaaaaatgtttaaaaagcattttaaaagatttaaatcttaaaaaggggtctttagttttctttggagctggtgataagaagacggttaatgactatatgagcaaacttatttctagagtcggcgatgatcttaatctactagaagatggctataaattttgctgggtaactgattttccaatgtttgaaaaatctgcagatggaaatttaacttccttacatcatccattcactagtcctgaagaagaagaccctaaaaaattagcaaagatagatcctttagatatgaattcaagagcttacgatatggttgttaatggaattgagattggtggcggatcaattcgtattcacagaaatgaagttcaagaacaaattttttcaattctaggattaacagaagatgaagcgaatgagaaatttggtttctttataagagctttaaaaacaggttgtcctcctcatggtggaatagcttttggtcttgataggcttgcaatgattatgactggttctgactctattagagatgttatagcgtttccaaaaactcaatcagcgctttgccttcttactgaagcgcctgggtcagttccagatgaaagtctagaagaactaaaaatagaaaggaaagaagattaa

SEQ ID NO: 298015 - DNA, 1598 bp, Unknown
  Bacterial polypeptide expressing nucleotide sequence isolated from the Sargasso Sea
tatgcgtactcattattgtggtgaattaaacagcggtcacatcgatcaagagattgagctttgtggttgggtgcaccgtcgaagagatcatgggggtgttatatttcttgatcttcgcgatcgtgagggattaagtcagattgtattcaacccagatcaccctgaaccgtttgcgattgctgactctgttaggaatgaattcgtaataaaaatagctggtaaagttagagttcgcccagagggttcagtaaaccccgatttaccaacgggtgaaattgaagtcgttgggcacaagatagagattttgaataaatcaaaaacaccgcccatccaaatggatgacgaggatgtgcatgaagatataaaacttcgttatcgatacatcgatttacgccgtcctttaatgcaaaaaaatcttcaattaagatcaaaaattgttaaagagatgagagcctttctagataataaaggttttcttgatattgaaacaccaatgctaactaaagcaacaccggaaggcgcgcgtgactatcttgtccccagtcgtacgcagcctggtaatttttttgcattgccacaatcaccacaattgtttaaacaattattaatggtatctggtatggatcgctattatcagatagtgcgatgttttcgtgatgaagatttacgtgctgaccggcaacctgaatttacgcaacttgatattgaaacatcttttttaaatgaagatgatattaccaatatcatggaagaaatgattagcttgctttttaaaaatattctgaacatagagttaccatcgcctttcccatgcttgagttataaaaatgcgatggatcgatttggtagtgatagacctgatttgagaaatccacttgaattaatcgatgttggcgacctaatgaaagaagtagattttaaagttttctccggtcctgcaaatatggaagatggtcgagttgcagcattaaatgtcccgagtggtagttcgcttacccgtaaagaaattgatgattacactgccttcgttagtcaatatggtgccaaagggcttgcgtatataaaagtcaatgatattgagtccggactcgaaggactgcaatcacctatattgaagtttcttccggatgaggtggtaagtaaaattattgaacgaactaaatcagctaatggagatttaatattttttggtgctgataaaaccaaaattgttaatgattctttgggctcacttcgaaataaactaggtcatgatttaaaactcataaaaaatgaatgggcgccagtctgggtcaaagatttccctatgttcgaatacaatgaggatgagaagcgttgggaatcactccatcatccatttacttcgccggaagtagaggatattgaatcaataaaaaaagatccaaaaaatactatttcacgagcatacgatttagtaatgaatggttttgagcttggaggaggttcaattcgtattcataacgctaagatgcaaaaagcagttttggaactgcttggtataagtagcgatgaagcaaatgaaaagtttggttttttgctcgacgcactcgaatacggatgtccaccacatggtggga

SEQ ID NO: 298016 - DNA, 1543 bp, Unknown
  Bacterial polypeptide expressing nucleotide sequence isolated from the Sargasso Sea
gatgagatctgaatactgcggtctggtgaccgaagaactgctgggccaatctgtctcgctgtgcggctgggtaagccgccgccgcgaccatggcggcgtcatcttcatcgacctgcgcgaccgcgaaggcctggtccaggtcgtctgcgatccggatcgcgcggaaatgttcaagacggccgaaggcgtgcgcaacgagttctgcctgcagatcaagggcgtggtccgtgctcgtccggaaggcaccacgaacgcttcgctcaagagcggcaagatcgaagtgctgtgccacgagctgatcgtgctgaacccgtcgatcacgccgccgttccagctcgacgacgacaacctgtcggaaaccacgcgcctcacgcaccgtgtgctcgacctgcgccgtccgcagatgcagcacaacctgcgtctgcgttaccgcgtcgcgatcgaagtgcgcaagtacctcgattcgctgggttttatcgacatcgaaacgccgatgctcaccaagagcacgccggaaggcgcgcgcgactacctcgtgccgtcgcgcaccaacccgggccagttcttcgcgctgccgcagtcgccgcaactgttcaagcagttgctgatggtggcgaacttcgatcgctactaccagatcgtcaagtgcttccgcgacgaagacctgcgtgccgaccgccagccggaattcacgcagatcgactgcgaaacctcgttcctgtcggaacaggaaattcgcgatctgttcgaagcgatgattcgtcacgttttcaaggaaacgatcggcgtcgaactggacgagaaattcccggtcatggagtactcggaagccatgcgccgctttggttcggacaagcctgacctgcgcgtgaagctcgaattcaccgacttgacggatgcggtcaaagacgtcgacttcaaggtgttcagcacgccggccaacacgaaagacggccgcgtcgcggcgattcgcgtgccgaagggcggcgaactctcgcgcggcgacatcgacagctacacggaattcgtgcgtatctacggcgcgaagggtctcgcgtggatcaaggtcaacgaagtggcaaagggccgtgacggtctgcagagcccgatcgtcaagaacctgcacgacgaagcggtcaaggcgatcatcgagcgcaccggcgcgcaagacggcgacatcatcttcttcgcggcggatcgcgcgaaagtggtgaacgacagcctgggcgcactgcgtctgaagatcggtcattcggaattcggcaaggccaacggtctggtcgaatccggctggaagccgctgtgggtgatcgacttcccgatgttcgagtacgacgaggaagacaaccgttacgtcgccgcgcatcacccgttcacgagcccgaaagacgagcacctcgagtatctggaaacggatccggcgcgctgtctcgccaaggcttacgacatggtgttgaacggctgggaaatcggcggcggttcggtgcgtatccaccgtgaagaagtgcagagcaaggtgttccgcgcgctgaagatcggtgcg

SEQ ID NO: 298017 - DNA, 1762 bp, Unknown
  Bacterial polypeptide expressing nucleotide sequence isolated from the Sargasso Sea
aatgaatagaacatactgcggaagtgttgataataaagctatcaataacaatctagtagttaatgggtgggtcaacacacgaagagatcacggcggtgtaatttttattgatttgagagatcatactggtattcttcaagtcgttttcaatcctgataataagaaagtatttgagcaggcccaaaaccttagaacagaatatgttcttgaaataaaaggtaacattaaaaaaagactcgatggtacagtcaacaaagaaatgctaacgggtgaagttgaattaatagctgatgaattagtaatacttaatacttcaaaaactcctccatttaaaataaatgataaacaaactaatgaggaccttaggttacaatatagatatatcgatcttcgtggatcgaaaatgcaagatactcttagatttagatctaaactttataacataattcgtaatcatcttagtgaaaatgaatttaatgagatagaaactcctatattaacaaaacctacgccagagggcgctagggattacatagtaccgagtcgtgtacataaatccaacttttttgcactaccacaatcaccacaattatttaaacagatgttaatgatctcagggcttgataaatattttcaaattgcaaaatgttttcgtgatgaagatttaagagcagatagacaaccagagttcactcaattggatatcgaatgttctttctacaatgaggagcaagttatggaattatctgaatctctcatgaataaaatattttcatcacttattcaagagaatataaaactagattacccaaggatgacttacaaagaatctatgaataaatatggatgtgacaaaccagatttaagaaatcctctgatattaaatgatataacaactatatttacaaatacggaatttaaagtctttaaagactgtagtaatgattctaaaaaaagaatagtagcacttaatgttcctggtggaagtcaaatgagcaggaaaaatattgatgaatatacagaattagtaaaaacttttggagcgaaaggtctagcatattttaagatagataatattgacgatattgaatctggagtgaactcacctataaaaaaattccttaacataaatgaaatacaaaatattctacagatagttaaacctaagtctggtgatctaatattcttctcagcagatacacttgatatcgtcaatagctctatgtctacgcttatatcaagaattggtaaagatcttgatttagtctctaatgattttaaattcctgtggataattgattatccaatgtttgaatatgaaaaaaacagcaatcaactaacatcacttcatcatccttttacatcaccatctgatgatggggcaccaaattttagtgataagacactatcaagagcatatgaccttactcttaatgggaatgagataggtggaggttctgtacgtatacacaaaaaatctcttcaaatggatgttttcaaagcacttaatcttacaaacgaagatattgataataaatttggtttttttttagaggcacttgaatatggttgcccgcctcatgcaggtatagcttttggcttagataggattgtaatgattttgaaaaatcttacctcaataagggatactattgcatttcctaaaacacaatcatctgcttgtcttttgactgatgctcctacagagattgattctgatcagctgagagaattaagcattaaaataaataaacctaaataa

SEQ ID NO: 298018 - DNA, 1517 bp, Unknown
  Bacterial polypeptide expressing nucleotide sequence isolated from the Sargasso Sea
cattaacaaaaatcttcaaacaggtgaaattgaaataaagattcaagattacaaaattttatctaaatctgaaattcttcctttacctgttaattctgatatcgaatatggagaagagataagactaaaatatagatttttagatttaagaagaaataaactacacaaaaacattatattaagaagtaaaataatatcagacattagaaagaaaatgatagatagaaactttgttgaattccaaactcccatccttacttcatcatctcctgaaggagcaagagattatttagtcccatctagaatacatcagggcaaattttatgctcttcctcaagcacctcagcaatttaaacaattattaatgattgctggttttgataaatattttcaaattgcgccatgttttagagatgaagatagtagagcagatcgctcaccgggtgaattctatcaactagactttgaaatgagttttgtaactcaagaagatgtctttgatgctattgagccagttttatttgaaatatttgatgaaaataagaaaaataatgagataaaggtgagcccgtatccatttaggagaataccttacaaggagtcaatggaattttacggttctgataagcctgatttacgaaatccacttgttatagatgattatacaaatgtatttaaaggttcaaattttaaaatatttagtaatcaaatagaaaaaggatcagttgttaagggaataattgttaaaaatactggcgatcaacctagaagtttctttgataaattaaacaattgggcaagagaagagggtgcagctggattaggctatatttcatttacagaaaatagtttcaaaggtcccattgcaaagaatttaaatgaagatcaattattattattaaaacttgaagaaaatgactcaatatttttcatttgtgataaattaaaagatgctcaattattttctggtaaagtaagagaaaaaatttgtaatgatttaaatttacttaataaaaattcttttgaattttgttggatagttgattttccaatgtatgaaattgatgaaaaaactaataaaatacaatttagtcataatcctttttcaatgcctcaaggtgaaatggaagctttagaaaaaaaagatcctcttgatataaaagcatttcaatacgatattgtgtgtaatggtgtagagttatcttctggcgcaattagaaaccataaaccagaaattatgtataaagcctttgatatagctgggtattcgagaaaagatttagaggaaaaattttcaggaatgcttaatgcacttaagtttggagcacctcctcacggaggtagtgcaccaggtattgatagaattgttatgttacttgctgatgagccaaacattagagaagtaatagcatttccaatgaatcaacaagctatggatttaatgatggacgcccctgcaagtatcgataaagaaagattagaagaattaggtattaaattaatagataaaaattaat

SEQ ID NO: 298019 - DNA, 1023 bp, Unknown
  Bacterial polypeptide expressing nucleotide sequence isolated from the Sargasso Sea
aatgagaactaaatactgtgggaatgtaactaaagaacatttaggaaaagatgtttcaatatgtggttgggtccatcgaaggcgagaccatggtggagttatttttcttgatgttagagatctcgagggtatttgtcaggcagttatcgatccatccaacgaagaggcattttctcttgcagataaatgcagaagcgagtttgttattcagattaaaggaagtgtacgtgagagacctgagggcactgttaactctaaaatgaagactggggagattgaaatagaagtcagcggattagagattttaaactctgctgcaacaccagcatttccactagatgattaccaagatgttaatgaggatgttagattaaaaaatagaatcatagatttaagaagacccgaaatgaataataggattcttaaaagatctaaaattgtatctgccattagaaattttttagaaggaagaagcttcaatgaaatagaaactccaatactcacaagagctactcctgaaggagcaagggactatattttgccaagtcgtgttcaccctggaagcttttacgctcttccccagtctcctcaactttttaagcaaatgctcatgatggggggaatggacagatactatcaagttgcaagatgttttagagatgaagatctaagagcagacagacagcctgaatttactcagattgatatagaagcttcttttgttgaggagaaagatattattgagcttggcacaagcttactaaagcttctgcttaaagattttgcaaattacaatatagataatattgacgaacttgattatgaggatgctattaataaatacggctcagacaagcctgatctgagaatacctcttgagttgatagatatttctgatgaagctaaaaaggaggaatttaaagttttctctgatcctgcaaaaaatgatggatcaagagttgttgctttaaaagtagacggaggaaataaactaacaagatctcaaatagatgaatatacaaa

SEQ ID NO: 298020 - DNA, 1096 bp, Unknown
  Bacterial polypeptide expressing nucleotide sequence isolated from the Sargasso Sea
atgagaactgaatactgtgggaatgtaactaaagaacatttaggaaaagatgtttcaatatgtggttgggtccatcgaaggcgagaccatggtggcgttatttttctcgatataagagatcttgagggtatttgtcaggcagttatcgatccatccaacgaagaggcattttcccttgcagataaatgtagaagcgagtttgttattaagataaaaggaagtgtccgtgagcgacctgagggcactgttaactctaaaatgaagactggggagattgaaatagaagtaagcgaattagaggttttaaactctgctgcaacaccagcattcccactagatgattaccaagatgttaatgaggatgttcgattaaaaaatagaatcctagatttaagaagacctgaaatgaataataggattcttaaaagatctaaaattgtatctaccataagaaattttttagaaggcagaagcttcaatgaaatagaaactccaatactcacaagagcaactcctgaaggagcaagggactatattttgccaagtcgtgttcaccccggaagcttttacgctcttcctcagtctcctcaactttttaagcaaatgctcatgatgggaggaatggacagatactatcaagttgcaagatgttttagagatgaagatctaagagcagacagacagcctgaatttactcagattgatatagaagcatcttttgttgaggagaaagatatcattgagcttggctcaagcttactaaagcttctgcttaaagattttgcaaatcacaacatagataatattgatgaacttgactatgcggatgctattaataaatacggctcagacaaacctgatctaagaatacctcttgagttgatagagatttctgatgaagctaaaaaggaggaatttaaagttttctctgatcctgcaaaaaatgatggatcaagagttgttgctttaaaagtagatggaggaaataaacttacaagatctcaaatagatgaatatacaaattttgtaggtaaattgggagcaaaagggcttgcttacataaaaattaatgacacttctgacatcgaagatgact

SEQ ID NO: 298021 - DNA, 1768 bp, Unknown
  Bacterial polypeptide expressing nucleotide sequence isolated from the Sargasso Sea
atgaaatctcattattgcggtgaaataacatcctcaaatcttaaagaagaagtaacaatctgtggttggattcatagaagaagagatcatggtggcgtaattttccttgatgtaagagatataaaaggtatatgccaagctgtagtgaaccctgataatgaaaaatcttttaaattagccgaatcaataagaaatgaatatgttgtccaaataaaaggtggtgttcgcaaaaggctagaaggaacaattaataaaaatatgcacacaggcgaaattgaaatcgaagtaaaagatttaattattctaagcaaagcgagcactcctgtatttccaattgatgaatatcaagaagtaaatgaggacgttaggttaaaaaatagagttttggatctaagaagaccagaaatgaatgagagaataataactaggtcaaaaattacttccttaattaggaattatctagataaaaatgatttccatgaaattgaaacacctatattgacaaaagctactccagaaggggccagagactatattttgcctagcagagttcaacctggaagtttttatgctttaccccaatcacctcagctctttaaacaacttttaatgataggcggcctcgataagtattatcagatagcaagatgttttagagatgaagatttaagggctgatagacagccagagttcacccaaatagatattgaagcatcatttattgatcaagatgaaataatgaagattagtgaaaaaatgatcaaagatatcattaaagagttttgtggtgacaaactagaaaagtttgaagtaattaattggcatgatgctatgcgggattatgggtgtgacaaacctgatttaagaatacctcttaaattggttgatatatctgaaatagttaaagatgaagaatttaaagttttttctgaaccagcaaagaaaaaaggatcaagagtggttgccctcaaagtacctaatggcaattcattatctagaggacaaattgatgactatacaaaatttgtttcaaagcttggcgcaaaaggattggcttatataaagataaatgatgtgagcgatctagaaaatggtattcaatcaccaatactaaagtttttaaaaccagaaacggtagcaaacataattaaatctttagaaatcaaaactgacgatttaattttctttggagctggcattgaatcagtcgtaaatctatcaatgagcagtttgattaaaaaacttggggaagatttagatttatatttgaccaaatgggcgccttgttggattgtagattttccaatgtttgaaaccaataaagaaggtgatttaacaccgctccatcatccgttcacacttccaaaatgctcaactaaagatttagaagataatcctaaggattcaattgctcatgcttatgatgttgttttaaacggatatgaaataggaggaggctccttgagaatatatgacaatgcaatgcaaaaaattatttttaatgttcttaatatttcaaaagaagatgctgaaagtaaatttggattcttattaaaagctctttcatctggttgtcctcctcatggaggaatagcatttggtctagatagaatagttatgctagttactgatactactaatataagagacgtaattgctttccctaaaacacagagtgctgcctgtttgctaacagatgcaccaagtaaagttgaaaaagatcaactcgatgaattaaaaattattagcacacacaaggaagaataat

SEQ ID NO: 298022 - DNA, 1009 bp, Unknown
  Bacterial polypeptide expressing nucleotide sequence isolated from the Sargasso Sea
aatgagtaaaagaaaatattgtggggatctaagcgagagccatattggtgaaattattactttgtatggatgggtcaacaaggtaagagatcatggcggtgtaatttttgttgatttaagagatactaaaggagttactcaagtagtatttaatcctgaggaaaaagaaatatttaatatttctgagcgactaagaaatgaatttattataaaaatatcaggtaaagtaagagcaagaccgcaagatgcagagaataaaaatcttagctcaggatctgtagaaattgttgctactgaaatagaaatattatcagaggcacaaaccccaccttattcatttgatgatgatgttagtgaggatgttaggttaaagcataggtttcacgatctaaaatctaaaaaaatgcaaaaaaacataatctttcgttcagaacttattaaggtcattagagattttttatatgacaaaggttttatagatatagaaactcctattctcacaaaagctactcccgagggtgcaagggattttctagtgccaagtagactaaataagggagatttctatgcacttccacaatctccacaattgtttaaacaacttttaatgatgtcaggttttgaaagatattatcaaatagctaaatgctttagagatgaagacttaagagctgataggcagccagaattcactcaacttgatattgaacaatcttttgaatcttcggaatctttaataaactatgttgaagaaatgtttcaaataatttttaaaaaactcaaaaatgttgaagtaaaagtaccattcaagaaattaacatatcaggaatgcatagatcaatatggaacagatgccccagatctaagaatccttttgcagctaaataaagttgatcatatctttgagaaaacagaatttgaaatatttagaaaacctgcaaatgataaaaattgtaaagtctcagctttagtggttccaggcaaagatattagtagaaaggaatattga

SEQ ID NO: 298023 - DNA, 1798 bp, Unknown
  Bacterial polypeptide expressing nucleotide sequence isolated from the Sargasso Sea
gatgcgtactgaatactgcggtctcgtgaccgaacacctgctgggccaaaccgtgtcgctgtgcggctgggtgcagcgccgccgcgatcacggcggtgtgatcttcatcgacctgcgcgatcgtgaaggcctcgtgcaggtggtgtgcgacccggatcgtgcggaaatgttcgcgaccgccgaaggcgtgcgcaacgagttctgcgtgcagatcaagggcctcgtgcgcaaccgtccggaaggcacggtcaacgccggcctgaagagcggcaagatcgaagtgctgtgccacgaactgaacgtgctgaacgcgtcggtcacgccgccgttccagctcgacgacgacaacctgtcggaaacgacgcgcctcacgcaccgtgtgctcgacctgcgccgtccgcaaatgcagcacaacctgcgcctgcgctaccgcgtcgcgatcgaagcgcgcaagtacctcgacgagcagggtttcatcgacatcgaaacgccgatgctgacgaagagcacgccggaaggcgcgcgcgactacctcgtgccgtcgcgcgtgaacgcaggccagttcttcgcgctgccgcagtcgccgcagctgttcaagcagctgctgatggtcgcgaacttcgaccgttactaccagatcaccaagtgcttccgcgacgaagacctccgtgccgaccgtcagccggaattcacgcagatcgactgcgaaacgtcgttcctcggcgagcaggaaatccgtgacctgttcgaagacatgatccgtcacatcttcaagacgacgatcgacgtcgagctcgacgcaaaattcccggtgatgccgtactcggaagcgatggcgcgtttcggttcggacaagccggacctgcgcgtgcagctcgaattcaccgagctgaccgacgcgatgaaggacgtcgatttcaaggtgttcagcacgccggccaacgcgaaggacggccgtgtcgcggcactgcgcgtgccgaagggcggcgagctgtcgcgtggcgacatcgacggctacaccgaattcgtgcgcatctacggcgcgaagggcctcgcatggatcaaggtcaacgagaaggcgaagggccgtgacggcctgcagagcccgatcgtcaagaacctgcacgacgcatcgatcgcggcgatcctcgagcgcaccggcgcggaagacggcgacatcatcttcttcgcggccgaccgcgcgaaggtcgtcaacgacagcctcggcgcgctgcgcctgaagatcggtcattcggaattcggcaaggcgaacggcctcgtccaggccggctggaagccgctgtgggtcgtcgacttcccgatgttcgaatacgacgacgaagatgcacgctacgtcgcggctcaccacccgttcacgagcccgaaggacgagcacctcgagtacctcgagacggatccgggccgttgcctcgcgaaggcctacgacatggtgctgaacggctgggaaatcggcggcggctcggtgcgtatccatcgcgaggaagtgcagagcaaggtgttccgtgcactgaagatcggtgcggaagaagcgcaactgaagttcggcttcctgctggacgcgctgcagtacggcgcgccgccgcacggcggtatcgcattcggtctcgaccgcatcgtcacgatgatggccggcgccgattcgatccgcgacgtgatcgcgttcccgaagacgcagcgtgcgcaggatctgctcacgcaggcgccgagcccggtcgacgagcgtcagctgcgcgaactgcacatccgtctgcgtcagccggaacagccgaaggcgtaa

SEQ ID NO: 298024 - DNA, 1020 bp, Unknown
  Bacterial polypeptide expressing nucleotide sequence isolated from the Sargasso Sea
taatggttaatacttttaaaaatttttctgataataaattgatgtacgatatttttccaaagataccatattctgagtcaatgcttaagtatgggagtgacaaacctgatttaagaaaccctcttattataaatgatattacagaaatatttagcagagaggatgtttcatttgatatttttaaaaaattagtacgaactggctcaagagttcgatctattactaccaaaaatacaaaagataaacctagaagtttttttgataatattgataaatgggctaaagaacaaggtgcttctggactagcatactttacctttgaaaaaaataataaaatttcagctaaaggaccggtgggaaaatttttttctgaagatgcactcttagaaataatgaaaatcactaaatctgagttaggtgatagtatttttttagcatgtggaaaacaaaatgaattagaaaaaataacggccctagctagagataaaattgcaaaagatttagaactaattgatgatgatacttttgctttctgctggatagttgactatcctatgtttgaaaaagatgaattaacaaataagattaaatttagtcataacccattttcaatgccacaaggtgaattaaaagataaagattttgaaaatcctcttgatattcttgcttaccaatatgatatagtttgtaatggaatagagttatcttctggcgcaataagaaatcataaacctgatctcatgtataaactcttttcaattgcaggttacaataaagcagaggtagatgaaaaatttagtgggatgattaacgcattaagatatggtgcaccaccacatggcggaattgcacccggaatagatagaattgtcatgcttttagcaaatgaaaaaaatataagagaagttactatgtttccaatgaaccaaaacgctcaagatttaatgatgaacgcaccatcagagattaatcaagaccaattgaaagaattaaatctctcaataaaaactaagaattaaa

SEQ ID NO: 298025 - DNA, 694 bp, Unknown
  Bacterial polypeptide expressing nucleotide sequence isolated from the Sargasso Sea
ttgaataagtacagaacacataaatgtaacgagttaagaaaaagtgatgttgacaaaagtgtctctctttctggatggataaacaaaaaaagagatcatggaaatttattatttattgatcttcgggataattatggaattactcagtgcataattgataaagaaaataaaaatttttcagaattagaaaaaatacagctagagaccgttattaaggttaatggcaaggtagtaaatcgttcacatgaaaccaaaaataaagatattgaaactggagaaattgaggtggttatatctgaatatgagacattagggacttgtaaagaattaccattgcctgtttttagtgatcaagaatatgcagaagaaataagactaaaatatagatttttagatttaagaagaaaaaaaattcatgaaaatatcattttaagatcaaaagttatttcttacataagaaatgaaatgacaaaattaggctttttagaatttcaaactccaattttaacctcatctagccctgaaggagccagagactttcttgtaccaagtcgtttaaacccaggaaaattttatgctttgccacaagctcctcaacaatttaagcaattaataatggtatcgggttttgataaatattttcaaatagctccttgctttagagatgaggatgctagagctgacagaagtcctg

SEQ ID NO: 298026 - DNA, 562 bp, Unknown
  Bacterial polypeptide expressing nucleotide sequence isolated from the Sargasso Sea
atgaatataagaacacatacatgcggcgaattacaatctaaggattctggaaaatctgttgtattaaatggatgggtaaataccgtgcgtctccatggacaggtagtttttgttgacctgcgcgataggtatggtaaaacacaaattgtttttaattctgatgattataatggtgattttgagcaagtaaaaaaactatccatggaagatgttttatctatttctggcgatgttcgcgatagggataagagctcggttaattctgatatgcataccggtgaagtagaagtctatgtaaccaccatggaaattttaaactatgcagatccattgccttttgttatttctgatcgaaacagcgcagaggaggatctaagattaaaatatagatatcttgaattgcgaactgaagagttgcaggaaaatatcaagatgcgccataatacatatcaagcggtaagaaactatttatcaaaaaacaatttcattgaggttgaaacccctgtgttgatgaaatcaactcctgaaggggcaagggattatttggtccctagtagaattc

SEQ ID NO: 298027 - DNA, 523 bp, Unknown
  Bacterial polypeptide expressing nucleotide sequence isolated from the Sargasso Sea
tatgatcaaaaaatatagaacccacttgtgcgaagacattgatcattcagatattggtaaaaaggtatcagtatcaggatgggtccatcgaagaagagatcatggtggagtaattttcatagacttaagagatgtctcgggaatattgcaattggtttttgaccctgaaaataaagaactcttcaatactgcagaaaaaataagaagtgaatttgttttatccgtttcagggatcataagagaaaggcccgagggaacaattaatgatcagatgaagaccggagcagttgaattactggttgaatctggagaggttctcaattcttcaaaaacaccaccatttcatcatgatgaagcaaccaatgaagatattcgcctcaaatatagatacctcgatctcaggcgagaagagatgtcaaagaatattaaaatccgacatgagatcacaaggtcacttagagatcatttaaatagggccgcttattttgaaatcgaaacaccgattttaacaaaggcgacccca

SEQ ID NO: 298028 - DNA, 943 bp, Unknown
  Bacterial polypeptide expressing nucleotide sequence isolated from the Sargasso Sea
tcttatgcagaatcaattcaaaaatatggaacagataaaccagatctgcgagtagaaattgaacttgatgatattaccgaagtatttgttgattctggttttaaaatttttgctgaccaaatttctaaaaatgagaaaataaaagtatgggctattccttctaagacaggaggatcaagagctttttgtgataaaatgaataaatgggctattgaagaaggccagccaggcctaggatatatattttttaaagatggaaaaggatcaggcccaattgcaaaaaatattggagatgaaaagactgaattaattaaaaataaattctcactcgatgatggtgattccattttttttgtatgtggtattcctaataattttttagattttatttccagagcaagggtaaaaattggaaatgagctagaattgataaagaaagattctttcgagttttgttggattgttgattttccaatgtttgagtataatgaagaattaaaaaaaatagatttctctcataatccgttttctatgccacaaggaggattagagtccttagaaaatattgatccattaaaaattaaagcttttcaatatgatatcgtttgtaatggcgttgaattgtcatctggcgcaataagaaatcatagacaagatattcttttaaaggcttttgaaatcgctggatataacattgatgaaattaagaaacggtttggagcgatgtacgatgcttttggctatggcgcaccccctcatggtggcattgctcctggtattgatagaattgtaatgcttattgctggtgtagaaaatatacgagaagtcattgctttccctatgaatcaacaagcgcaagatcttatgatgaatgcaccatccgaaatatcctcagatcagcttaaagaaatcggcattaagattgtcgagaagaaagaataga

SEQ ID NO: 298029 - DNA, 1548 bp, Unknown
  Bacterial polypeptide expressing nucleotide sequence isolated from the Sargasso Sea
tatgaatagaagaacacatacatgtggagaattgacatctgggaatcttggtgaaaaagtatgtttaaatggttgggtaaatgctgttcgtttccatggtcaaattgtttttgtggatttaagagatcgttatggaaagattcagattgtttataatcaagataattttaatggcgatttcgaattagttaaaaaattatctatggaagatgtcctttctgttaaaggtgtcgtgcaggaaagagatcaaaactcgcacaattcaaatatttcaacaggtgaaattgaagttattatatctgaacatgaaattttaaatgaagcagatcctttaccttttataattacagatcgtaatagtgctgaggaaaatcttcgattaaaatttcgttttcttgaattacgtacaaatgaattacaggaaaatataaaagtcagacataatacttatcaagctgtgcgaacctttttatcagataataatttttttgaagttgaaactcctgttcttatgaaatctacgcctgaaggagctcgagattatttagtaccaagtagaatacacaacggaaaattttatgccctaccacagtctcctcaaatgtataagcaattattaatgatttctggatttgatagatatttccaaattgtaaaatgttttcgagatgaagatttaagagctgatcgtcaacctgaattcactcaaatagatatagaaatgtcttttgtagatgaaaatgatataatgaaaaaatgcgaagaattaacgagatatatttttaataaagttcaaaatattgacttaataaaaccctttccaaaaatgacttataatgatgctatgtcaaagtatggtaccgattgcccagatttacgttatgatttattattaaatgattttaagcctttttcagaaaaaagtgaattcaaagcttttcattcggttgaaagcgttatgtgtattgttgtacctggtggagctaaatattctcgtaaagacattgatcattatacagaacatgttcagagatataaagctaaaggtttagcatggatgaagttttctgatggagtattaactggaggtatctctaagtttttttcggacgatttacattctaaaataacaaaaaagcttaatatggataatggtgatatcatttttattattggtgacgatataaaaacaacgcaattatcattaggtgcgctacgtattgcaattgctaaaaaagaagagtatgtaaaatcaaatgattttaaacctgtatggattacagattttcctatgtttgagtataacaaagaagagaaacgttatcattcgctacaacatccttttacacaaccaaaaacaaatgacctagagaaactaaaatcttcaccagagtctataccatcaaagcaatacgatttaataattaatggctatgaggtggctggtggttctgttaggattcataattctgatatgcagaaagtaatttttgatatacttggtattgatcgtaaagaagccaatgaaagatttggtttttttataga

SEQ ID NO: 298030 - DNA, 961 bp, Unknown
  Bacterial polypeptide expressing nucleotide sequence isolated from the Sargasso Sea
gatgagaagtaattattgcggcgagctctctaaaaagcatattgataatattgttactgtttgtggctgggtacataggagaagagaccacggaggcgtaatttttttagatgttagagacaagactggaatagtgcaggtcgttgtaaatccggagaataaaaaacctttttcacttgcagagaaaattagaagtgaatttgttttaaaaatttctggaaaagtaaatgagcgtcccgaagacgctgaaaatgaagatcttacaacaggagtcattgaaattatcgctgatgaaataattgttttaaatgaagcagagacaccagcatttccgttagatcagtctgctgaagttagtgaagaggtgcgtttaaaaaatagaactcttgacctaagaagaccagaaatgcaaaaaaatcttgagacaaaatctaaaatttctcaaattgtccgaaaagaacttgaaaaaaaagacttcattgatattgaaacaccaattcttacaaaagctacccctgaaggagcaagagattatttagtgcctagcagaacaaatagaggcagtttttttgcacttccgcaatctccacagctattcaagcaaatgttaatgatttcaggttttgaaaagtactatcaaattgccagatgctttagagatgaggacttacgagcagacagacaaccagaattttctcagcttgatatcgagtcgtcatttgtggaggaaaaagacattatgaatcttacaaatgacttaatgagaaaagttttcaaagaaattgctaaagaagatctgaagaatattgaagttattacatgggaaaagtctatggaagaatttggcagtgacaagccagatttaagaaatcctttgagactgatagaggtaaagaagctttttgaaaaagaagaatttaaagtcttctcagaacctgcaaacgataatgaatcaagaatt

SEQ ID NO: 298031 - DNA, 673 bp, Unknown
  Bacterial polypeptide expressing nucleotide sequence isolated from the Sargasso Sea
gggcctattggaaagtttttttcaaaaaagtcattagaagatttaatgaataaaacgaatgctgaagttggtgatagtatttttatggcatgtgataaagaaaatgaattagtaaaaattattgcccaagcgagggataaaatagcaaaagatttaaatttaattgatgagaatgtctttgctttctgttggatagtagattatccgatgtttgaaagagatgaggtaattaataatattaaatttagtcataatcctttttctatgcctcaaggtaatttaactgataaagatctaaaaaatcctttggatatattagcttatcaatatgatattgtgtgtaatggggtagagctttcgtctggagcgattagaaaccataaacctgaacttatgtataagctattttcaattgcaggttatgaaaagagtcaagttgatgaaaaatttagtggtatgattaatgctttaagttatggagctccaccacacggaggtattgcccctggtatagatagaatagtaatgttattggctaatgaaaaaaatattagagaagttacaatgtttcctatgaatcagaacgcacaagatttaatgatgaaagcgccttcagtagtgaccgaagatcaattaaaagaacttagccttaatttaaaacttaaaaagtaat

SEQ ID NO: 298032 - DNA, 1045 bp, Unknown
  Bacterial polypeptide expressing nucleotide sequence isolated from the Sargasso Sea
ttatgcaattgagcctatactctattcagtctttaaaaaattttcaaaatttgatgtaagtgaaatgccttttaaaaaaattacttacaaggactccatggagcaatatggaacagataaaccagatttacgtaatccaattactatttgtaatctttcaaatgagtttgtcgaagaagatgtagaattctcggcgtttaaaaaaattataaatgagggaggagaggttttaggaatccctgcgccaaacacacataatcaaccaagaagtttttatgacaatctcaattcttgggctaaaaaagatcttaatgcagctggtttaggatatattatttttgaggaaaatgacggtaaattaagaggtaagggacccattgctaaatttattccagaggcaatccaagatcgtattgcaataaaagcaaaacttaaatccggcgactcaattttttttgcctgcgctaaaggaaaaatggtctatgatattgctgcagccgcacgtaacaagattggtgatgaattaggtcttatagaaaaaaataagtttaaattttgttggatagttgactttcctatgtatgagaaaaatcctgagacgggtaaaatagattttagtcataacccattttctatgcctcaaggcggattagagtctttaaatgagatggatcctttagatattcttggttatcagtatgatattgtttgcaatgggatcgagctctcttctggagcgatccgtaaccatatacctgaaataatgtttaaggcctttgagatagctggctataataaacaacaagttaatgaaaagtttggtggaatgataaacgcttttacatttggtgttccgccacatggtggaattgcaccaggcattgatagaatagttatgttattagctcaggaaaaaaacataagagaggttattttatttccaatgaatcagcaagctcaagatttaatgatgttagctccagcagaagttgatgaggaagcgttaaatgaattaagcttaaaatatattcctaccgaagactag

SEQ ID NO: 298033 - DNA, 912 bp, Unknown
  Bacterial polypeptide expressing nucleotide sequence isolated from the Sargasso Sea
acgcaaaagaattaccaatgctagtttttggtgaacaggactacccagaagatattagattaaaatacagatttttagatcttagaagagatgagatgcaccataatattattttgagatcaaaagtaatttcttttattagagaagaaatgcttaaaataggatttttagaattccaaaccccaatactaacctcgtctagcccagaaggtgcaagagactttttagttccaagtagattgaatccgggtaaattttatgctctaccccaagcacctcaacagtttaagcaactaatcatggtttctggattcgataaatattttcaaattgctccatgttttagagatgaagacgcaagagctgacaggagtccgggggaattttatcaattagacttagaaatgtcatttgtagagcaagaagatgtatttcaagttgtagaaagattattaactaatgtatttaaaaaattttcaaacaaaaatattaaaccgacgaagtttccaagaattccttataaagaagctatgcaaaaatacggtacagataagccagacctaagaaatcctttgataattcatgatgtaacggaaatattttcaagagatgatgtaaagttcgatatatttaaaaaacttgtaaaatctggttcttttgtgaaagctatattaactaaaaatacaaaagataaacctagaagtttttttgataatatcgacaaatgggcaaaagagcagggagcttcagggctagcttattttacttttgaaaaagatgaaaaaataactgcaaaaggaccagttggaaaattttttagcgaaaactctcttaaagaaataatgaaaatttgtaatgcatctattggagatagtttatttttgtcatgtggaaatggaaaaagaacttgaa

SEQ ID NO: 298034 - DNA, 1075 bp, Unknown
  Bacterial polypeptide expressing nucleotide sequence isolated from the Sargasso Sea
tcaattagatttagagatgtcttttgttgagcaagaggatgttttcaaagtcgttgaacaattattagttaacacttttaaaaaattctcaaaaaaaaaaattataacagaaaaatttccaagaattacttataaagatgctcttttaaagtatggaagtgacaaacctgatctaagaaatccattgatagtttacgatataacagaaacttttacaagagaggatgtttcttttgaaatctttaaaaaacttgtgagttctggatcaaatgtaagatgtattgttactcataatacaaaagataaaccaagaagtttttttgataatattgataagtgggcaaaagatgagggagcttctggtttagcttatttcactattgaaaatgagatttctgcaaaagggccggtaggtaaatttttttcaaaagagtctttagaggaaatcatgaaaaaaacaggtgcaaaagttggagatagtatatttttggcttgtagtaaaaaaaaggatttagagcgaataactagcttagcaagagataaaattgcaaaagacttaaatttaatagatgataatgttttttcattttgttggatagttgattatccaatgtttgaaaaaaataatcaaacaaataaaattgaatttagtcacaatcctttttcgatgccgcaaggagatattcaaaaacttaattttgaaaaacctttggatatgttagcctatcagtatgatatagtatgtaatgggattgaactttcatctggtgctattagaaatcatatacctgagcttatgtataaattatttgctattgcaggttatgataaagatcaagttgatgaaaaatttagtggaatgattaatgctttaagctatggtgcaccaccgcatgggggaattgctcctggaattgatagaataataatgcttttggcaaatgaaaaaaatattagggaagtaactatgtttccaatgaatcaaaacgcacaagatttaatgatgaatgctccctcatcaatagatgagaaacaactaaaggagcttaatctagctctcaaaataaaaaaatag

SEQ ID NO: 298035 - DNA, 1227 bp, Unknown
  Bacterial polypeptide expressing nucleotide sequence isolated from the Sargasso Sea
atcctggaaaattttatgctttacctcaagccccacagcaatttaagcaattaataatggtatcaggttttgataaatatttccaaatagcaccatgttttagagatgaggatgctagagcagatagaagtcccggtgaattttatcaattagatttggaaatgtcatttgtagatcaagaagatgtatttgaggtagtggaaaaactaatgattaacgtgtttaaaaatttttcagataaaaaaatgattaaccaaaaatttccaagaattacatattcagatacaatgttaaaatatggaactgataaacctgatttaagaaatccattagttatacatgatttaacagaagtatttaaaagaaaagacgtaagctttgaaatatttaagaaacttgtaagcaaaggatcaattgtaagaggtatagttacaaaagatactaaagataaaccaagaagtttttttgatggaatagataaatgggctaaagagcaaggcgcatcaggattagcatactttacaatagaacaagatactgaaattaaaggtaagggacctgttggaaaattttttagctcagcatcgttaagtgaaattatgaaaatatcaaatgcaaaggtgggagatagtatatttttagcatgcggaaaaacctctgaagtcgaaacaattctttcatcagcaagagaaaaaatagcaaatgatttaaaattgatagacgaaaattcttttgctttttgctggattgttgactatccaatgtttgagatcgatgaaaaaacaaataaattaatctttagccataacccattttctatgccccagggagacttgcaaaaattagacttatctaaaccgttagaaataaaagcttatcagtatgatattgtttgtaatggaattgagctttcatctggagcaataagaaaccatatccctgatttaatgtataaattattttcaattgctggatatgataaaaaggttgttgatgaaaagtttagtggaatgattaatgcattaagttatggtgctccaccacatggaggaatagcaccaggtatagatagaataataatgttgttagctggagaaaaaaatattagagaagtaacaatgtttccaatgaatcaaaatgctcaagatttaatgatgaatgcaccctcagaaataaacttaaatcaattaaaagaacttaatctctcaattaaaaaaaataaataat

SEQ ID NO: 298036 - DNA, 808 bp, Unknown
  Bacterial polypeptide expressing nucleotide sequence isolated from the Sargasso Sea
aatgcaccaatatagaacacataattgtaatggcttgcgagctgaagatattaatcaagaagttagattatcaggctgggttcacagaaaaagagatcatggtggtcttttgtttattgatttgagagatcattttggcttaacacagttagtttttgatccagatagcgctgctttccaagaagcagaaaaagtaagaaatgagtctgtaataacaattaatggaaaagttgtacaaagatcagatgatacaattaataaagtattaccaactggaaaaattgaggtttatgttgacacacttgaagtaattgggagttcagatgatatcccattaccagtttttggtgagcctgattatccagaagaaataagactaaaatataggtttttagatttaagaagagaaactcttcataagaatataatattaagatctgaaattattaattttattagaagtaagatgattgaaggtgattttcttgagattcaaacaccaataatgaccgcatctagccctgaaggagcaagagattatttggttccttcaagagtacatcaaggtaaattctatgctcttcctcaagctccacaacagtttaaacaacttcttatgacttcaggttttgataagtattttcagattgctccatgttttagagatgaggatgctagagctgacaggtctcccggagaattctatcaattagacattgaaatgagttttgttaatcaagaggatatttttgaatcagttgaacctttactaagagatgtattgaaaaatttcgaaaataggctgtaa

SEQ ID NO: 298037 - DNA, 599 bp, Unknown
  Bacterial polypeptide expressing nucleotide sequence isolated from the Sargasso Sea
agatgatgacttaattttcttcggtgctggaccttctgaagtagttaatttaagtatgagctctttaataaagagacttggaaaagatttagatttatatcaaaaagattgggcgccatgttggataactaatttcccaatgtttgaaagtgatgcaggtaatttgaaggcgctccatcatccatttacaagacctaaagaggatctagaaaaatttagaaaggatccatctggtgctcaagcttatgcttatgacttagttctcaacggatatgaaatcggcggaggttctttgagggttcatgactctaaaatgcaatcggctatctttgatgctctaaatatttcaagtgaggaagcaagtcttaagtttggatttttgcttgatgctcttaaaactggatgtccacctcatggcggtatagctctaggtcttgatagaattgtcatgctgcttactcaaactgaaaatataagagatgtaattgcattccccaagactcagagcgcatcatgtcttcttacagatgcaccaaatattgttgatgagtctcaacttaatgaactgcatattaaaaaagatcttaatgaggaataaa

SEQ ID NO: 298038 - DNA, 1210 bp, Unknown
  Bacterial polypeptide expressing nucleotide sequence isolated from the Sargasso Sea
atgtggttggatcctagacgaagagatcatggtggaattatctttattgatttgagggattacacaggcatcgttcaattagtttttaatccagaccaaagaaataactttgaaatcgcggatcattgtaggaatgaatttgttttacgtgtagtcggagaagtttcgtctagatcaagcgacacgatcaataaaaatatgaagactggcgaaattgaggtatgtgtagaagaaattgaagtcttgagtaaatctgagactcctgcatttccgcttgataattttcaggatgttggcgaggaagctagattaaaaaacagaattttagatttaaggcgccctgaagttaatgaaagacttatttcaaggtcaaaaatcacatcttttataagatcgtttcttgaagaagatggctttaatgaatttgagacaccaattttaacaaaagctactccagaaggagccagggattatgtcgttccaagcaggttaaataatggtgaattttatgcattgccgcaatcacctcaactttttaaacagatgctaatgattggtggattagaaaaatattatcaaatagctagatgttttagggatgaagatttaagggctgatagacaacctgaattcactcaaatcgatatagaagcttcatttgtgaatgaagaagcaattttagatcttacaaccagattggtttgtgacttgttcaaagagtttgctaattgtagtcttcaagaatttgaaacactcacttatgagaatgctattagaaaatttggttgtgataaacccgatttgcgaatacctttatttcttgaggatattaagagtcttgttaaagatcaagaatttaaggtattttcagatccagccaatgatgaaaattcaagggttgtagcactcagaattccaaatggcgcaaaattcacgagagctaaaatcgatgagtatactaattttgttgcaaaattgggtgcaaaagggcttgcttacatcaagattaatactttagatgatatgcaatcgccaatactaaaattcattgaaggtgaatgtacaagtgcaatagtaaagcaagttaatgcgactgaaggggaccttatcttttttggagcaggaacttctgatgtcgtgaacctatcaatgagctcattgattaaaaaaattgcagaagatcataatttatatgtaaaagattgggcac

SEQ ID NO: 298039 - DNA, 1669 bp, Unknown
  Bacterial polypeptide expressing nucleotide sequence isolated from the Sargasso Sea
ttgtgtgaagacataggtgcttcacatattgggaaacaggtaatggtttcaggatgggtccatcgaagaagagatcatggcggcgtaatattcattgatctcagagatgtttctggaatacttcaattggttttcgatccagaaaatcaagatctctttgcaactgcagaaaaaataaggagtgaatttgtactgtcagttacagggattgttagagaaaggcctcagggaacaatcaatgatcagatgaagacaggtgaagttgaattgctggttgaaaaaggagaagttctaaatacctccgaaactccacctttccatcatgacgaagcaacaaatgaagacattcgtctgaaataccgatatctcgacctcaggcgagaaaacatgtcaaacaatattaaagtcagacatgagatcacaaaatctttgagggagtatttgaacgaagcatcttattttgaaatcgagacgcctattttaaccaaggcgactcctgagggcgctagagactatcttgtaccaagcagaactcagcaaggaaatttctttgctctgcctcaatcaccgcagttatttaagcagctcctaatgatgtcaggatttgatcgttattatcagattgcaaggtgctttagggacgaggacctgagggcagatcgtcaacctgaatttactcaacttgatgttgagatgtcattcgttgatcaggaagatgtcaaaagtcagatggaatcgatggtgaaagatttgtttaaatcagtgcttggcattgatcttgaaaagcagtttcctcaaatcacgcatgcagaggcaatggaccgatttggttcggatagtccacatttggggatagacatggagctgattgaagtcagtgatctaatgaaagaggttgaatttaaagttttttctggtccagcaaatgatgaggattcaagagtggcatgtttagtgcttcgtgattcatctgagatgtcgcgaaagcagattgatgattataccgattttgtttcaaactatggcgcgaaaggtttggcttacatcagggtcaatgatattgaaaaaggcattgaggggctccagtcccccatacttaaatttctcaatgacgaagtaatcaatcaactcattgagaagctttcattgagcaatggagatacggtcttttttggtgccgataagaaagacattgttaatgcatcgctgggcgctcttcgtgtcaaaatggcggaggatttcagtttgataaaagacggatggtttccactttgggtcactgactttcctatgtttcattgggatgaaagagaaaagagatggtctgcagagcatcatccatttacatctccaataaatcccgatccagaagaattaaaaaataatccaaaggatgcgttatcacaaggatacgacatggtactcaatggccatgaaattgggggtggatcgattcgtattcattcggaagcaatgcaacaagctgtcttttcaatacttggcatcggtgaagaagaggcgaatgaaaaatttggtttcttccttgaagctctaaagtatggatgcccgccccacggcggcattgcttttggaattgacagaattgtcatgctcataacaggatcatcgagtatcagagatgtgattgcattccccaagacacagaccg

SEQ ID NO: 298040 - DNA, 697 bp, Unknown
  Bacterial polypeptide expressing nucleotide sequence isolated from the Sargasso Sea
atgcataactatcgaagccatacatgtgcagatctaaaaatagaagatgttggaagcaatgtacgcctttcgggatgggtacatagagttcgagatcatggtggggtcctgttcatagatctccgtgatcactatggtgtaacacaagttctgtgcgatccagatagtccagtttttagccaagtagaaaatgtacgatcggagtggtgtatccgtattgacggggaagttaaagcccgcgatccagaattaataaatactaaaatttccacaggtggaattgaggtattcgtaagagatattgaagtgctcggagcatcagctgaattgcctttaatggtttttggtgatcaagagtatcctgaggagacaaggcttcgttacagatacttggacttgcgccgtgaagtaatgcaggagaatataaaattacgtgcagatgtaattgcttctatccgtcggaaaatgtgggatattggtttcagggaatatcaaacgccaattatcacagcttcatcaccagaaggtgcaagagattttttagttccttctcgtctgcatgaaggaaagttctatgcgctcccacaagctccacagcaattcaaacaattaattatggtatctggatttgataaatattttcagatagcgccttgttttcgcgatgaagatcctagggctgatcgtagtccaactg

SEQ ID NO: 298041 - DNA, 1522 bp, Unknown
  Bacterial polypeptide expressing nucleotide sequence isolated from the Sargasso Sea
catgcacgcttaccgcacccataactgcggggaactccgcgccgcgaacgccggaatcgaggcccgtctgtccggctgggttcaccgcaaacgcgatcacggcaatctgctgtttgtcgatctgcgcgatcatttcgggctgacgcagtgcgtaatcgaggtcgattcggacatctttccaaagatcgaagctctgcggctggaaacggtcatttgcgtcacaggtaggatcgaggaacgcggtggcgatatgaaaaatcctgaccttcccactggcgaagtcgaattgcggatcgatacctgcgaagtactcggaaccacagagcagttgccgctggaggttaacagcgatcgggattacggcgaggaagtacgtctgcgttaccggttcctcgatctgcgccgcgacaaggtgcatcggaacgtcgtgctgcgcagcgcggtgatttccagtatccgccgccgaatgatcgatcagggtttcatggagttccagaccccgatcctgacgtccacctcccctgaaggcgcgcgcgacttcctcgtgcccagccgcttgcatccaggtcagttctatgcgctgccgcaggcgccgcagcagtttaagcagctgatcatggttgccggattcgacaagtattttcagattgccccgtgtttccgggacgaagacgcacgcgccgaccggtcgccgggcgagttctaccagctcgatatcgagatgtcgttcgtcacccaggatgacgtgttcaatgccatagagcccgtcctccatggcgtgtttgaggaatttgctgacggccgatctgtctcgccggcaccgtttcctcgcatcacgttcgctgatgcgatgcaaaaatacggctcggacaagccggacctccgtaacccgatcgagatgagtgatatcaccgatacgttccgggggtctggcttcaagattttcgccggcatgatcgagaaggatgaaaacgttcgggtctgggccataccggcgccgggcggcggttcgcgcgcgttttgcgaccgtatgaattcttgggcgcagaaagaaggccagccggggctgggttacattttctaccgcgacggcgagggcgcgggaccggtcgccaagaacatcggagaagatcgcaccgaagccctgcggggccagctcgggctcggtgatggcgatgccgtgtttttcgttgctggagtgccgaagaactttgcatactttgccggtcaggcgcgtacccaggtcggcgaggcgcttaaactggtagatgagaacaagttcgaattctgctgggtcgtagactacccgatgtacgaactggatgaaaacactggcaagatcgagttcagccataacccgttctcaatgccacaaggtggactggaagcgctggaaaccaggaatcccctcgatatcttagcctaccagtatgatatcgtttgcaacggtatcgagctgtctagcggtgcaatacgaaatcatcgcccggagatcatgtacaaggcgttcgagatcgcgggc

SEQ ID NO: 298042 - DNA, 1015 bp, Unknown
  Bacterial polypeptide expressing nucleotide sequence isolated from the Sargasso Sea
aatgtcgtttgttaatcaagaatatgttctaaatacttttgaaggtttagtacaaaatttatttaaagtttgtattggtgcgtctttagaaaaattcgatcgtatatcttacagcgatgcgatggaactttacggatcagacaaacctgatacacgatttggaatgcagtttgtaaacctctcagaaaaggctaaaggaagtggtttcaaaatttttgattctagtgaatctatttatggatttaatattgaaaacggagaatctttttcaagaaaagagattgattattacactgattgggtgaagaggcctcaaattggtgcgctcggtttaatttggataaaacacaatcacgatgggacaatcaaatcttctattgataaattttttaatgaagagcaactaaaatcaatgacaggttcaaaagctggtgatctaacttttataatttctggggacaagaaaaaaacattgacacagctcggttccttaagaatacacgttgctgaaaaattaggtcttcgtaataaaaataaatttaacgcattatgggtaactgactttcctatgtttgaatgggatgaagattctaaaagatatcatgcaatgcatcacccgtttacatcaccagttgaaaatataattggggaagatcctggatcaactctagccaatgcttatgaccttgtaattaatggtaatgaaataggtggcggatcaataagaattcatgatcaaaaacttcaagaagaagttttctcaattttaggattttcaaaaaaggaagcatttgatcaatttgggtttttattagaagcatttaattatggtgcgcctccacacggcggaattgcatttggattagacaggctagctgctgtaatgaatggtgaagaatcaattagagattacatagcatttcctaaaaacaacagcggccgtgatgttatgattgatagtccatctaaaattgataaaggtcaactggatgatttaaatataaagctcaagtaa

SEQ ID NO: 298043 - DNA, 1768 bp, Unknown
  Bacterial polypeptide expressing nucleotide sequence isolated from the Sargasso Sea
atgaaatctcattattgtggtgaaattacatcatctaatctcaaagagaaggttactatttgtggatggatacatagaagaagagatcatggaggagtaatttttttagatgttagggatataaaaggtatatgccaagctgttgtgaatcctgataacaaagaatcattccaattagcagaatcgataagaaacgaatttgttgttcagatagaaggtgttgtaagaaatagacttaaaggaacaataaataaaaatatgcaaactggtgaaattgagatagaggtcgctaatatcaatattctcagcaaggcaaacactccagtttttccaatagacgaatatcaggaagttaacgaagatgtaagattaaagaatagggtgcttgatcttagacgcccagaaatgaatgaacgaattgttaaaagatcaaaaattacttctttaattagaagctaccttgataaaaatgaatttcatgagattgaaacaccaattttaactaaggctactccagaaggtgccagagattatattttaccaagcagagttcagccaggtagtttttatgctttacctcaatcacctcaattatttaaacaactcttgatgattggcggcttagataaatattatcaaattgcacgatgttttagagatgaggatttgagggcagatagacaaccagaatttactcaaattgatattgaagcatctttcattaatcaggaagaaatcatgaagcttggtgaaaagatgattaaagatgtaattaaagaattttgtggagaaaaacttgataaatttaaggtgattgattggcatgacgctatggaggaatatggttgtgataaaccagatttaaggattcccttaaaactcaaagaaatatcagatcttgttatgaatgaggaattcaaagtattctctgatcccgctaaaaaggaaggatcaagagtcgttgctttaaaagtgccaaatggaaatacaatgtcaagaggtcaaattgatgactatacaaaatttgtatctaagttgggtgcaaaaggacttgcttatataaagattaatgatattgaagatcttgagaatggcattcagtctcctatattgaagtttttaaacaaaaaaacaattcaaaatatttttaaaactcttgaagcgaaaacagatgatttaatcttttttggagctggaagtgaatctcttgttaacttatcaatgagtagtcttataaaaaaattaggacatgatttagatttatatgtttcaaaatgggctccttgttggatagtgaattttccaatgtttgaaccaaatgccgaaggaagtctaacaccgcttcatcatccatttactttacctaaagcatcaaagaaagaacttatagaaaatccaaacgatgttcttgcatatgcatatgatgttgttttgaacggatatgaaataggtggaggatctttaagaatttatgataaaaatatgcaagaagcaatttttgaaattcttaacatttcaaagaaagaagctgagagtaagtttggtttccttttaaaggctttgtcttcaggttgtccacctcatggtggcatcgcatttggactagatagaattgttatgcttgtaacagatacttcaaacataagagatgtgattgcattccctaaaactcaaagcgcgacatgtctattaacagatgctccaagcaaggttgataaagatcagcttgatgaacttaaaataattagtacacataaggaagaatagt

SEQ ID NO: 298044 - DNA, 1219 bp, Unknown
  Bacterial polypeptide expressing nucleotide sequence isolated from the Sargasso Sea
atggttggaagtaatattctactttcaggttggattaataagaagcgtgatcatggaaatctcttatttttagatttacgtgataattatggcatcacacagtgtatagtagacaaagaaaataaaaactttaaagatttagaaaaattacaacttgaaacagttattaatgtagagggtaaagtagttgatagatcagctgatacaatcaataaagagatagaaacaggagagattgaagtcactatcgaaaattttgttgttttaggtaagtgcaaagaattgccaatgcctgtttttagtgatcaagaatattctgaagaaatcagattaaaatatagatatttagatttaagaagaaaaaaaattcatgaaaatattattttgagatcaaaagttatttcgtttatcagaaatgaaatgaataaatttggttttttagagttccaaacaccaatattaacttcatcaagtcctgagggagcaagagattttcttgtgccaagtagattgaatccaggtaagttttatgctttaccgcaggcaccgcaacaatttaagcaactcataatggtttcaggttttgataaatattttcaaatcgccccatgttttagagatgaagatgctcgtgctgatcgaagtccaggagagttttatcagttagatttagagatgtcttttgttgagcaagaggatgttttcaaagttgttgaacaattgttagttaacacctttaaaaaattctcaaaaaaaaaaattataacagaaaaatttccaagaattacctatagagatgctcttttaaactatggaagcgataaacctgatcttagaaatccattgataattgaagacataacagaaacttttacaagagaggatatttcttttgatatctttaaaaaacttgtgaagtctggctcaaatgtaagatgtattgttactcagaatacaaaagataaaccaagaagcttctttgataatattgatagatgggccaaagatgagggagcttctggactagcttattttactattgaaaatgggatttctgcaaaagggccagtgggtaaatttttttcaaaagagtctttggaggaaatcatgaaaaaaacaggcgcaaaagttggagatagtatatttatggcttgtagtaaaaaaaaggatttagagcgaataactagtttggctagagataaattgcaaaagatttaaa

SEQ ID NO: 298045 - DNA, 1110 bp, Unknown
  Bacterial polypeptide expressing nucleotide sequence isolated from the Sargasso Sea
aatgtccgatgctcaaaaagaggttgttttatccgggtgggttcaacgatctagagatcttggaggaatgacgtttattgatcttcgtgatcgatatggaataactcaattggcctttaatatggaggcaaattcaaaattatgcttagaggcaagaaaattgggtcgtgaatatgttattaaagtttcaggacaagttattgaaagacaaagcaaaaattcaaatatgcaaaccggggatgttgaagttgttgttaagacacttcaaatcttaaattcttcaaaaaccccaccatttactattgaagaaaagaccgatggaggagaggaattaagaatggaataccgctatctagatttaagaaggtctcccgttcaaaataatttatttttaagaaataaagtggccttggaaacaaggaaatacatggattccaaaggttttatggatgtggaaactccagttttaataaagtctacccctgaaggcgcaagagattttgtggtgccaagtagaatgaatgaaggacagttttacgcattgcctcaatcgccacagacatttaaacagcttttaatggtgtcgggaatagataggtattatcaaatagttaaatgctttagagatgaagatttaagggcagatagacagcctgagtttactcaaattgattgcgaaatgtcttttgtggaacaagaagatattcttcaaacctttgaagggatggtaaagcatttattttcttctattttaaatgtttcttttgaagagccttttcctcggataacctatcaagatgcgatggagcgttttggttccgataaacccgacatgcgatttgcgatggaatttgttgatatttcaaaagaaactcaaggaaaaggatttggagttttggataattcggagattgttttgtcaattaatgttcatggagcagcatcttatagtagaaaaaaaatagataaattaattgattgggttaaacgccctcaaattggagccaaagggatgatttatttaaaatataacgacgatggtacttttaaatcttctgtcgataagttttatgactccgaggcactacaaaaatgggccgaaaaggcaca

SEQ ID NO: 298046 - DNA, 688 bp, Unknown
  Bacterial polypeptide expressing nucleotide sequence isolated from the Sargasso Sea
gaacagaagcaggagctgctcagccgcaccggcgcggaacccgccacgctgctgctgttcggcgccggcgacaccgccacggtgaacaaagctctcgaccgggtgcgccagtacctggctaaggagctgggcatggtcaaggccgaccgcgacaacgaccagtggaactttctctgggtggtggatttcccgatgttcgaattcaacagcgatgagaaccgctacgaagcgctgcaccaccccttctgcgcccccaatgcccaggatctcggcagtgatgcctcccaatgggccgacaccctgccgggtgccagggcccaggcctatgacctggtgctcaatggccttgagctcggcggtggctccctgcgcatccacgactcagccctgcagcgccaggtgttgcagaccgttggattgccgctcgaggaggctcaggagcagttcggattcctgatggatgccctcgatgtgggcgcacctccccacggcggcctggccttcggcatcgaccggatggtgatgctgctcgcgggtgaggaatcgatccgcgacaccatcgccttccccaagacccagcaggcccgctgcctgatgaccaatgccccgggcggagtcgccgacaagcagctggaagagctgcatgtggccagcacctgggtggatcccagcgacgacgacgcgtgat

SEQ ID NO: 298047 - DNA, 1165 bp, Unknown
  Bacterial polypeptide expressing nucleotide sequence isolated from the Sargasso Sea
agtcgtttatgatcccgatgttaaggagagttttaaaattgctgagggagtgcgaaatgagttcgtagtcgaggtaaagggcagggttaggctaagaccttcaggaacaattaaccatgaaatgtccactggacgagtagaagttttagggaatgagctgaaggtattgaatgcttcagaaactccaccgattcaattggatgagcatgcggaggtcggggaagacattaggctcaagtatcgttacatcgatctgcgtcgccctgaaatggcagcgaggctcaggtttcgctcaaaggttggcaatataattaggaattttttagacaataatggttttcttgatattgaaacgcctcttcttacgagagcaactccagaaggcgcgcgggattatcttgtaccaagtcggactcatcaggggagattttttgcgttaccgcagtctccgcaattgtttaaacaaatcctgatggcctcaggtatggatcgttattatcagattgcgaaatgtttccgagatgaagatttaagagctgatagacagccagaatttactcagatagatgtagaaacctctttcatggatgaggatcaaattatgacaatcatggaagcgatgattaagcatactttcaaaaagactctaaatgttgatttaggtgattttccaagaattacttatgctgaagctatgagattatacggttctgacaagccggacttgcgcattgatttaaaattggttgatatagcagatttaatgaaatcagctgaatttaaagtgtttagtggtccagctaatgacgaggatagcagagtcgtagcccttcgtgtaccaggtggtgcccgccttacgcggaaggtgattgatgattttactgaatttgttggcgtatacggtgcgcgtggtcttgcttggattaaggtaaatgatttaaacagcggacctgaaggtcttcaatcaccaataattaaatttcttgatcaggagattattagaaacctgctttcaactttagccgtggagactggagatataatattctttggggcggataaaaccaaagtcgtaaatgaggctatgggtgccttaaggataaaagtggctcaagaacttaatcttgtcgcctcgggatgggcgccagtgtgggtggtcgacttt

SEQ ID NO: 298048 - DNA, 1255 bp, Unknown
  Bacterial polypeptide expressing nucleotide sequence isolated from the Sargasso Sea
tatgcgcaataagacttgtggagaactacgagcttccgcaattagcgcaaatgttcaactatgtggttgggttgatcgcagaagggatcatggcggagtaatttttattgatctaagagaccgttctggaacaattcaaatcacagttgatccagatcaaggtcaggatctttttagcatcgctgagagtcttagaaatgagactgttcttcagatcaatggattagtaagagcaagacctgacgaagctattaatacaaaaatcccaacaggtgaagtagaagtcttagctaaaaatataaaaattctcaatactgtcactaatacacttcctttctcagtgtcaattcatgatgaggagagtgttaaagaagaaatcaggcttaggcatagatatttagatctcagaagagagagaatgaataataatcttcgattgagacataacactgtcaaagcggctagaagttttcttgaaaacgaaggatttatagaagttgaaacaccaattttgactcgctcaactcctgaaggagccagagattacttagtaccctcgcgtgtatgtggtggcgagttttttgctttaccgcaatccccacaattattcaaacaattgttgatggttggtggagttgaacgttattaccaagtcgctcgttgttttcgtgatgaagatttacgcgcagacaggcaaccagaatttactcaattagatattgaaatgagttttatggaggaaaaagagatcatcgaattaaatgaaaaattaattgtaagtatatggaaaaaaattaaagggattgatctccaaactccatttccgagaatgacttggcaagaatctatggatcgttttggaactgacagacctgatactcgatatggaatggagcttgtcaacacaagtgatttattttccaaaagtggatttaaagttttttcaaatgctatttcttctggtggatgcgttaagtgcatcaccattgaggatggaaataatttgattagtaatgtaagaataaaaccgggtggagatatttttagcgaagcccaaaaggctggcgctggtggactagcatttatcagggttcgagatgatcaagaagtcgatacaattggagccataaaagataatttaactacctcgcaaataaaagaactcctattaaaaacccaagctaagcctggtgatctaatactttttggtgcagggcccacaaacattgttaatagaaccttagatagagttcgt

SEQ ID NO: 298049 - DNA, 1198 bp, Unknown
  Bacterial polypeptide expressing nucleotide sequence isolated from the Sargasso Sea
atgaaatctcattattgtggtgaaattacctcttctaatctgaaggaagaaataacaatttgcggatggattcacagaagaagagatcatggaggtgtgatttttcttgacatcagagatatcaggggaatatgccaagcagttgtaaatccttcaaataaaaaatcttttgaattagcagaatcaattagaaatgaatatgtcgttcagatttatggagttgtaaggaaaaggcttgaaggcacagttaataaaaatatgtttacgggtgaaatagaagtagaagttgaaaatataaatatattaagcaaagcaaatactccagtatttccaattgatgaatatcaagaggttaatgaagatgtgagattaaaaaatagggtactagatttaagaagaccagaaatgaatgaaagaattatcactagatcaaaaattacatctttagtaagaaattatttagataagaatgagttccatgaaattgaaacaccaatacttaccaaggcaacgccggaaggtgcacgagactatattcttccaagcagggttcagcctggaagcttttatgccttacctcagtcacctcaattattcaagcagctcttgatgatcggtggtttagataagtattatcaaattgcaaggtgttttcgagatgaagatctaagagctgacaggcaacccgagtttactcaaatagatatagaagcatcttttttaagccaagaagaaataatgcacattagtgaaaagatgataaaaaaaattatcaaagagttttgtaatgattcattaaaaaaatttcatatcatggattggcatgatgcaatgaaggattatggttgtgataaacctgatctaagaattcctctgaaccttgttgatatatcaaatagcgttaaagatgaggaatttaaagttttttcagaacctgcaaagaaaaaaaattgtagagtagtcgcacttaaagtgcctaatggtaactctttatctagaggacaaatagacgactatacaaaatttgtttcaaagcttggcgcaaagggccttgcttatataaaagttaatgatgtaaatgacttagaaaatggtattcagtcaccaatattaaaattcttaaaaccacttacaatttcaaatatatttaaagaattagaagttcaaacagatgatttaatattttttggtgcaggtt

SEQ ID NO: 298050 - DNA, 1336 bp, Unknown
  Bacterial polypeptide expressing nucleotide sequence isolated from the Sargasso Sea
tctaaaattgtatctaccataagaaattttttagaaggcagaagcttcaatgaaatagaaaccccaatactcacaagagcaactcctgaaggagcaagggactatattttgccaagtcgtgttcaccctggaagcttttacgctcttcctcagtctcctcaactttttaagcaaatgctcatgatgggaggaatggacagatactatcaagttgcaagatgttttagagatgaagatctaagagcagacagacagcctgaatttacacagattgatatagaagcatcttttgttgaggagaaagatatcattgagcttggctcaagcttgctaaagcttctgcttaaagattttgcaaatcacaacatagataatattgatgaacttgactatgcggatgctattaataaatacggctcagacaaacctgatctaagaatacctcttgagttgatagagatttctgatgaagctaaaaaggaggaatttaaagttttctctgatcctgcaaaaaatgatggatcaagagttgttgctttaaaagtagatggaggaaataaacttacaagatctcaaatagatgaatatacaaattttgtaggtaaattgggagcaaaagggcttgcttatataaaaattaatgatgcttctgacatcgaaaatggactccaatctccaattcttaagttcctttctaaagacttcataactgatctttttaacaagttgaatcctgtagatgatgacttaattttcttcggtgcaggaccttctgaagtagttaatttaagtatgagctctttaataaagagacttggaaaagatttagatttatatcaaaaagattgggcgccatgttggataactaatttcccaatgtttgaaagtgatgcaggtaatttgaaggcgctccatcatccatttacaagacctaaagaggatctagaaaaatttagaaaggatccatctggtgctcaagcttatgcttatgacctagttctcaacggatatgaaatcggaggaggttctttgagggttcatgactctaaaatgcaatcggctatctttgatgctctaaatatttcaagtgaggaagcaagtcttaagtttggatttttgcttgatgctcttaaaactggatgtccgcctcatggcggtatagctctaggtcttgatagaattgtcatgctgcttactcaaactgaaaatataagagatgtaattgcattccccaagactcagagcgcatcatgtcttcttacagatgcaccaaatattgttgatgagtctcaactcaatgaactgcatattaaaaaagatcttaatgaggaataaa

SEQ ID NO: 298051 - DNA, 1196 bp, Unknown
  Bacterial polypeptide expressing nucleotide sequence isolated from the Sargasso Sea
caaacagatgcttatgacttctggatttgaaaaatattatcaaattgcaaaatgttttagagatgaagatctaagggctgataggcaacctgagcatactcaattagattttgagatgagttttgttcatcaagaggatgtgctatcaaattgtgaggagttgtattattttctttctcagaaatatcaatccaaagacataatgtatccttttcctaggattacctatgaagaatctatggagcgatatggcacagataaacctgacaccagattttcattagaactaaaaaatttaaatggaattttatctggcactgaattcagggtttttaataatgttttagatagtaaagggtctattaaaggaatttctcttaaaaattcagaattaattaagaggagttatgtagatgaattaaataatttcgtaattgaaatgggtggtggtggagtaattccaatttctttagagaatgtcaaagatatttctgaattaaaaattcagaatgttaaatctcccattgctaaatttttaaatgaagaacatattaaagaaatttataaaacatttaatgcatcaaaggatgatattatttttatttctgctggcgaaactagtaaagttaatgaatgcttaggctctttaagaaataagctagctaaagacctaggattgattgatcagtctaaaattaactttctctttgttaccaacttcccactttttgaaatggataaagattcaggaaaatggattgcaatgcatcatgtattttcatccccaacaaaagagactgagaggttcctagattcagatcctggtaaagtgataggaaatctttttgacttagtttgcaatggggttgagttaggatctggaagcataagaatacataatagaaaaattcaagaaaaagttttttccataattggctattcaagttccgaggtagaagaaaggtttgggtctctacttgaagcatttgaatatggagcccctcctcatggaggcatgggattaggtattgatagacttattgcaatattttctggtgaagattcaataagagatgtaatttcttttccaaaaactcaaagtgcttctgatctattatggggtgctccttctcttattgaagaagatcaaaaaatagaattgaatttaaaaattattgataaagaaaagggataaa

SEQ ID NO: 298052 - DNA, 1093 bp, Unknown
  Bacterial polypeptide expressing nucleotide sequence isolated from the Sargasso Sea
atgcgcagcaacggttgcggcgacctgcgcgagcagaacatcgacaacgcggtgcagctgtgcggctgggtggaccggcgccgcgatcacggtggcgtgatcttcatcgacctgcgggaccgcagcggcacggtgcagatcacggtggacccggatctgggcgctgacgccttcgccgtcgccgagcatctgcgcagcgaaaccgtgctgcaggttgagggaaaagtacgggcccggccgggcgaatccctgaacgacaagctggccaccggtgccgtggaagtgctggccagcggcatcaccgtgctcaacagcgtgaagggcaacctgccctttcccgtgtcggtgcacgacgaggagaacacccgcgaagagctacggctgcgccaccgctacctggatctgcgccgcaagcgcatgaacgacaacctgcgcctgcgggcccagacgattcaggccgcccgtcgctacctcgaagacgaaggcttcatcgaggtggagactccggttctcacccgctccacccccgaaggcgcccgcgactacgtgctgcccagccgcgtctgcggtggtgaatggtttgctctgccccagtcaccgcagctgttcaagcaactgctgatggtgggcggcattgagcgttactaccaggtggcccgttgtttccgcgacgaagacctgcgcgccgaccgccagccggaattcacccagctggacatcgagatgagcttcatggatcaagaggagatcctgcagctgaatgaatccctgatttgttcgatctggaaagcggtgaagggcatcgacctgcccaggcccttcccgcgcatgacctggcatgacgccatggagcgctatggcaccgatcgacccgacacccgctacggcatggagctcaccaacgtgagcgacatcgtgaaggatatgggcttcaaggtgttcagcggtgccgtgaagtcgggcggcgcggtgaagtgcatcgccgttcccggtggcaacgacgcggtgagcaacgtgcggatcaagcccggcggcgatgtgttcagcgaagcccagaaaagcggtgccggcggcctggcctttcatcgcgtgc

SEQ ID NO: 298053 - DNA, 1777 bp, Unknown
  Bacterial polypeptide expressing nucleotide sequence isolated from the Sargasso Sea
atgcgcagtcattattgtggagacgtcaataagtctcacgttggacaagaagttaccttggtaggttgggttaatcgtagccgtgatttgggtggcgtggtctttttagatttaagagacagagaaggtctggtccaagtggtttacgatccagatttacctgaggtgttcaatgtggccagtacgctgcgcgctgagttttgtgtgcaggtaaaaggcgtggttcgtgcccgtcctgatagccaagtcaatgcgcaaatgaagaccggcgaaattgaagtattaggtaaagaactggcaattatcaacagttctgagccgctgccgctgagcttagataactatcaaaacaacagtgaagagcagcgtctaaagtaccgttatttagatttacgtcgcccagaaatggcgcagcgcttaatgttccgcgcgaaagtgaccagtgctgtgcgtcgtttcctcgactcaaatggtttcttagatatcgagacgcctatcctgaccaaggcgacgccagaaggtgcccgtgactatttagtgccaagccgcacttacaaagggcaattcttcgcgctgccgcaatcaccacagctgtttaaacagttactgatgatgtcaggctttgaccgttactatcaaatcgtaaaatgcttccgtgacgaagatttacgtgctgaccgtcagccagaatttactcaaatcgatatcgaaacctcatttatgacgtctgagcaagttatggctaagaccgaagagatgatgcgcggtctgttccttgagatgctgaacgtcgatttaggcgaattcccacgtatgacctataacgaagccatgcgtcgtttcggttccgataagcctgatttacgtaacccattagaactggttgatgtggctgacttactcaaagaagtcgagtttgcggtattctcaggcctagcgaacgacgaagaaggccgtgttgcggcgctgcgtattcctggtggcgcaagcttatcccgtaagcaaatcgatgattacactaagtttgtcggtatctacggtgctaaaggtttagcgtggatgaagctaaacgatctgactcaagggttagaaggcattcaatcacctgtgctgaagttcttaaacgaaggcattgtgaacgaaattatcagccgcactagcgcacaaacgggcgatatcatcctatttggtgccgataacgcgactgtggttgccgaatctatgggcgcactgcgtcttaaagccggtgaagactttaacttgctcgaaggtcaatggcgtccactgtgggtggttgacttcccaatgtttgagaagatcaacggtagcttccacgcggttcaccatccgttcactgcgccacgcggcgtgacaccacaagagctggaagccaatccggctaaccgtgtgtcagatgcctacgacatggtattaaacggctgtgaattaggtggtggttcggtgcgtatccacaaccaagagatgcagtctgcggtattccgcattcttggcattaccgatgaagaagcgaaagagaaattcggcttcctactcgaagcgctgcgctacggtacgccaccacatgcgggtctggcattcggtttagaccgtattatcatgctgatgacgggcgcaagctctatccgtgatgtgatggctttcccgaaaaccaccactgcggcgtgcccgttaaccaatgctccaggttttgctaacccacaacaattggctgaattaggcatttccgtggtgaaagccgcgaagactgaagactaat

SEQ ID NO: 298054 - DNA, 1762 bp, Unknown
  Bacterial polypeptide expressing nucleotide sequence isolated from the Sargasso Sea
tatgcaaagatcttattgcggtcttattgatctcaaatcagttgaacaaaatcttgtaataaaaggttgggtcaatactcgcagagatcatggtggagttatatttatcgatttaagagatcacactgggctagtacaagtagttttcaatccagaagagagggaaatattcgaggctgcgcaagctatacgttccgaatacgtgcttgaggtatgtggcatagtaaaaaagagactagatggtacggataatcctgaaatgtctaccggtaagatagaaattgttgccaaggacttaacaatactcaatacgtctaaaactacaccctttaaagtcaatgatgaggccactaatgaagacttgagattacaatataggtatattgacttgagaagtacatacatgcaggacaatttaagatttagatcaaaactttttagtacgatcagaaatcatctaaatgacatggagtttaatgaaatcgaaacacctattcttacaaaaccaacacctgaaggggcgagagattatattgttccaagtagagttcataaaggcagtttttttgcattaccacagtcaccacaactatttaaacaaatgctaatgatgtctggtttagataaatattatcaaatagcaaaatgttttcgtgatgaagatttgagagcagatcgtcagcctgaatttacacagcttgatatagagtgttcgttttataatgaagaagatattatgcatttatctgagtcattgatgcaaaagatatttacggaattgattgataaggatgtaactttaaaatttccaaaaattagttataaggaatccatggaacgatatggttgtgataaacccgacttaagaaatccacttcatctagttgatatatcagactatcttgttaatacagatttcaaagtattcaaagattgtgtcaataattctgataaacgtattgttgcacttaatattccggatggctctaaattaactagaaagaatattgatgactacactgatcttgttaaaacattcggagctaaaggtttagcttattttaaagttgaagactcaaataacactgacacagggattagctcgccaatcaaaaagtttttaagttctgaagaaatagatgcgattattaaatcagttcaaccatctagtggcgacctgatctttttttcagcagatacagtagatattgttaatagctcaatgtcagccttgatctcaaaaattggttctgatttgaatctattaaaaagtggttttgagtttgcatggattatcgattatccgatgtttgaatatgaaaaggggactaaaaacttaacttctcttcatcatccatttacatccccagcctcaaatgaccaagattttaatgatcagacgctctcacgcgcatatgatcttacacttaatggtaacgaaattggcggtggttcagtgcgtattcatgagaagtcagaacaactcaaagtttttcaggcacttaagcttactgatagtgagatagagagtaaattcggtttttttcttaagtctttggaatacgggtgtccacctcatgcaggtattgcctttggcttggatagaatagttatgttattaagaggcttaagctctattagagataccattgcttttcctaagacacaatcttcatcatgccttctaacggaagccccaactgaaatagattcagagcaactaaaagaacttgcaataaaaaccaataagccaaagacatga

SEQ ID NO: 298055 - DNA, 862 bp, Unknown
  Bacterial polypeptide expressing nucleotide sequence isolated from the Sargasso Sea
tctgattatacagatgtatttaagggatctaattttaaaatctttagcaatcaaatagaaaaaaattctgtagttaagggtattattgtaaatgatacggccaatcaaccaagaagtttttttgataaacttaataattgggcaagagatgaaggagcggctggtttaggatatatttcttttattgagaatgattttaagggacccatagctaaaaacttaaatgaaaatcaattatcgatgcttaaactacaaaataatgactcaattttttttatatgtgataaattaaaagaagctcaaactttttctggaattgttagagataaaatttgtaacgatctaggtttgttaaaaaaagactcatttgaattttgttggatagtagattttccaatgtttgagatagatgaaaaaactaacaaaattcagtttagtcataatcctttttctatgccacagggcgaaatggaagcattagaaaaaaaagatcccttagaaataaaggcttttcaatatgatattgtttgtaacggtgttgaattatcgtcaggtgccattagaaatcataaacctgagataatgtataaagcatttgaaattgctggttatagcaaaaaaatacttgaagataaattttcaggaatgttgaatgctttaaaatttggtgcccctcctcatggaggtagtgctccgggtatagacagaatagtgatgttacttgcgaatgaacctaatataagagaagttatagcttttccgatgaatcaacaagctatggatttgatgatggacgcacctgcaagtatagataaagaacgattagaagaattaggtataaaattaatagacaaaaattaat

SEQ ID NO: 298056 - DNA, 1774 bp, Unknown
  Bacterial polypeptide expressing nucleotide sequence isolated from the Sargasso Sea
atgcatcagtacagaacacataattgtaatgatctgaggtctgacgatatagataaagaagttagattatcaggttgggttcatagaaaaagagatcacggcggtcttttgtttattgatttaagagatcactttggtctaactcaattagtttttgatccagatagccatgcatttcaagaagctgaaaaagttagaaatgagtctgtaataacaattaacggaaaagtcgtaaaaaggtcagatgatactattaatgaatcattatcaacaggaaaggtagagatttatgttgaaacacttgaagtaataggcaattcagatgacataccactaccagttttcggtgagcctgattatcctgaggatataaggttaaaatacagatttttagacttaagaagagaaactcttcataaaaatatagtattaagatctgatatcattaatttcatcagaaacaaaatgatagaaaataattttttagaaattcaaacacctataatgaccgcttcaagtccagaaggggcaagagattatttagtcccttcaagagttcatcaaggaaaattttacgcccttcctcaagctccgcagcagtttaagcaacttcttatgacatctggttttgataagtattttcaaattgctccatgttttcgggatgaggatgcaagatctgacagatcacccggagaattctatcagttagatattgaaatgagctttgttaatcaggaagatgtttttgagactgttgagcctttattaagagaggttttcgaaaatttttcacagaataagacagttaatgaagaatttcgtcggatttcttttgcagatgcgatccagaaatatggaactgataaacctgatttgagagtagaaatagaacttgatgacattacagaggttttcgttgactcaggttttaaaatctttgctgatcaaatatctaaaaatgataaaactaaagtttgggcaataccttctaaagagggtggatcaagggctttttgcgataaaatgaataaatgggctattgaagaggggcagccaggacttgggtacatattttttaaagatggaaaaggatcaggaccgattgctaaaaacattggagatgaaaaaaccgaacttattaagaacaaatattcgcttgatgacggcgattcgattttctttgtttgtggtgttcctaataatttcttagattttatatccaaagctagagtgaagatcggaaatgaattaggtttgataaagaaggacacttttgagttttgttggattgttgattttccaatgtttgaatacaatgaagagcttaagaaaattgatttttcgcataacccattttcaatgccacaaggaggtttggaggtgttaaataattcagatccacttgaaattaaagcctttcaatatgatatcgtttgcaatggagttgaattatcttcaggtgctataagaaatcataggcaagatattcttttaaaagcttttgaaattgcaggttacgatattgaagaaattaagagtcgctttggagctatgtataatgcttttggttatggagctccacctcatggaggtatcgctcctggtatcgatagaatcgttatgttaatagcaggggttgaaaatataagggaagtaatagcttttccaatgaatcaacaagcacaagaccttatgatgaacgctccatctgaaatttccaaagaacaacttaaagaactcggcattaaaattgtagaaaagaaagagtaag

SEQ ID NO: 298057 - DNA, 472 bp, Unknown
  Bacterial polypeptide expressing nucleotide sequence isolated from the Sargasso Sea
atcgatcggtgatcacggacgtccaataccagctcatcatccattcactatgccacatacttcagatatggaagcactcgattcagctcagggggaagaatatttggacataagatctcaagcatacgaccttgtattaaatgggtgggaattagggtcagggagtgtgaggatccatacgcctgaaatccaatctaagatctttgaaattctagggattaatgaagaggagtccaaagagaaatttgggttcttgctagatgcgtttcgatatggcgcaccaccacatgcaggattcgctttcgggattgaccgcttagctgcgattctctctggcgaagagaacattcgagaagtaatcgcattcccaaaaacacaatctggtgctgaccctctcacgaacgcaccaactcaacttgaaaataaccacctagaagaactcggactccgcctcatacctccaagtacttaa

SEQ ID NO: 298058 - DNA, 400 bp, Unknown
  Bacterial polypeptide expressing nucleotide sequence isolated from the Sargasso Sea
aggtgaattaaaagataaagattttgaaagtcctcttgatattcttgcttaccaatatgatatagtttgtaatggaattgagttgtcttctggcgcaataagaaatcataaacctgatcttatgtataaacttttttcaattgcaggttacaaaaaagcagaggtagatgaaaaatttagtgggatgattaacgcattaagttatggtgcaccaccacatggtggaatcgcgcctggaatagacaggattgtaatgcttttagcaaacgaaaaaaatataagagaagttactatgtttccaatgaaccaaaacgctcaagatttaatgatgaacgcaccatcagagatcaatcaagaccaattggaagagttaaatctctcaataaaaactaaaaattaa

SEQ ID NO: 298059 - DNA, 1667 bp, Unknown
  Bacterial polypeptide expressing nucleotide sequence isolated from the Sargasso Sea
atttttagatgttagagatataaaaggaatatgtcaggtagttgttactccagataacaaaaaatcatttaaattagcagaatcaattagaaatgaatatgttattcaaattaatggtgttgttcgaaaaagactcaaaggaactattaacaaaaacatgcatacgggagagatagaaatagaagtaaaaaatatagatattctcagtaaagcagatacacctgtatttccaattgatgaataccaagaagtaaatgaagatgttagattaaaaaatagggtgcttgatctaagaaggcctgaaatgaatgagagaataataattagatcaaaaatcacctcactcattcgaaactatcttgataagaatgatttcaatgaaattgaaacaccaatacttacaaaagcaactcctgaaggagcaagagactatattcttccaagcagagttcaaccaggtagtttttatgccttgcctcagtcaccacaactttttaaacaattattaatgatcggtggtttaaataagtattatcaaatcgcaagatgtttcagagatgaggacttaagagctgatagacaaccagaattcacacaaattgatatagaggcgtcttttattgaacaagatgaaattatgcaagttagtgaaaaaatgataaaaaatattattaaagatttttctggagataaattagataaatttaaagtactagactggaatgatgctatgcaagattatggttgcgataagcctgatttaagaatacctcttaagcttatcgaaatagctgatttagttaaaaatgaagagtttaaagtattttcagatccagcaaagaataaagattcaagagtggtggcattaaaagttcctaatggtaattctttatctaggggacaaattgatgattatacgaattttgtttcaaagcttggtgctaaaggcctcgcttatataaaaataaacgatgtcaaagatttagaaaatggaattcaatcacctattttaaaatttttaaagagcgaaacaatatcagatattatagatgtattaaaagttaatactggtgatttaattttctttggtgcaggctctcaatcaatagttaatttatcaatgagcagtttaataaaaaaacttggtgaagaccttaatctctatacctcaaagtgggctccttgttggatcattaattttccaatgtttgagaagaatactgagggtgacttaaccccacttcatcatccatttacactacctaaatgttctaaaaaagagttattagaagatccttcaacatcaattgctcatgcatatgatgttgtgttaaatggatatgaaatcggaggtggatctttaagaatttatgataaagatatgcaacaaacaatttttgatattttaaatatttctaaagatgagtctaataaaaaatttggttttttattaaaggccctttcttctggttgtccccctcatggaggcatagcatttggccttgataggataataatgctagtaacagatacttctaatataagagatgttatagctttccctaaaacacaaagtgcgacatgtctccttacagatgctccaagtaaagtagaaaaagaacaacttgatgaattaaaaataattagcactcataaggaagaataat

SEQ ID NO: 298060 - DNA, 361 bp, Unknown
  Bacterial polypeptide expressing nucleotide sequence isolated from the Sargasso Sea
aaagcttttcaatatgatatcgtttgtaatggcgtgaaattgtcatctggcgcaataagaaatcatagacaagatattcttttaaaggcttttgaaatcgctggatataacattgatgaaattaagaaacggtttggagcgatgtacgatgcttttggctatggtgcaccccctcatggtggcattgctcctggtattgacagaattgtaatgcttattgctggtgtagaaaatatacgagaagttattgctttccctatgaatcaacaagcgcaagatcttatgatgaatgcaccatccgaaatatcctcagatcagcttaaagaaatcggcattaagattatcgagaagaaagaataga

SEQ ID NO: 298061 - DNA, 1741 bp, Unknown
  Bacterial polypeptide expressing nucleotide sequence isolated from the Sargasso Sea
catgaagtctcattattgcggtgaaataacatcttcaaatcttaaagaagaggtaacaatctgtggctggattcatagaagaagagatcatggcggtgtaatttttcttgatgtaagagatataaaaggtatttgccaagctgtagtaaatcctgacaatgaaaagtcttttaaattagctgagtcaattagaaatgaatacgttgttaaaattaaaggtgatgtaagaaaaaggttagaaggaacaataaataaaaatatgcataccggagagatagaaattgaggttaaggacttaatcattctcagtaaagcaaatacacctgtctttccaattgatgagtatcaagaagtaaatgaggatgttaggttaaaaaatagagttttagacctaagaagacctgaaatgaacgaaagaataataactaggtcaaaaattacttctttaataagaaattatttagataaaaatgattttcatgagattgaaacacctatattaactaaagctactccagagggagctagagattatattttaccgagcagagttcaaccaggaagtttctatgctttgcctcagtcacctcaactttttaagcagctattaatgataggtggcctagataagtattatcagatagctagatgttttagggacgaagatttaagagctgatagacaaccagagtttactcaaatagatattgaggcatcattcattgatcaagatgaaattatgaagataagcgaaaagatgattaaagatattatcaaggaattctgtggagacaagctagaaaaatttaaaataattaattggcatgatgctatgcgagattatggatgtgataaacctgatttaagaataccacttaaactggttgatatatctgaattagtcaaagatgaggaatttaaagttttttctgaacctgcacaaaaaaaagagtctagagtggtcgctttaaaagtaccaaaaggcaattcattatcccgaggacaaatcgatgactatacaaaatttgtatctaagcttggtgcaaaaggtttagcttacataaaaataaatgatgtcaacgatttagagaatggtattcaatcaccaatactaaaattcttaaaaccagaaacggtaacaaacattatcaagtctctagatactaagactgacgatttaattttctttggtgctgggagtgaatcagttgtaaatttgtctatgagcagtttaattaaaaaattaggagaagacttagatttatatctaactaaatgggcgccttgttggattgtagattttccaatgtttgaaaccagtaaagagggtaatttaacaccacttcatcatccatttacgcttccaaaatgttcagctaaagaattggaggataatcccaaagattcaattgctcatgcgtatgatgttgttttaaatggctatgaaataggaggaggttctttaagaatttatgataatgcaatgcaaaaaattatttttaatattcttaatatttcaaaagaggatgcagaaagtaaatttggattcttattaaaagctctttcatcaggctgtccacctcatggaggaatagcatttggcctcgatagaatagtaatgctagttactgatacgactaacataagagatgttattgctttccctaaaacacagagtgctgcttgtttgctaactagatgcatccaagtaaggttgaaaaagatcagcttgatgaactaa

SEQ ID NO: 298062 - DNA, 1431 bp, Unknown
  Bacterial polypeptide expressing nucleotide sequence isolated from the Sargasso Sea
ttggtgaacaagattatccagaagagacaagattaaaatatagatttttggatttacgcagacaagaaatgcatgaaaatattgtattaagatcaaaagtaatttcttttataagaaataaaatgatagctaatggttttttagaatttcaaactcccatattaactgcttcaagccctgaaggagcaagagattttttagtgccaagtagaatgcatccaggcaaattttatgctttaccgcaagcaccacagcaatttaagcaaatggttatgatttctggttttgataaatattttcaaattgctccatgttttagagacgaagacggtagagccgacagaagtcctggtgaacactatcaattagatatggaaatgtcatttgttgaacaagaagatatctttaaaatggtagagcctattttttttgatttattttttaaatttggaaaaggaaaaaaaatttcaaaacctccatttagaaaaattacttataaaaattcaatgttaaaatatggtactgataaacccgatttaagaaatccaattgaaatatttgatgttacagaagtttttaaaagagatgatgttaaattagatatatttaaaaagttaattaaaaaaggaggaattgttagagctattccagctccccaaacatcttctaaacctcgaagcttttttgacgcttataataattgggctaaagacgaaggaggaaaaggcctgggttatattatattagaaaaaaataatggaaaattagttggaaaaggaccaatcgctaaatttttctcagaaaaagctataagtgaattagtaaaagtttgtaaattaaaagaaaatgattcagtatttttttcttcagataaaataaaagaagcagaaagaatatctggcatggctagacaaaaattgggtaaagaattaaatcttatagattctaacactttcgaattttgttggataactgattatccaatgtatcagtatgatgaaagagaaaagagaattgattttagtcacaacccgttttcaatgccacagactgatcttaaagaatttgataaacttgatccattatctataaatgcatatcagtatgatttagtgtgtaatggttatgaattatcttcaggcgcaataagaaatcatttaccagaattaatgtacaaagtattttcaaaagtcggttattcaaaaaaagaagttggtaataaatttgaaggtatgattaaagccctttcttatggatcaccacctcacggaggtatggcgccaggaatagatagaattgttatgttgctagcaggaaaagataatattagagaagttactttgttccctaatgaaccagaacgcacaagatttattaatgggagccccatcaaaaccaagcgattctcaactcaaggagttaaatattaaa

SEQ ID NO: 298063 - DNA, 1759 bp, Unknown
  Bacterial polypeptide expressing nucleotide sequence isolated from the Sargasso Sea
aatgtttaaacgaacacacaattgtggcgagcttcgcataacagatattggcgagaccgttaatctgaatggttgggtaaatacagtcaggttgcatggtcaggttgtatttgttgatctacgggatcgctatggtaaaacgcaaattgtttttaatgcagattcttttcatggagactttgaagtagttaaaaaattatcgatggaggatgttttatctgttaaaggtaaagtaagagagaggtcggaatctgcagtgaatccaaatctaaagacgggagagatcgaggttcttatctcagatcatttaatgctgaatgaggcatcaccattgccttttgtaattcatgatagagaaagtgcagaggaagacctaaggcttaagtaccgctatctagaacttcgaatggatgttctacagcataatatcttaactcgacataaaacctatcaagccactcgatcttttctttctgatcatgattttgtagaggtagaaacaccagttctgatgaaatctacgccggagggtgcaagagactatctggtacctagtaggatccatcaaggacaattttatgcacttccgcagtcccctcagatatataaacaaatactgatgatatcagggtatgaccgctattttcaaattgtgaaatgttttagagatgaagatctgcgggcagataggcaacctgaattcacgcagatagatattgagatgtcctttgttgatgaagaagatgtttttacaaatatggaaaatatgacccgttatatctttaaaacggttaatgatgtagacctaccagatccattcccaagactaacctaccaagaggcgatggaaatctatggttcagataaaccagatcttagatatgaaatgcaattattagatctgaaaaaatatacggatatatctgattttaatgcattccgatcagttgagagagtaaaaggaatcgttgttaaaggtggtgcgaaatattctagaaaaataattgatgaattaactgagtttgttaaaaaatataaagctaaaggcctggcttggatgaaagtacaacaagatggctttgaaggtggtattagcaaatttttctctgcagatcttcaagactcactgcaaaacgaattaggtctgaaagaaaatgatattctatttatgatcggtgatgattcgtcgatcgtactaaatgctctgggtcaattacgatcaaaaattgcaaagatggaagaccttgctaacaaagatgaatttaaacctgtctgggtgacagagtttcctatgttcgatcatgatgatgaaatgggtcgatttgtggctatgcatcaccctttcacagcgccacgagaagaagatgtagaattacttgacagcgatccatccaaggccttgagccgcggatatgatctaacaatgaatgggtatgaaattgctggtggatcgatcaggatacatgctccaaagattcaggaaaaagtattttctttacttggattaagccatgatgaagcagttgaaaaatttggatttttagtcgaggctcttacttatggtgcaccaccgcacggaggcatagcgttcgggtttgataggcttgtgatgttactagctggaactgaaaatataagagatgttatagcattcccaaagacaacttcggcaacttcattaatggatcaaagcccaagttctgtaagtcaattgcaattaaaagagttaggcatcacaattaatgatccagaagattaa

SEQ ID NO: 298064 - DNA, 1768 bp, Unknown
  Bacterial polypeptide expressing nucleotide sequence isolated from the Sargasso Sea
atgcgctctatctattgcggacaggtcaatgaggcccatgctgggcagaccattacattgtgcggttgggtccatcgtcgtcgcgatctgggcggcctcatctttatcgacatgcgcgaccgggaagggatcgtgcaggtgttcttcgatccggacaagccggacgccttcgccctggcctccgaactgcgcggcgaattctgcattcaggtctccggcgtggtacgcacccgtcccgactcccagcgcaacagcgacatggccaccggtgccatcgaggtgtttgcccacgagctgaccatcatcaaccgtgccgagccgctgccgctggacttcaaccaggtcaacagcgaagaggtgagcctcaagtatcgctacctggacctgcgtcgccccgagatggccaagtacctgaagacccgcgccaaggccagtgccttcgtgcgccgcttcatggacgagcacggcttcctcgatatcgagaccccgatgctgaccaaggccaccccggaaggggcccgcgactacctggtgccgagccgcgtgcacaagggcaagttctacgccctgccgcaatccccgcagctgttcaagcagttgctgatgatgtccggcttcgaccgctactaccagatcgtcaagtgcttccgcgacgaagacctgcgtgccgaccgccagccggaattcacccagatcgacgtggaaacctccttcatgaccgcgccgcaagtgcgtgaaatcatggaagagatgatccgcaaactgtggctgcacatcctgaacgtggatctgggcgacttcccgatcatgaccttcgatgaagccatgcgtcgctacggctccgacaagccggacctgcgtctgccgatggagctggtcgatgtggcagatctgctgaccgccgtcgagttcgccgtgttcgccggccccgccaacgatccgaaaggccgcgtggctgccctgaaagtaccgggcggcgccgagctctctcgcaagcagatcgacgagtacaccaagtttgtcggcatctacggtgccaagggcctggcctggatgaaggtcaacgaagcggccaatggcatcgaaggggtacagtccccggtggccaagttcctctccgacgccatcgtgcgcgagatcctggcccgcaccggcgcagccgacggcgacatcatcttcttcggtgccgactccaagaaggtggtgtgcgatgccatgggcgccctgcgtctgaaagtgggccgcgatctgggtctgctggagaacgtctggaagccgctgtgggtcatcgacttcccgatgttcgaagaagatggcgaaggcggtctggctgccatgcaccacccgttcaccgcgccgagcggcctgagcccggagcaactgaaagccaacccggtaggcgcttacgccaacgcctacgacatggtgatcaacggctacgaagtgggtggcggttctgtccgtatccacaacagcgagatgcaggccaccgtgttcgacatcctggggattaccccggccgagcagcgcctgaagtttggcttcctgctggacgccctgaagtacggtaccccgccgcacgccggcctggccttcggcctggaccgtctgagcatgctgctgaccggtactgaaaacatccgggacgtgattgccttcccgaaaaccacggcggccgcctgtctgatgacagacgcccccagctttgccaacgccgcccaactgggcgagctggcgattgcgaccaccgtcaagggtgatgaataag

SEQ ID NO: 298065 - DNA, 1510 bp, Unknown
  Bacterial polypeptide expressing nucleotide sequence isolated from the Sargasso Sea
tatgtacagaactaataattgtggagagcttaaaatttcagatgttggaaaaactgtaactcttgcaggttgggttcaaaaaataaggaataaaggttttttaatttggattgatctcagagacagatatggcataactcagcttatcataaattctgaaaaaagttcaaaaaaagttattgattctgtaaaagatattggaagagaatttgtaattcaagttgaaggagaagtaattaaaagagaagcaataaataagaatatcccaactggtgaaattgagatattagttacagaaataaatattttaaattcatccaagttacccccttttacaattgaaaatgaaactgatggaggtgaggaattaagaatgaagtataggtatctagacctaagaagaccagctttaaaagacaacattatttttaggaatgaattaacttttcaagtgcgtaagtacttaaaagaggagggatttattgatattgaaactccctatttaatcaaatcaacacctgagggagcaagagattttgtagttccttctagaataaatcctggagaattttatgcacttccacaatcacctcaaacatttaaacagttgcttatggtatctggatttgataaatatgttcaaattgtaaaatgttttagggatgaggatcttagagctgataggcaaccagaatttactcaaattgattgtgaaatgtcatttgtcaatcaagaggatatcctaaatacttttgaaggattagtcaaaaatttatttaaagtttgtatcggagcatctttggaaaaatttgatcgtatatcctacgctgatgcaatggagctttatgggtctgataaacctgatacacgatttggaatgaagtttttaaacctttcagaaaaagctaaaggaagtggttttaaaatttttgattccagtgaatctatttatggatttactattgaaaatggtgaatctttttcaagaaaagatattgattattatacagactgggttaaaagacctcaaattggtgctcttggtttgatttggataaagcacaatcaagatgggtcagtgaaatcttcagttgataaattctttaatgaagaacaattaaaatcaatgacaggctcgaaagctggagatctaacatttataatttctggtgataagaaaaagacacttactcaacttgggagtttaagaatacatgttggtgaaaaactagggcttagagataaaaataaatttaatgcattatgggttactgactttcctatgttcgaatgggatgaagaaactaaaagatatcatgcaatgcatcatccatttacatcaccagttgaaaatacaattggggaggatccaggatcaactctagctaatgcttatgaccttgttataaatggaaatgaaattggtggtggatcaataagaattcatgatcaaaaactacaagaggaagttttctctattttagggttttctaaaaaaggaggcgtttga

SEQ ID NO: 298066 - DNA, 961 bp, Unknown
  Bacterial polypeptide expressing nucleotide sequence isolated from the Sargasso Sea
tttgaacattaacgaattagtaaatgcaaaaaacaatgctgaagttcaaaatgttaacggttgggtttcatctataagagatcatgggggacttacttttattgatcttcgtgatttttattcttctatacaaattgtttacgagcaaagcaaaaatatgccttctgatataaagaatgaatattacatttctgtatcaggtgtatttaaagagcgagataaagaactagttaataaaaatactcaattaggcatgtatgagattcaggcttctgaaataaatattataaataaaagtaagactttgccatttcaaatagataacaatattgatactgacgaaagtataagattgaaatatagatatcttgatttgagaagacaatctatgaaatcaaacatagtcggcagatctaatacttttaaatctataagaaagattatggacaaaatggatgtattagaaatagatacacctactcttattaaatcaactcctgaaggtgctaaagattttttagtaccttcgcgtaaaaacagcaatactttttatgccttaccacaatcacctcagatgtataagcaactattcatgatggctggatttccaaattattaccaaattgcaaagtgttacagagatgaagactcaagaaaagatagacaacctgaattcactcaactggatgtagaattttcgaatgctaatcctgaaatagttaaaaaaaatattgaaactatcgttaaatttgtctttaaagatgcatacgatataaaaatagactctgcatttaaaaatatgactttttctgaagctatatctttgtatggaactgacaaacctgatttaagaattaaagaaacgataagtgattgtactgaagtttttaaagcgactgaaattaattttttgagtgatattttaaataaagagggtgtaatcagatttttaaaaacatga

SEQ ID NO: 298067 - DNA, 693 bp, Unknown
  Bacterial polypeptide expressing nucleotide sequence isolated from the Sargasso Sea
attgagcaaatataggacacacacttgcggagaactaactttaaaaaataaagatcaaacaataaagttatcaggctggataaataagaaacgagatcatggaaatctattatttttagatttaagagatcactatggattaactcaatgtgtaattgatgagggtaataaaatttttaaagaaatagaaaaacttccactagaaactgtactacaagttgaaggcaaagttttagtaagggaaaaagatacaattaacgaaaatttaaataccggagaaattgaagtaggaattgaaaagtttaaaatacttgcaagaactaaagaattaccactacctgttttttcagatcaagaatactctgaagaaattagattaaagtatagatttttagatttaagaagaaatagaatccataataatattattttaagatctaaaattatttcatttattagatctgaaatgcaaaaatatggttttttagaatatcaaacacctatattaacttcatcaagtccagagggtgctagagactttttagtaccgagtagactaaacccaggtaaattttacgctttacctcaagcgccacagcaatttaaacaattgatcatggtgtctggttttgacaaatattttcaaattgcaccatgttttagagatgaggacgcaagagcagatagaagtcc

SEQ ID NO: 298068 - DNA, 1608 bp, Unknown
  Bacterial polypeptide expressing nucleotide sequence isolated from the Sargasso Sea
taaaagaaatatttgaaattgcagattcttgtagaagtgaatatgttgtaaatattaatggaaaagttagaaagagaatcgaaggtgctataaacccaaaaatgtcaacgggtgaaatagaaatagaagcaacttctttaactatttttagttcagcagtgaccccacagtttccattagatgattatcaagatgtgaatgaggatataagattaaaatataggttcttagatttgaggcggcctgatgtaaaccagagattagttcagaggtctaaaataacctcagaaatcagatcaatcttagaaaaacataattttcatgaaattgagacacctattcttacaaaagctactccagagggagcaagggattacttagttccaagtagggttcatccaggtgaattttttgcattacctcaatctccacaactatttaaacaactacttatgattggtggcttggataggtactaccagatagctaagtgctttagggatgaggatttgagggctgacagacagccagagtttactcaagtggacatagaagcatccttcattattaatgaggatatttttgaaatcgcagaggatttagtaattactttgctttctaagtttacagactacaaaaagacctctgtcccaagaattacctatgcagaatccattgaaaaatatggatgtgataaaccggacttgaggattcctttgcaacttaaagatatttctgagcttgtaaaggatgaggaatttaaagtattttctggtccagcaaatgatcctttgtccagagtagttgccttaaaagttcctgaagccgcatcaatgactagaaaaaaaatagatcaatatactgattacgttggcacgcttggagcaaagggcttggcatatataaaagtagtcgagcttgattctgataatggacttcaatcaccaatcttaaaattctttaaaaaagaaacagtagaatcaattctaaattcattagatgtaaaaaataatgacattattttttttggtgcaggaagtaccaaaatagttaatttatcaatgagctcattaattaaaaagcttggcgaagatctaaatttaatcagttcatcttgggctccatgttggattgttgactttcccatgtttgaaagaaataaagataataatctgacttcattacatcatccatttaccttgcctgctgtaactgttgatgagcttaaaaacgatccagaaaacgcgttggcatgcgcttatgattttgtgttaaacggatacgagctcggaggaggatctttgagagtttatgaaaagtctatgcaaaaagaaatatttgaaattttgggaatttcaaatgaagaagctaatgaaaaatttggattcttgctatcagctttgtcatctggatgtcctcctcacggcggtattgcatttggcttagatagaatagttatgttgttgtctgatacaactaatattcgagacgttattgcttttcccaaaacacaaagtgcctcatgtttgttaacagaagcaccaagtgtagtgtctgatgatcaacttgacgagctcaatatctcatcaacttctaataaggagtagt

SEQ ID NO: 298069 - DNA, 1397 bp, Unknown
  Bacterial polypeptide expressing nucleotide sequence isolated from the Sargasso Sea
attgacaaaatatagaacacataattgtaatgagttaaatttaactcataaaggaaatcaaataattttatctggttgggttaataaaaaaagagaccatggaaatctattatttattgatttaagagacaactatggattaactcaatgcgtaattgacaaaagtaattctatttttaaagatattgaaaaattaccacttgaaacagttgtaaaattagaagggacagttgttgagagaacaaaagaaacaattaatcttaacatagctactgggcaaattgaaatttcaataaatacttttgaaatactaggaaccacaaaagagttacctatgcctgttttttcagaacaagaatattcagaagaaataagacttaaatatagatttttagatttaagaagaaaaaaaattcatcaaaatattattttaagatcaaaaataatatcatttataagatcagaaatggaaaatttgggttttttagaatttcaaacacctattctaacttcatcaagcccagaaggagcaagagactttttagttccaagtagattgaacccaggaaaattttatgccttacctcaagctccacaacaatttaaacaactaattatggtttcaggatttgataaatattttcaaattgctccttgttttagagatgaagatgcaagagctgatagaagtccaggtgaattttatcaattagatttagaaatgtcatttgtagaacaagaagatgtttttaatgttgttgaaaaattaatggttaatacctttaaaacattttctaacaaaaaattattaaacgatgagtttccaagaatttcttataaagaagcaatgttaaagtatggaagtgataaaccagatttaagaaatcctcttataataaatgatattactgaaatatttacaagagaagatgtatcttttgaaatatttaaaaagttagtaaaatctggttcaagagtaagatgtatagtaacaaaaaataccaaggataaaccaagaagctttttcgataatattgataaatgggccaaagaacaaggggcatcaggtttggcttattttacatttgaaaaagatactgagttatctggtaaaggacctataggaaaatttttcaccaaagaagcattgctagaaataatgaatttaactaatgcggaagtaggagatagcatttttctagcttgtggaaaacaaaatgaattagaaaaaataacttctcaggcaagaaataaaattgcagaagatttagacttaatagatgaggatgtctttgcgttttgttggatagttgactatccaatgtttgaaagagatgaggttaccaacaaaatcgaatttagtcataatccattttctatgccacaaggtgatttga

SEQ ID NO: 298070 - DNA, 1640 bp, Unknown
  Bacterial polypeptide expressing nucleotide sequence isolated from the Sargasso Sea
atggaatcacacaaataagttgttgatacatttgagcgatcattttaaaacaatagaatacttatcattggagagcgttatttgtgtgtctggcaaggtcctgaaaagatctgaggatacaattaataaaaacctacctactggggaagtagaagttaatcttgaaagtttagaggttttgtcttcggcagcatctttgcctttacaagtcaattctcaagaagattatggggaagaaacaaggctgagatatagatatcttgatttgagaagatcacgcccgcattcaaatattgttttgaggtcaaatattatacaaaaaatcagagaaaaaatgttagaccaagggttcctagaatttcaaacaccgatactcacagcttcaagtccagaaggcgcaagagatttcttagtaccgtctagaataaataaaggcaaattttatgccttgcctcaagcgccgcagcaatttaagcagttaataatgatttctggatttgataaatactttcaaatagctccttgctttcgagatgaggatagcagagccgataggtcaccaggtgaattttatcaattagatttagaaatgtcatttgttgaacaacaagatgtttttaatgcagtgcaaccagtaatttatgaggtttttagatcatttacaaaaaaagaagttttagaagattttgaaaaaattaagtatcatgatgcgatacttaaatacggtacagacaaacccgatttaagatttgacttaattattcaagatgtaacagaaattttttcagattctgaatttaaaattttctctaataatattaaatctggggcagtagtaagaggtgtacctggactaaaatgtggcacaagagcaatagctgataaaatggactcttgggcaaaaggtgagggagcaccaggattaggttatattatttttaataacggagagggtaaagggccaatagccaatgctttaggaaagatgaaagtgttagaattgatgagacaatttgaactctcagacggtgatgcattgttttttacctgtgataaattaaaagcagcctcagaattagcaggtaaagcaagattgaaaattgctagagatcaaaatatgattaatacaaatcaatttaaattttgttggattgttgattatcctatgtttgagattaatgaaaaaactaataaaattgaattctcacataatcctttttctatgccgcaaggaggtatgcaagctctggtagaacaaaacccccttgatgttttggcataccagtatgatttggtatgcaatggaattgaactttcatctggagcgattagaaaccatgttcctgaaataatgtataaagcttttgaaattgcaggatattcgaaagatgtggttgatgaaaaattcacaggtatgataaatgcgttttgttatggtgctcctccacatggcggcattgcaccaggtattgatagaatagtgatgcttttagcagacgaacctaacattagagagataattttgttccccatgactggtaaggctgaagatttaatgatgggagcgccttcagaaataaataaagaacaattaaaggaattaggaatagaatttagtataaaaaaaaatattagctaac

SEQ ID NO: 298071 - DNA, 436 bp, Unknown
  Bacterial polypeptide expressing nucleotide sequence isolated from the Sargasso Sea
tttgtggcttgcatcaccctttccagcgccacgagaagaagatgtagaattacttgacactgatccatccaaggctttaagccgaggatatgatctaactatgaatgggtatgaaattgctggtggatcgatcaggatacattctccaaagattcaggaaaaagtattttctttacttggattgagccatgatgaagcagttgaaaaatttggatttttagtcgaggctcttacttatggtgcaccaccgcacggaggtatagcgttcgggtttgataggcttgtgatgttactagctggaactgaaaatataagagatgttatagcattcccaaagacaacctcggcaacttcattaatggatcaaagtccaagttctgtaagtcaagcgcaattaaaagagttaggcatcacaattaatgatccagaagattaa

SEQ ID NO: 298072 - DNA, 621 bp, Unknown
  Bacterial polypeptide expressing nucleotide sequence isolated from the Sargasso Sea
taaaagaattaaatcttaataagaatgaccttgttttttttggagctggtaaagcgaagattgtaaacgattacatgagtagactaataaataaaattggaaaagatttcaatttattaaaagatggctatgaagcatgttgggttactgaatttccaatgtttgaaaaagataatgatggtaaagtatctgcattgcatcatccttttactagtcctgctcagtctgatttagaggaactacaaaaaattgatataaatactattaaatcaagagcatatgactttgttgtaaatggaatagagctagggggaggttcaataagaattcataacaaagaaattcaagagcaaatatttaaacttctcaatttaagtcaaaaagaagctaatgaaaaatttggattttttttaaaagtacttggcacaggctgtcctcctcatggaggtattgcatttggtttagatagaattgcgatgattcttacaggcgcagagactataagagatgttattgcgtttcctaaaactcaatctgcaatgtgcttacttacagaagcaccaggagaggttcctgatgaaagtctagaagagttgaacataaagaaaattgaagaataat

SEQ ID NO: 298073 - DNA, 1033 bp, Unknown
  Bacterial polypeptide expressing nucleotide sequence isolated from the Sargasso Sea
ctttcattagaagttcgaaattatttatctgataatggttttcttgatattgaaacaccttatttgataaaatctactccagaaggagctcgagattttgttgttccttcaagaatgcatcctgatcaatattatgctcttccacaatcacctcaaatattcaaacagctgataatgattggcggacttgacaaatattatcaaattgtcaaatgttttagagacgaagacctaagagcagatagacaacctgagtttacccagattgattgtgaaatgtcttttgttaatgaatctgatattctagaacaatttgaaggtttgattttacatttattaaaaaagtttggaaaaacagtaaagacttttccaaaaattacatataaagatgctctagaaaattatggtacagataaaccagatttaagatttgatataaaaattaatgaagttactgatagtgttaagggtaaagattttaacatttttgataaagctgaatacataggatgtctagctctaaatgataaagctgaattgtctagaaaagaaattgacgaccttactgaatgggtaaaaaggccacaagttggagcaaatggtatgttatggattaaaaataatggtgatactataaaatcatcttttgataaattttttaccccagatgatttaaaaaatctgacaaaaaatattggaagcaaagccggagatcttatacttataatggcaggtacaaaaaaagagactcttgaacatcttggaacattaagactagaaattggcaagagatataattttataaaccatgatttattctgcccagcttggataacagacttccctctttttggatatgatgatcaagagaaaaaatttaagtcaatgcatcatccttttacatctcctaataaggaaagtctagatcatttagattcaaaccctgagaatgttattgcaaatgcatatgatcttgtattaaatggaaatgaaattggaggtggttcaattagaattcatgattataacaccc

SEQ ID NO: 298074 - DNA, 1307 bp, Unknown
  Bacterial polypeptide expressing nucleotide sequence isolated from the Sargasso Sea
gtcccttgcaagaaattttttcaatgaaaaaggttttattgaaattgagaccccatatttaactaaatctagcccagaaggagccagggattatttagttccaagcagggtacatcaaagttctttcttcgcacttccgcaatcacctcagattctgaagcaaatcttaatgacttctggttttgaccgatactatcaaattgttagatgctttcgagatgaagatcttagagctgataggcaaccagaatttacccaaattgatttagaaatgtcgtttgtgaatcaggaagatgtcattgatatagttgaagagcttctcaaaaaaatatttatggaaataaaaggtatagacttaaaatcaaaatttaaaagcattacttataaggaaagcatggaaaaatacgggaacgatagacctgatttaagatttaatttagagcttaaaactattacggaaatattcaaagatactaaatttaaggtttttaaagacgttgttagtgctgatggttcaattaaatgtattaaagttaatggctcaagtatgaccagaaagaatatagatgatttaacttcatttgcccaagaacatggagcaaaaggcttagcttggattaaagtcctggaaactgaattgcaatcaccaattttaaaatttttttcagaacaagaaattaattccttaaaagaaaaattgaaactaagtttgaacgacatagtattctttggtgcaggtgacctggaaaccgttaataattatatgtcggctgtaagaaataagctaggcgaagatttaggtttaatctcaaaagactcatatgaattcgtttggattacggatttcccactattcttaaaagttgatgatagtcttacatcaacacatcacccgtttactatgcctcaaaatgaagtcttaaatgaagctaatttaagtagtcaactatctcaagcttatgatatcgtccttaatggaacagaaattgggggtggcagtataaggattcataaaagagatttacaagagaaaatatttaatattttggggatttctaaagaagagtatgaaagtaattttggctatcttttaaatgctttggaatcaggcacaccacctcacggtgggcttgcattaggattagacaggttgatgatgtatctgactgattcgcaatcaattagagatataattgcattcccaaaaactcaaaaagcctcatgcctattgaccgaagcaccgtcaaaagtattctctgagaaacaattaaatgaattgggaattaaactattagatgaggagtaat

SEQ ID NO: 298075 - DNA, 517 bp, Unknown
  Bacterial polypeptide expressing nucleotide sequence isolated from the Sargasso Sea
gggttggcgaatgaaaatcagttggaatttgcttacataatcgactttcctctatttgaacccggagaaaatgaaggacagtggacagctgcccaccatgcttttactatgcctaaagatggtgacgctgcgaaattggaaacagaccctggatcggtcatagcagattcttacgatttggtgtgtaatggtttagagatagctagcggaagcataagagtgcatgacagagaactacaagaacgaatattaggtgtattaggatatagtactgatcaaataagtgaacgttttggacaattattagaatcatttgattatggtgctcctcctcatggaggaatagctccaggaatcgataggttagtaatggtacttgcaggcctagaaagcatcagagacactatagcattcccaaagactcagagtgcagttgatcctctgttcgggtcacctggcccagtagaagatgttcatctggccgagctaaagctaaatattattgatacagactaga

SEQ ID NO: 298076 - DNA, 1045 bp, Unknown
  Bacterial polypeptide expressing nucleotide sequence isolated from the Sargasso Sea
ttaaaaacagtagaacctattttttatgacttatttaaagaatttggagaagggaaaaaagtaaacagtccgccatttccaagaataaaatatagagattgtctaaataaatatggaacagacaagccagatttaagaaatcctattgaattagttgatgttaccgaaatttttaaatcaaaagaagttaatttaaaaatttttaaagatataatttctaaaggaggtatcgtaaaagccatacctgctccaaataccctttcaaaaccaagaagtttttttgactcattaaataactgggcaattaaagaaggggcaagtggattagcttacattacttttgaaaaaacaggagacaaaattaatggaaagggaccaatagcaaagttttttgctgaaaaatccatctcagaattattaaaaaagtgtaaaatttcagaaaaagattccgtattttttgtgtgtaataaagaaaatgaagctaataattttgctggtattgccagacaaaagattgcagaagaattaaaaatagtagacacaaatagctttaaattttgttggattactgattaccctatgtatgagtacgatgaaaaagagaaaaaaatagattttagtcacaatcctttctcaatgccacaattagatatgaaagattttgataaaactgacccattgaagattttagcctatcaatatgatctagtttgtaacggttatgaactttcatcaggtgccataagaaaccatattcctgaatatttattcaaagtcttttctaaagtaggatattcaaaagaagctgtagaaaaaaacttttcaggcatgataaaggcattatcttacggtgctccaccccatggaggtatggcacctggaattgatagaattgttatgcttttagcaaaccaaaaaaatattagagaagtaaccttattccctctaaatcagaatgccgaagatcttttaatggaggcaccatcggaggcaactgataaacaacttaaagaattaaacattaaaactgttaaaaagatttaat

SEQ ID NO: 298077 - DNA, 1402 bp, Unknown
  Bacterial polypeptide expressing nucleotide sequence isolated from the Sargasso Sea
atggatatttctaacttaacaaaactaacaaacaatgaaaaagtaaatgatctaagaggttgggtagatactataagacaccatggtggcttaatgttttttgaactgagagatcatgaaacaaaagttcaaatagtaacggatacacctgataatttcgataatgtaaaaaacgaatactatgtatcagtaaatggagttttagttaaaagaaaaaaagaaaatatcaacaaagaagtgctgtttggtgatatagaaatagaattatcaaatctagaaataatttctgaaagcaaaacattaccatttcaaattgaagatgatattgatacagatgaacagattagattaaaacacagatatttagatataagaagaagtgaaatgaataagaatatcattgcacgatctaaaacattcaaaagcatcagggaatcaatgaataagttaggtataaatgaattagatacgccaacattaataaaatcaacacctgaaggtgctaaagattttatagttccttcaagaaaatcaccaggtaacttttatgctttacctcaatcgcctcaaatgtataagcaactatttatgttatccggattgaaaaactactatcagatagcaaagtgctatagagatgaagattctcgcaaagatagacagcctgaatttactcaattagatatagaaatatcaaacggcaatcctgaaattgttcaaaaaataattgaatcaacaatgaaacatgtacttaaaaatgtttattcaattcaagtaaaaactccctttaaaaaaatgacttatgatgaagcaatgaacatgtatggaacggacaagccagatttaaggattaaagaaacaatctctgactttacagatatatttagagatactgaaatttcatttataaaagaatcaattaataacaaaggtgaagtaaggggatttgtaataaacaaaatattaagtagatctgaaatagatacattggatgaaaatataaaaaatgaaggaagtccaggtctaggatggtttaaaatcgaaaataaaaaagtaactggtcctttagcaaagatacttaatgaaaaagaaaacaaagaattaattaaatatgataattctacagtgttatttcaatctggtagtaagcatgaaacttcacaatatttagatactttaagacgtcaaatatatactattcaaaatgaaaatacttatgaattcttatggatttatgattttccctatttcgaaattgagaatgatcaattacaaccatcacaccatccatttacttctccaaaaaatactgctgaatttctctctaatccagaagatgctaaagctttacattatgatttagtcttaaatggtattgaattaggttctggatctcaaaagg

SEQ ID NO: 298078 - DNA, 1283 bp, Unknown
  Bacterial polypeptide expressing nucleotide sequence isolated from the Sargasso Sea
attgagaagtaaaattatttcttcaatcagagaaaagatgacatcagcaggatttacagaatttcaaactccaattttaacctccacttctcctgaaggtgctagagattatttagttccttctagaatccatcatggtcaattttatgcacttcctcaagcgccacaacaatttaaacaattactaatgatggcaggttttgataaatattttcaaattgctccatgttttagggatgaggacagtagagcagacagatcacctggagaattttatcaattagattttgaaatgagttttgttacacaagatgatgtgttcaattcaattgagccagtattgtatgaagtttttgatgaaaataaaaattatcatacagatgaaaatgtaactgtaagcagttatccttttaaaagaataccttatgaagagtctcttgaaatctacggtactgataaaccagatttaagaaatcctttagtaattagggattgcacagatatttttaaagattcagactttaaaatatttagcagcttaattgagaaaaattataaagttaaaggtatcgtagttagtaatacgtctgataaaccgcgaagtttttttgataaattaaataattgggcaagagacgagggtgctgctggattgggatatattagctattctgataataagcataaaggaccaattgctaaaaatttagatactaacagattaaatcaacttaaattacaagatggagaatctatattttttgtttgtgatacccaaaaagatgcccagttgtttgctggcaaagttcgtgataaattgtgcttagatttaaatttgcttaataaacatgcttttgaattttgttggattgtcgactttcctatgtatgaaattgatgaaagtacaaataagattgagtttagtcataatcctttttctatgcctcaaggtgaaatggactcacttttaaacaaagatccattagacataaaagcttatcagtatgatataatctgtaatggtgttgaattatcttctggcgctataagaaatcatagatctgatataatgtataaagctttcgaaatagcagggtataaaaaagaagagttagaaagtaaattttctggaatgttaaatgcaatgaaatttggagcccctcctcatggaggtagtgctcctggcattgatagaattgtaatgttgctagcaaatgaacctaatattagagaagtaattgcctttccaatgaatcaacaagcaatggatttgatgatgaatg

SEQ ID NO: 298079 - DNA, 799 bp, Unknown
  Bacterial polypeptide expressing nucleotide sequence isolated from the Sargasso Sea
aatgtattatagacaaggaaaacagaaatttaaagaattagaaaaaattcaattagaaactgttattaaaatagatggtaaagttatagatcgttcaaaagatacaattaataaagacattcaaactggtgaaatagaagttgttatagaagacttcgaaatactaggtgtttgtaaagagttacctatgcctgtttttagtgatcaagaatactcagaagaaataagattaaaatatagatttttagatttgagaagaaaaaaaattcatgaaaatattattttaagatcaaaagttatttcttttataagaactgaaatgaataaattaggttttttagaatttcaaactccaatactaacatcatcaagtccagaaggtgcaagagattttcttgtaccaagtagattaaatccaggtaaattttatgctcttccacaagcacctcaacagtttaaacagttaattatggtttcaggatttgataggtattttcaaattgctccttgttttagagatgaagatgcaagagcagatagaagccctggtgaattttatcagcttgatttggaaatgtcatttgttgaacaggaagatgtatttaatgttgttgaaactttattggtcaatacttttaagaagttttcaaataagaaattgatgtttgataaatttcctaggattacttatgcagatgctttattgaaatttggatctgataaacctgatttaagaaatccattactaattaatgatattactgagattttcacaagagaagatgtttcatttgaaatt

SEQ ID NO: 298080 - DNA, 703 bp, Unknown
  Bacterial polypeptide expressing nucleotide sequence isolated from the Sargasso Sea
atgaataaatatagaacacacaactgctctgaattaaatgaaaaaaatatcggtaaaaaagtgaaattatcaggttgggttcatagaaaaagagatcacggtaaccttctattcgttgatttgagagatcatttcggcattacacaatgtgttatagaaaacaaaaataagaattttaaaataatagaaaaaattaaaccggagtcagtagtttgttttgaaggtgaggtcataaaaagatctaaagataccgaaaataaagagttaaaaacaggaatgatcgaaattaaaatcattaatacagaaatattatcagaagctaaagatctacctatgccagtatttggagaacaggactatccagaggatatacgacttaaatatagatttattgatttaagaagaaaagaaatgcacaaaaatattaaacttagatcaaatgtcttatcatttataagatcaaaaatgattgagaacaattttatggagtttcaaacacctattcttacagcatcaagtccagagggtgctagggatttcttggtgccaagtagaactcatccaggaaagttttatgcgcttccccaggccccacaacaatttaaacaaatggtcatgatatctggttttgatagatattttcagatagctccatgttttagagatgaggatggcagagcagatagaagtccgggtgaacatt

SEQ ID NO: 298081 - DNA, 1043 bp, Unknown
  Bacterial polypeptide expressing nucleotide sequence isolated from the Sargasso Sea
tgtctttgaggtaattgaaactttattcttaaaactatttaaaaaatttagtaagaaaaaaattcttcatgaaaagtttccaagaattacttatgaagatgcaatgttaaagtatggatctgataaaccagatttaagaaatcctttagaaatttatgatttaacaaatatttttgatagagaagatgtaacatttgatattttcaaaaaattagtgaaaagcggttcaattgtaagatctatagttacaaaaaatacaaaagataaaccaagaagttttttcgacggaattgacaaatgggctaaagaagagggtacatctggacttgcttactttacattagaaaaaggagataaaattagtgccaaaggacccgttggaaaattcttttcagaaaattcgttaatagaaataatgaaacaaacttcagctaacattggtgatacagtatttctttcttgtggaaaaaaaaatgatgtggaaaagatattaagcactgcaagaaataaaatagcagaggatttagatttaattgataatgaaacatattcattttgttggattgttgattatcccatgtatgaaattgatgaaacaacaaaaaaaataaaatttagccacaatccattttctatgccacagggtgatataaaaaatttggacttatcaaaccctttaaatgtcaaagcttatcaatatgatattgtttgtaatggaattgaattatcatcgggcgctattagaaatcatgttcctgacctaatgtataaattatttgaaattgcaggctattcaaaaaacgatgttaatagcaaatttagtggaatgataaatgctttgagttatggagccccgcctcatggaggaattgcaccaggtattgatagaattgtaatgctacttgcaaatgaaaaaaatattagagaagtaacaatgtttcctatgaaccaaaatgcacaagacttaatgatgaatgctccatctgaagtttctgaggaacaattaaaagaattaaatatatctgttaaaaagaaattataat

SEQ ID NO: 298082 - DNA, 1462 bp, Unknown
  Bacterial polypeptide expressing nucleotide sequence isolated from the Sargasso Sea
cttccttgccattccttttcagttagatgaatatacttcagttggtgaagaaactcgtttgaaatatagatttcttgatttaagaagacctgaaatgcaacaaaatcttagactgagatctaaagtttcgtctgtctttagaagttttttggataagcaggattttgtagaaattgagacgcctttattaacaaaagctactcctgaaggggcaagagactacctagtgcccagtagaacatttccaggtcagttttttgcacttcctcagtcaccgcaacttttcaaacaaacacttatggcttcaggtttcgaaaagtattttcaatttgcaaaatgttttagggacgaagatctgcgcgctgatagacaacctgaatttactcaactggacatagagttgtcatttgcagactcagaagaagtgattgggttaattactgagatgattaaacaagtcttcaaagaaaccttatcggttgatttaggagattttcctaaaattccttatcaagaagctatatcaaaatatggaattgataaacctgacttaagaaatccgcttgaattaattgaagtaaaagacctatttcttgattgtgattttaaagtctttaatgaacctgcaaatgattcaaactcaagaattgctgctttgcgagtccctaacggaaagcttttaacaagaaagcaaattgatgattatactgactttgtaggtaattatggtgcaaagggattagcttacatacgtgtagaagatccatctaaaggcaaagatggtttgcagtctccaattataaaatttattgaagactcaatcattgattctcttttaaaggttctagacgttaaagaaggtgatattattttcttcggggctggtaaaaataatgtagttaatgattcattagccgccttgagagacttggttgctaaagaccttgatcttttgacatgtgaatgggcaccttgctgggttgtagatttcccaatgtttgaaaaaaataaatctggagaattaacaccacttcatcatccctttacggcacctagttgttccatagaagagctaaaaaaagatccattatcagcattaactgaagcttacgatgtagttttgaatgggaccgagttgggtggaggttcagtcagaatccatgacaaagaaatgcaaaaagcagtattggagctcttgaatatagaagatcaagaagccgaagagaagtttggttttcttatatctgctcttcaacacggttgtcctcctcatgcaggacttgccatcggtttcgataggatgattatgcttatgacggattcagaatcaataagagatgtcatagcctttccgaagacccaaactgcttcatgccttttaactgatgcacctggggaagcagctaaagatcaattagaagaacttcatataagatttcatgggatagataaggaggtttaa

SEQ ID NO: 298083 - DNA, 817 bp, Unknown
  Bacterial polypeptide expressing nucleotide sequence isolated from the Sargasso Sea
ttgaataagtatagaactcatacatgtgggcaactgacgattaaggaaaaaaataaagacgtatccttaagtggttggataaataaaaaaagagatcatggaaatttacttttcttagatctaagagataattatggaataacacaatgtgtgatagaaaacagtcatgcaaattttaaggaatttgaaaagttacctttagaaacagtaataaaaatcaatggaaaagttctagaaagaagtagagaaactatcaacaaagatttaaatactggagaaatagaaatctctattatttcttttgttgagcttggtaaaactaaagaattaccgttacctattttttctgatcaagaatattctgaagaaattagattaaaatttagatttttagatttaagaagaaaaaaaattcaccaaaatatgattttaagatctgaggttatatcttttattagatcagaaatgaaaaaatttggatttttagaatttcaaactcctattttaacttcatcaagtcctgaaggagcaagagattttttagttccaagcagattgaatcctggaaaattttatgcacttccacaagcgccccagcagtttaagcaacttataatggtttcagggtttgataaatactttcaaattgcaccttgttttagagatgaagatgcaagagctgacagaagtccaggagaattttatcaactagatttagaaatgtcatttgtagaacaagaagatgtttttgaagtagtagaaaaattaatgataaacatatttacaaaattttcagataaaaaaactactatatgaa

SEQ ID NO: 298084 - DNA, 1315 bp, Unknown
  Bacterial polypeptide expressing nucleotide sequence isolated from the Sargasso Sea
gattaatcgtaagcgagatcatggcaatgtcttgtttattgatttgcgagaccattatggcgtaactcagtgtgtcattgaaaaaacaaatacaaagctattaaaagaatttgaaagtctaagggctgagtctgtcattaaaatagatggtagagttattaagcgcgataaagaaaccattaatgagtccctagcaactggtaaaatcgagatttctgttgatgcgttggaagttctttctgctgcaaatgaattaccaatgcctgtgttcggtgaaaatgattatcctgaagaaataagattaaagtataggtttttagacattagaagagaagaattgcataacaacattgtattaagatcatctattatttcctatataagagagttaatgtccgaggctggctttcttgaaatgcagactcctatattaacagcatcaagtcccgaaggcgctagagattatcttgttccaagcagaattcatcctggaaaattttacgccttacctcaagcacctcaacaatttaaacaattaataatggcaggggggtttgataaatattttcaaattgctccttgttttagagatgaagatgccagagcagatagaagtcctggtgaattttatcaattagatatggaaatggcatttgttgagcaagatgatgtatttaatgccattgaacctgttttatcttcagtatttaaaaagttttcaaattttaaagtgactgatttgccttttccaagaattacctacaaagaagcaatgaaaaagtatgcaacagacaagccagatttaagaaatccaattgaggtatgtgatattactcaagaattttctgatgacgatgttgaatttaaggctttcaaaaaagttatagatgctggtgggcgagtacttgggatacctgcgccaaaatcttcaatacaaccaagaagtttttttgataacttaaacaattgggcaaaaaaagaaatgaatgctcccggtcttggctatattatttttgaagaagtagatggcatacttactggaaagggcccaattgcaaaatttataccaagcaatattcaattagaaattgctaaaaaagcaaatttaaattcaggagattccatattctttgcatgtgataaaggtaagtcggtatatgatattgctgcagcagcaagaaataaaattggagaaattcttgatcttatcgaaaaagatgtatttagattttgttggattgtagatttttcaatgtacgagcaggatagagaaacaggtaaaattgattttagtcataatccattttctatgcca

SEQ ID NO: 298085 - DNA, 1090 bp, Unknown
  Bacterial polypeptide expressing nucleotide sequence isolated from the Sargasso Sea
ctgatcgacaaccaagaattttctcagattgatatagaagcctcttttgtagaagaaaatgatgtaatgaaaatatcagaaggcatggtcaaacatgcttttaaagaagttcttgattttaaaataaaagaaattccaaaaataaagtggtctgatgccatggagcactatggttcagataagccagatttgagaaacccgctaagactagttgaaatagctgaaatttttaaagaagaagagtttaaagttttctcagatcctgcaaatgatacagagtctagaatagcagctttagtaattgaaaatggagatagtgtaggtagaggtcaaattgatagatatacggattttgtaaaagaatttggtgctaaaggtttagcatatattagagtagaagaagccaatatatctggattaaactccccaattcttaaatacttgtcagagaagtgcttagaaagcattttaaaaaatttaaaacttaaaaagggctctttggttttctttggagctggtgacaagaagacagttaatgattatatgagcaaacttatttctagaattggtgaagatcttaatctattagaagatggctataagttttgctgggtaactgattttccaatgtttgaaaaatctgcagacggaaatttaacctctttacatcatccatttactagccctgaagaagaggatcctaagaaattagcaaagatagatcctctagaaatgaattcaagagcttacgatatggttgttaatggaattgagattggtggcggatcaattcgtattcatagaaatgaagttcaagaacaaattttttcaatcctaggcttaactgaagatgaagcgaatgagaaatttggtttttttataagagctctaaaaacaggctgtcctcctcatggtggaatagcttttggtcttgataggcttgcgatgattatgaccggttctgattctattagggatgttatagcgtttccaaaaactcaatcagcactttgccttcttactgaagcacctggatcagttcctgatgaaagtttagaagagttaagaatagaaaggaaagaagattaat

SEQ ID NO: 298086 - DNA, 1558 bp, Unknown
  Bacterial polypeptide expressing nucleotide sequence isolated from the Sargasso Sea
atgaacatatcagagttaaaaaataaaaaaatcaacactgaagtaaccaatttaatgggttgggttagtagcgttcgtgatcacggaaatcttatatttatagaattaagagacacagattcaagaatacaattagtcttagacgctgaaaaagttgagttagatacatttaaatcagaatattatatatcaattgacggagaatttattaaaagagatcctgaaatgataaatgattcacaaccattgggtaaatttgaaataaatgttaaaaattttaatattctttcaaaaagtaacactttgccatttcaattagatgactcacttgatacagacgaaaatatacgacttaagtatcggtatcttgatctaaggcgagaagacatgaagaaaaatatcgttactcgatctaaaacgtttagatctataagagaatcaatgaacgaattaggattccttgaacttgacactccaacattaactaaatctacaccagagggcgctaaagattttcttgtcccttcacgcaaacaaaatggagccttctatgcattgccacagtcaccacaaatgtataaacaattattcatggtgtcaggttttgataaatactatcaaattgctaaatgttatagggatgaagattctagaaaagatagacaaccagagtttactcaacttgatttagaaatatcgaatggatcccctgagatagttagagatattactgaatcaatagtaaaaaatcttttaaccgacgtatatgaacaaaaagttgaagtaccttttattgacatgacatatgatgaagccataaatacatatggaacagataaacctgatcttagaataaaaaatacaattcaagactttacaaatatctttaaaaatactgaaattaaatttataaagtcagcaatagaaaataatggatttgtaaaaggatttgttacagaagaaattttatctagatcacaaatagataaattagatgaaatagtaaaagacaatggtagcaatggtcttggttggttcaagatcgaaaataatgaagttagtggtcctttatctaaaattattaacgaagatgaaaaaaataatatattaaaacttggtgaaggaatgctaatttttcaatcaggtacgaaggaaatatatccaatacttgatattttaagaaggtcaatattcaaacctgatgatactttaaattttttatggatttatgactttccttattttgaaacagaaaatggggaaatacagccatcacatcacccctttacatcaccaaaagatgttgatagctttgtaaatgatccttctgcttcaaaggcattacattatgacttagttcttaatggatctgaactaggttctggttcacaaagaattaatgatccaactattcaaactaaagtactcgaaatgtggggtttgtcagatagcgatattaaaaataggtttggatggtttatagaagctctatcttatggcactccacaacatgcagggatagcactaggcatagacagatttgttgctgttatgttaa

SEQ ID NO: 298087 - DNA, 1066 bp, Unknown
  Bacterial polypeptide expressing nucleotide sequence isolated from the Sargasso Sea
cgggaactattatacaagtcatagattttttgaaattgaaacccctattctaaccaaatctactcctgaaggcgctcgtgattatctggttccttccagagtaaatccaggaatgtttttcgccttgcctcagtcaccgcagctgtttaagcagttgctgatgatcagcgggtatgaccgctatatgcagttggcacgctgctttcgagatgaagatttgcgtgggaaccggcagcctgaatttactcaaattgatcttgaattaagtttcacagagcccgaagagatctttgggctgactgaaggattgatggtagaactgttcaaagaaattatgggattggaaattgatattcctttccctcgtcttacataccagcaggctatggaagactatggctctgacgcaccagacattcgctttgaattgaaacttaaagatatttcagacattgcatctgaatgtgaattgcgtgtttttaatgaagtcgtaaaaaaaggtgggattgtaaaagcgatttgtgtacctggtggagcagaattttcccgaaaagaattggatgacttgactgaatattcaaaaatatttggtgctaaaggtatggcctggataaaaagcaatcaagatggatggcagtctcccatcggtaaatttttcactgatacacaaaaaaaggatcttgaggagagagtaggtttaaatcatggtgatttggtactattttgtgcagataaggaaaagatcgtatatgatacgcttgggaatttgcgtaaggaaattgctcgccgccgcggcttggttgaccaaaatgaatttcgctttgtatgggtaacggattttccactttttgaatacagtgatgaagaaaaaagctatacatctagccaccatccattcacaatgccagacttagatgatcttgagaaatatggagataatgaacctgaaaaaattcgatcacgtgcatatgatgtcgtattaaatggtgtcgaattgggcggaggaagtatcaggatacataaaaaggatatacagcaaaaagtgttcagtttgcttaacctttca

SEQ ID NO: 298088 - DNA, 964 bp, Unknown
  Bacterial polypeptide expressing nucleotide sequence isolated from the Sargasso Sea
tatgaacatatcagagttaaaaaataaggacacaaacagtgaagttaccaacttaatgggttgggtaagtagcgttcgtgatcacggaaatcttatatttatagaattaagagacacagattcaagaattcaattagtcttagacgctgaaaaggttgatttagacacatttaaatcagaatactatatatcaattgatggattatttattaaaagagatcctgaaatgataaatgattcacaaccattaggtgaatttgaaataaatgttaaaaattttagtattctttcaaaaagtaatactttgccatttcaattagatgactcacttgatacagatgaaaatatacgacttaagtatcgatatcttgatctaagacgagaagatatgaagaaaaatattattactcgatctaaaactttcagatctataagagaatcaatgaacgaattaggattccttgaacttgacaccccaacattaactaaatcaacgccagagggagctaaagattttcttgttccttcacgaaaacaaaatggggccttctacgcattgccgcagtcaccacaaatgtataaacaattattcatggtttcaggttttgataaatactatcaaattgctaagtgttatagagatgaagattctagaaaagatagacagccagaatttactcaacttgatttagaaatatcgaatggatcccctgaaatcgtaagggaaattactgaatctattgtaaaaaatcttttaactgacgtttatgaattagaagtagaaataccttttattgaaatgacttatgatgaagctattaataaatatggtacagataaacctgatcttagaataaaaaatacaattcaagactttacaaatatctttaaaaatactgagattaaatttataaagtcagcaatagaaaataatggatttgtaaaaggattgttacagaagaaa

SEQ ID NO: 298089 - DNA, 1524 bp, Unknown
  Bacterial polypeptide expressing nucleotide sequence isolated from the Sargasso Sea
atattgagactggagaaattgaggtagcaatatctgaatatgagacgttaggtacttgtaaagaattaccattgcctgtttttagtgatcaagaatatgcagaagacataaggctaaaatatagatttttggatttgagaagaaaaaaaattcatgagaatatcattttaagatcaaaagttatttcttacatcagaaacgaaatgacaaaatcaggctttttagaatttcaaactccaattttaacttcttctagccccgaaggagctagagattttctagtacctagtcgtttaaatccaggaaaattttatgccttacctcaagcccctcaacaatttaagcaattaataatggtatcaggttttgataaatattttcaaatagctccttgctttagagatgaagacgctagagctgataggagccctggtgaattttatcaacttgacttagaaatgtcttttattgagcaagaagatgtattcaatattgtagaaaaactaatggtaaatacttttaaaaatttttctgataaaaaattaatgtatgatatatttccaaagataccatactctgaagcaatgcttaagtatgggactgataaacctgatttaagaaaccctcttattataaatgatattacagaaatatttggtagagaggatgtttcatttgatatttttaaaaaattagtaaaatctggatctaaagttagatctattactaccaaaaatacaaaagataaacctagaagtttttttgataacattgataaatgggctaaagaccaaggtgcttctggattagcatactttacttttgaaaaagaaaataaaatttcagccaaaggaccagtgggaaaatttttttctgaagaagcactcttagaaataatgaaaatcactaaatctaaggtaggggatagtatttttttagcatgtggaaagcaaaatgaattagaaaaaataactgcactagcgagagataaaattgcgaaagatttagatttaattgatgataatacttttgctttctgttggatagttgactaccctatgtttgaaaaagatgaattaacaaataagattaagtttagtcataacccattttcaatgccgcaaggtgaattaaaagataaagattttgaaaatcctcttgatattcttgcttaccaatatgatatagtttgtaatggaatagagttatcttctggtgcaataagaaatcataaacctgatcttatgtataaactcttttcaattgcaggttataataaagcagaggtagatgaaaaatttagtgggatgattaacgcattaagttatggtgcaccaccacatggcggaattgcaccaggtatagatagaattgtcatgcttttagcaaatgaaaaaaatataagagaagttactatgttcccaatgaaccaaaacgctcaagatttaatgatgaacgcaccatcagagattaatcaagaccaattgaaagaattaaatctctcaataaaaactaaaaattaaa

SEQ ID NO: 298090 - DNA, 1049 bp, Unknown
  Bacterial polypeptide expressing nucleotide sequence isolated from the Sargasso Sea
tcagcctgaatttacacagttagatatagaaatatctaatggagatcctaagattgttcaaaaaataattgaatcaacgatgaaacacgtattaaaaactgtatattcaattgaagtaaaaacaccatttacaaaaataacttatgatgaagctatgtctttgtatggtacagataaacctgatttaaggattaaagaaactattacagactttacaaatatttttatggatactgaaatttcatttataaaagaaacaattaaaaataatggaacagttagaggatttctaataaacaatctattaagtagatctgagatagataatttagataaactattgaaaaacgaaggaagcccaggattaggttggtttaaaatagaaaataaaaaagtatcggggcctttagcaaaaatacttaatgaaaaagaaaataatgaattagtaaaaaatgataattgtacaatgctatttcaatctggtaaacaggatgaatcttctcattatttagacactttaagacgtaaaatatatagtattccaaatgaaaatacttatgagtttgtatggattgatgatttcccttatttcgaaatagaaaacggagaattgcaaccttcacatcacccatttacttcaccaaaagatacttcagaatttctctctaatccaaatgatgctaaagctttacattatgatttagtattaaatggcatagaattaggatctggatctcaaagaattaatgatcccaaattacaaaaagaagtactatccaaatggggattatcagaatctgatataaatgatcgttttgggtggtttatagaagccttatcatatggttcaccacaacatgctggatttgcagttggtattgatagatttatagctgaaatgatgaatgcagattcaataagagacgtaatcccttttcctaaaacgcagtctggtctagacccattaactaatgcaccatcaaatttgtcaaaattagaattacaagaatacaatatttcaattgaaagtatagaaaatgaagagtgat

SEQ ID NO: 298091 - DNA, 1489 bp, Unknown
  Bacterial polypeptide expressing nucleotide sequence isolated from the Sargasso Sea
gaagggcaaagcaaccccaatctttgtacgggtcaggttgaactagttgccaatagtctaaccatattcaatagcgccaaaacaccagcttttcccatagatgaaaacaaaacaagcgtgggtagtgatacccgtttgaaatatcgttatttggatcttcgcacacccaagactcaagaacgcattatcaagcgtagtgaaattacgcgttttattcgtcaatttatggacgctgagcagtttcttgatattgaaactccggtacttaccaaggcaacgccagagggcgcgcgcgattatttagttccctcacgcacccagcagggtcatttttttgcgctaccgcaatcgcctcagctatttaagcaattgctaatggtatctggatttgatcgttattatcaagttgtaaaatgctttcgcgatgaagacttacgcgctgatcgtcagccagaattcacccagctggatattgaagctagttttgtccaagaggaagatattatctccttaattcaaaccatgcttcaaaaactattcaaaaatgtgcttgatacggatcttccagaaacctttccgcgcatgacctatcaagaagcgatgcagcgttttggtagcgacagaccggatatgcgtataccgcttgaatttaccgatatcaaagaccttatgcaaaaggttgattttcaagtatttgccaagccggcccaagatgaaaactgtagagtcgtggcaatgaaagtgcctggcgccagtgaaaagctctcgcgtaagcaattagatgactatgtaaattttgttaaaatttatggcgctaaaggtttagcttacattcgtgttcaagaaaaggctaaaggcatagagggacttaattcccccatcttaaaatacttgccagaagacgtggtcatggccattattgagcgcgtacaagctgaagatggcgatatcttattttttggcgcggatcaaagcgcgattgtcaatgatgctttgggcgcacttcgaggaaaattaggtaaagaccttgacctttacacctgtaaatgggcgccattatgggttacagaatttccgatgtttgaagagcatgatggtcacattcaggcgatgcatcatccctttaccgcgccatcggtttcaactcctgaggaaatcaaggagcttccgctgaataaaatattatcgcgctcttatgatattattctcaatggttatgaaattggtggtggttcaatccgtattcatcaaaaaaatatgcaaagtgccatttttgatcggattggtttaagccaagcgcaagccgaagaaaagtttggctttttccttgatgccctagcctatggcaccccgccgcatggtggcattgcattaggattggatcgcttagtgatgcttatgaccgatgcctcttatatccgcgacgtgattgcttttcctaaaacgcaaacagccagttgtttgctaaccggggcaccgtcacaagcgg

SEQ ID NO: 298092 - DNA, 472 bp, Unknown
  Bacterial polypeptide expressing nucleotide sequence isolated from the Sargasso Sea
tatccaatttttgaaaaagacgagataacaaaaaaaataaaatttagtcataatcctttttctatgccacaaggagatattaaaaatattgatttttcagatcctttatctttgaaagcttatcaatacgatattgtttgtaatggtgttgaactttcatctggcgcaataagaaatcatatcccagaattaatgtataaactatttgaaattgccggatattcaaaatctaatgttgataaaaaattcagtggaatgataaatgccttaagttatggtgcaccaccccatggaggcttagctccaggaattgatagaatagtaatgcttctagctgatgaaaaaaacattagagaagttacaatgtttccaatgaatcaaaatgcacaggatttaatgatgaatgcaccttctaatgttgatgaagaacaattaaaggaattaaatatattacttaaaaaaaatacttaat

SEQ ID NO: 298093 - DNA, 1780 bp, Unknown
  Bacterial polypeptide expressing nucleotide sequence isolated from the Sargasso Sea
tatgcgaagtcacttctgcggtgagttgaatgaatcaaatgttgatgaagatgtcgttttgtgtggttggattcacagaaggcgtgatcatggaggtgttatatttttagacttaagagatcgcgaagggttgacacaagtcgtttatgatcccgacactaaggagagttttaaaatcgctgagggagtccgaaatgagtacgtagtggaggtaaagggccgagttaggctgagaccttcaggaacaattaacgatgaaatgccaactggaagaatagaaattttagggaatgagctaaaggtattaaatgcgtcagaaacgccaccaattcaattggatgagcatgcggaagtaggggaagacattaggctcaaatatcgttacatcgatctgcgtcgccctgaaatggcagcgaggcttagatttcgctcaaaggtcgggaacacaattaggaattttctagacaataatggctttcttgatattgaaacgccccttcttacgaaagcaactccggaaggagctcgggactatcttgtgccaagccgcactcatcagggtagattcttcgctctgccgcagtcgccgcaactttttaaacaaatactgatggcatcagggatggatcgttattatcagattgcgaaatgtttccgagatgaagacttaagagctgatagacagccagaatttactcagatagatgtcgaaacctcttttatggatgaagatgaaattatggcaatcatggaagcgatgattaagcatacttttaaaaagacactaaatgttgatttaggtgattttcccagaattacttatgctgaagccatgagattatacggttctgacaagcccgacttacgcattgatctaaaattagttgatgtagcaagtctaatgaaatcagctgaatttaaagtatttagtggcccggctaatgatgaggatagtagagtagtcgcgcttcgtgttccagggggtgccagcctaacgcgaaaggtgatagatgattttacagagtttgtcgcggtttacggtgcgcggggtcttgcttggataaaggtaaatgatttaagaaatgggtctgaaggtcttcaatcgccaatacttaaatttctcgatgaggagatcattggcaatctgctttcaactttggctgtggagactggagatatcatattttttggagcagataagtccaagatcgtgaatgaggctatgggtgccctaaggataaaagttgcgcaagaactcaatcttgtcgcttcgggatgggccccagtatgggtggtcgactttcctatgtttgagctgacctcagagggcgatttgacttcattgcatcatccctttaccgcgccgagtttagatgcggaagagctggtaaaagatccaactaaagcattgtctagggcctatgacatggtcttgaatggaaccgaattaggaggtggttcgattcggatccacgatgctaaagtgcaacgagcggtttttgatgttctaggtatcagcgaagctgaagcggaggagaaatttagctttcttttggatgctctttcacttggttgccctcctcatgggggtatcgcttttggttttgataggcttatcatgctaatgaccgattctcattcaattcgagatgtaatagcgttccctaaaacccaatctgcatcgtgccccctgacggacgcacctgggtatgtgtcgcccagtcaacttcgcgaacttagtattcggcttcgcgatccaaataagcctcttaacgggtaa

SEQ ID NO: 298094 - DNA, 1768 bp, Unknown
  Bacterial polypeptide expressing nucleotide sequence isolated from the Sargasso Sea
catgaaatctcattactgtggtgaaattacttcaaaaaacctcaaagaggatgtgaccatttgtggctggatacatcgacgaagagatcatggtggagttatctttcttgatgtaagagacatcaaaggaatttgccaagctgttgtaaatccagatcaaaaagattcttttaaattagctgagtctattagaaatgaatttgttgtgcagattactgggaaagtaagaaagagattggaaggtactgttaataaaaccatgcatacaggtgaaatcgaaatagaagtaaatattattaatattttaagtaaagcaaatactccagttttcccaattgatgaataccaagaggtcaatgaagatgtgagacttaaaaacagagtacttgacttaagacgtccagaaatgaatgaaaggattattacaagatcaaaaattacttccttgatacggaattttcttgatgacaatgattttaatgaaattgaaactccaattttaaccaaggcaacacctgaaggcgcaagagattacatacttcctagcagggttcaacctggaagtttttatgctttacctcaatccccacaactttttaaacaactacttatgatcggaggcttgaacaaatattatcaaatagctcgatgttttagagatgaagatctaagagcagatagacagcctgagtttactcaaattgacatcgaggcatcatttcttgacgaagaagcaataatgaaagtcagtgaggagatgattaaaaaagtaatcaataaattttgtggtgataagctttcaaaatttgctgtgcttgactggcaagatgccatggataggtatggttgtgataaaccagatttaagaatacctttagagttaattgaaatatcagatttagtaaaagatgaagaatttaaagtattttcagacccagccaaaaagaaaaattctagggtagttgctttgaaagttccaaaaggaaactcgatgtccaggggtcaaattgatgaatacactaaatttgtttcaaaacttggtgcaaaaggtctggcctatataaaagtgaatgatgtaaatgatatcgaaaatggtattcaatcaccaattctaaaattcttaaatgttgagacagtcacaaaaattctaaaaaaattagatatacaaactgatgatttaattttctttggagctggatctgaatcaattgtgaatttatcaatgagcagtttaattaaaaaacttggagaagatttaagtttgtatactgaaaaatgggcgccttgctggattattaattttccgatgtttgaaactaattctgatggagacttaacaccacttcaccatccttttactttgcctaaatgctcatcaaaggaaattaaaaatgatccagagaatactactgcttatgcatatgatgttgtactcaacggatatgaaataggaggagggtctctaaggatatatgataaatcaatgcaagaaactatctttgaaattttaaaaatatcaaaagaagaggctgataagaaatttgggtttcttttgaaagcactctcatctggttgcccaccacatggaggaatagcctttggccttgataggatagttatgcttgtaactaatactaataacattagagacgttattgcttttccaaaaactcaaagtgctgcatgcttgttaacagatgcaccgagtactgtagaaaaggcgcaacttgatgaattaaaaatagaaagcactcataaggaagattaa

SEQ ID NO: 298095 - DNA, 814 bp, Unknown
  Bacterial polypeptide expressing nucleotide sequence isolated from the Sargasso Sea
tctggttagggcgttagttaccaaaaatacaaaggataaaccaagaagtttctttgatggtattgatagatgggcaaaagagcaaggttcctctggtctagcttattttacattagaaaaagatgataaaataaatgctaaaggaccaattggaaaattcttttcagagaatgcattattagaaatcatgaaactaacaaatgcgaacataggtgatacggtatttctttcttgtggaaaaaaaaatgatgtagaaaaaatattaagcgttgcaagaaacaaaatagctgaagatttagatttaattgataataaaatattctcattttgttggattattgactatccaatgtatgagattgatgaaactactaaaaaaataaaatttagtcataatccattctcaatgcctcaaggcgaaataaataaattagacttatctaatcctttaaatattaaagcctatcaatatgatatcgtttgtaatggaattgaattatcatccggtgcaattaggaaccatgttcctgaattaatgtataaattatttgaaattgctgggtattcgaaaaatgatgttaatagtaaatttagtggaatgataaatgctttgagctatggagctccgcctcatggaggtatagccccaggcatagataggattgtcatgcttttggcaaatgaaaaaaatattagagaaattactatgtttccaatgaatcagaatgcacaagatttaatgatgaatgcaccatctgaaatttctgaggatcaattaaaagagctgaatttatctttaaaaaagaaaaattaa

SEQ ID NO: 298096 - DNA, 206 bp, Unknown
  Bacterial polypeptide expressing nucleotide sequence isolated from the Sargasso Sea
agcaattggtgcaccacctcatggaggaattgctcttggtctagatagaattgtcatgttgctaacaaatacttctaatattagagatgtaattgcatttcctaaaactcaatctgcagcatgcatactcactgatgcaccaagtaatatctcaaatgaacaaatgcttgaactaggtattaaaatattagacgagaataaataat

SEQ ID NO: 298097 - DNA, 878 bp, Unknown
  Bacterial polypeptide expressing nucleotide sequence isolated from the Sargasso Sea
tattttccaaagagatgatgtaaaatttgatatatttaaaaaacttgttaaatcaggttcttttgttagatgtctagtaacaaaaaatacaaaagataagccaagaagtttttttgatagaatagataattgggcaaaagaacaaggatcatctggactagcatactttacgatcgaaaaaaatgataaattttctggaaaaggacctgttggaaaatttttttcagaagaatcaataatggaaataattaaaattacaaaagccgatgttggagacacggtatttttatcttgtggaaaaaaaaatgatatagaaaaaattttaaatttggcaagaacaaaattagctgaggaattagaattaatagatgatgattatttttctttttgttggatagtagattatccaatttttgaaaaagatgagataacaaaaaaaataaaatttagtcacaatcctttttctatgccacaaggagatattaaaaatattgatttttcagatcctttatctttgaaagcttatcaatatgatattgtatgtaatggtgttgaactttcctcaggagcaataagaaatcatattccagaattgatgtataaactatttgaaatagcaggttactctaaatccgatgttgataaaaagttcagtggaatgataaatgctctaagctacggagcaccacctcatggaggtttagccccaggattagatagaattgtaatgcttctagctaatgaaaaaaatattagagaagttacgatgttcccaatgaatcaaaatgcacaggatttaatgatgaacgccccatcaagcattgacgaagagcaattaaaagaattaaatttattagtaaaaaaaaaaaataattaac

SEQ ID NO: 298098 - DNA, 1225 bp, Unknown
  Bacterial polypeptide expressing nucleotide sequence isolated from the Sargasso Sea
tccaggaaaattttatgcactaccacaagctcctcagcaatttaaacaattaataatggtttcgggctttgatagatactttcaaattgcaccttgtttcagagatgaagatgcaagagcagacagaagtcctggggaattttatcaattagatttggaaatgtcatttgttgaacaagaggatgtatttaatgttgttgaaaagttaatggttaatacatttaaaaatttttcaactaaaaaattgatgtttgataaatttccaaagatttcatacaaggaagcaatgcttaaatatggtactgataaaccagatttaagaaacccactcattgtaaacgatataactgaaatttttacaagagaagatgtttcatttgaaatatttaaaaaattagtaaaatctggatctaaagtaagatgtattgttacaaaaaatacaaaagataaacccagaagtttttttgataatattgataaatgggctaaagaagaaggtgcttctggtttagcttattttacttttgaaaaagataaagatatttcagcaaaaggccctataggaaaattcttttctcaagatgcattggttgaaatcatgaataaaacaaactgcgaaataggggatagtattttcatggcttgtggaaaacaagatgaattagaaaaaattactgcactagcaagagataaaattgcaaaagatcttgatttaattgatgaaaatattttcgcattttgttggattgtagattatccaatgtttgaaaaagatgaatcaacaaacaagattgaatttagtcataatccattttcaatgcctcaaggtgatttaagtgaaaaagattttgaaaacccattagatatacttgcttatcaatatgacatagtttgtaatggtatagaattatcttcaggagcaataagaaatcataaaccagaacttatgtacaaacttttctcaattgcaggatatgataaaaatcaagtagatgaaaaatttagtggtatgattaaagcacttagttatggcgcaccaccacacggaggaatagcacctggtattgatagaatcgtaatgttacttgctaatgagaaaaatattagggaagttaccatgtttccaatgaaccaaaacgcacaagatttaatgatgaatgcaccatctgaggtaaatccagatcaattgaaagaattaaatttagctttaaaaacaaaaaaataa

SEQ ID NO: 298099 - DNA, 1516 bp, Unknown
  Bacterial polypeptide expressing nucleotide sequence isolated from the Sargasso Sea
tttgtactgtcagttacagggattgtcagagaaaggcctcatggaacaatcaatgatcagatgaagacaggtgaagttgaattgctggttgaaaaaggagaagttctgagtgcctcagagactcctcctttccatcatgacgaagcaacaagtgaagacattcgcctgaaataccgatatctcgacctcaggcgagaagaaatgtcaaacaatatcaaagtcagacatgagataacaaaatctttgagggagtatttgaataatgcatcttattttgaaatcgagacgcctattttaaccaaggccactcctgagggcgctagagactatcttgtaccaagcagaactcagcaaggaaatttctttgctctgcctcaatcaccgcagttatttaagcagctcctaatgatgtcaggatttgatcgttattatcagattgcaagatgctttagggacgaggacctgagggcagatcgtcaacctgaatttactcaacttgatgttgagatgtcatttgttgatcaggatgatgtcaaaagtcagatggaatcgatggttaaagatttgtttaaatcagtgcttggtattgatcttgaaaagcagtttcctcaaatcacgcatgcagaggcaatggaccgatttggttcggatagtccacatttggggatagacatggagttgattgaagtcagcgatctaatgaaagaggtagaatttaaagttttttctggcccagcaaatgatgaggattcaagagtggcatgtttagtgcttcgtgattcatctgagatgtcgcggaaacagattgatgattataccgattttgtctcaaactatggcgcgaaaggcttggcttacatcagggtcaatgatattgaaaaaggaattgaggggctccagtctcccatacttaaatttctcaataacgaagtaatcaatcaactcattgagaagcttttattgagcaatggagatacggtcttttttggtgccgataagaaagacattgttaatgcatcgctgggcgctcttcgtgtcaaaatggcggaggatttcagtttgataaaagacggatggtttccactttgggtcactgactttcctatgtttcattgggatgaaagagaaaagagatggtctgcagagcatcatccatttacatctccaataaatccagatccagaagaattaaaaaataatccaaaggatgcgttgtcacaaggatacgacatggtactcaatggccatgaaattgggggtggatcgattcgtattcattcggaagcaatgcaacaagctgtcttttcaatacttggtataggtgaagaagaggcgaatgaaaaatttggtttcttccttgaagctctaaagtatggatgcccgccccatggcggcattgcttttggaattgacagaattgtcatgctcataactggatcatcgagtatcagagatgtgattgcatttcccaagacacagaccgctagttgtttgcttactgatgcgccaagccatg

SEQ ID NO: 298100 - DNA, 985 bp, Unknown
  Bacterial polypeptide expressing nucleotide sequence isolated from the Sargasso Sea
gaaattctctaatagaaaaattgattctgtttttccaaaaattacctataaagattcaatgttaaaatatggtaatgacaagcctgatttaagatttactcttgaaatcaaagatgtcactgatttttttgcaaattctggttttaccatctttgcaaaatctattgaaaatggagcggtagtaagaggaattcctggtcctcattgtggttctagggcagttgctgatagaatgaatagttgggctcaaggtgaaggagcaccggggatgggttatataatttttggtgaaggaactgcaaaaggtcccattgctaatgcattggggattgataggtcaatagagatgaaagctttatttgatcttaaagatggtgatgctttatttttttcgtgtgcaaatgaaaatgaagcagcaaatttagcaggaaaagcaagagttaagattgcaaatgacagagaattaatagagcacgatatctttaaattctgttgggtggtagattatccaatgtatgaaaaagatgataaaactggtgaaatagaattttcacataatccattttctatgccccaaggcggtatggaagctcttttaaataaagacccactagaaatattagctttccaatatgacttggtttgtaacggaattgagctttcatctggtgcgatacgaaatcatgtaccagaaataatgtacaaagcttttgaaattgcaggtcataaacgtgatgtggtagacaacaaatttcctggtatgattaatgcttttaaattcggagcgccgccccatggaggaatagccccaggtatagatagaattgtgatgttattagcggatgagccaaatataagagaagtgattttatttccaatgacaggaaaagcagaagacttaatgatgaatgctcccaacgaaattagcgatgctcaaattaaggaacttgggataaagttagataagaaaacaaaaatcaattaa

SEQ ID NO: 298101 - DNA, 829 bp, Unknown
  Bacterial polypeptide expressing nucleotide sequence isolated from the Sargasso Sea
attgaataaatatagaactcatacttgcggggaattaactaagttacataaagaaaaggaaatttctttatctggttggattaacaaaaaaagagaccatggaaatcttttatttatagacttaagagataactttggaattactcagtgcgttatagacaaaagtaatgaaatttttaagaaaattgaaaagctttctttggaaacagtaataaaaattacgggaatggttattgagagatcaaatgaaacaataaataaaaatatttctactggcgaaatagaagtcaaaattaataatattgatattctaggggaaactaaagaattaccaatgccagttttttcagatcaagaatatgctgaggaaataagacttaagtatagatttttagatttaagacgaaaaaaaatacatcaaaatattattttaagatcaaaagtaatctcatttattagaaatgagatgcaaaaacttggttttttagaatttcaaactcctattttaacttcatctagcccagaaggagcaagagattttcttgtacctagtagattaaatcctggaaaattttatgctttaccacaagctcctcaacaatttaagcaactaataatggtttctgggttcgacaaatattttcaaatagcaccttgtttcagagatgaagatgccagagcagatagaagtccaggagaattttatcaattagatgttgaaatgtcttttgttgaacaagaggatgtctttggagtaattgaaactttatttttaaaattatttaaaacattcagcaataagaaaattcttcataaaaagtttccaagg

SEQ ID NO: 298102 - DNA, 1487 bp, Unknown
  Bacterial polypeptide expressing nucleotide sequence isolated from the Sargasso Sea
tatgagtatttataggtcacatttatgttcagatttatccattaatgatttagataaagaagttacgttatcaggttggatagatactaaaagggatcatggaaatttattatttattgatttgcgtgataattacggcataacacaatgtgttatagatgctaaaaattcaatatttaatgaagttagtaatttaaatcatgaaaccgttattaaagttataggaaaagtagttaaaagatcaaaagaaacaattaataactcattaaaaacaggtcaaattgaagtagaaatagtttcttatgaagtattatcaaattcagaaattttacctttacctgtcaactcagatatagaatatggagaagaagttaggcttaagtacaggtatctagatttaagaagaaataaattacataataatatcattcttagaaataaagtaatctcatctattagaaaaaaaatgattgagagaggttttgttgaatttcaaacccctatactaacatctacttctcctgaaggagcaagagattatcttgttccgtctagaattcatcatggtcaattttatgctttgccacaggcgcctcaacaatttaaacaattattaatgatagctggttttgataaatattttcaaatagctccatgttttagagatgaagatagcagggcggatagatctccgggtgaattttatcaattagattttgaaatgagttttgttacacaagatgatgtatttaatgcaattgaaccagtattgtttgaaatttttaatgaaaataaaaaaaatcaaagcattggtgtaagttcttatccttttaaaagaataccttacatcgaagcattagaaaaatatggaactgacaaacctgatttgagaaatccattgataatattagattatactaatatttttaaaggctcaaattttaaaattttcagtgatcaaattcaaaaaggatcagttgttaaaggaattattgttaaaaatactgctaagcaaccaagaagtttttttgataaattaaattcatgggcaagagaagaaggagctgctggattaggttatattagtttaagtgataaaaattataaaggaccaatagcaaaaaatttaaatgaaaatcagctttcatcactaaaacttgataacaatgacaccgttttttttgtatgtgataaattaaatgaagcacaaatattttcaggcaaagtaagagataaattatgtaatgatttagatttattaaataaaaattcatttgaattttgttggattgttgattttccaatgtttgaaatagatgaaaaaacaaataaacttcagttcagtcataatccattttctatgccacaaggtgaaatggagtctttagaaaaaaaagatcctctagaaataaaagcgtatcagtatgatattgtttgtaatggaatagaattatcttctggtgctattagaaaccataaaccagaaa

SEQ ID NO: 298103 - DNA, 1300 bp, Unknown
  Bacterial polypeptide expressing nucleotide sequence isolated from the Sargasso Sea
gatggcattaagaactcataattgtggtgaactaaacaaaaatcatattgaccaaactgttaaactttccggttgggtcaactctattagaacacatggtcaaattattttcattgatatacgcgatcgattcggaaagactcaaattgttctgaattctgatgaattaattaaaattggcaaaaccttatcaaatgaagatgttattaatattgaaggaaaagtttctttaagatcaaaagatttaataaatcctgatttaaaaacaggtgaaattgaaattttaggtgaaaaaatgatggttcttagtagtgcagagccaatgcctatgtccattcaagatagagatgcttcatccgaagagcatagacttaagtatagatatttagagttaagaaataatgatttgcaaaaaaatattattattagacacaatacagcacaagttgtgcgaaattttctttcagagaataattttttagaaattgaaacgccagtgttgatgaagtctactccagaaggagcaagagattatctagttcctagccgagtacataatggaaaattttatgcattacctcaatctcctcagatgtataaacaattgtttatgatttctggtctagatagatattttcaaattgtaaaatgttttagagatgaagacttaagatctgacagacaacctgagtttactcaaattgacctagaaatgagttttgttgatgaagaagatgttagatcaatagttgaaaaattattaacaaaagttttcaaagaagtaattaatgttgagttaaaggaattcccaatattgtcttatcatgatgcaattgaaaaatatggtacagataagccagatttgagatttgatattacaattgaagattttaaaacattttcaaataagtcagactttaaagctttttcagattgtgattcagttaggataatttcagtccctaatggtgagttttttactagaaaaattattgatgagttagattcttatgctcaatctttaggtgccaaaggtcttgcttggcttaaagtaaataacaatgaattttctggcggaatttcaaaattttttgattctaatttaagtaaagaaattattgataatctaaaacttaaagataattctatttgtttcatggttggagataagctaaatacctctctacgcgttttaggtaaaataagaagtaaggtagcagatttgcttgaattaaaagataactctgtattttcacctgtttggattgttgatttcccattatttatgtggaacgaagaa

SEQ ID NO: 298104 - DNA, 1084 bp, Unknown
  Bacterial polypeptide expressing nucleotide sequence isolated from the Sargasso Sea
aattgattgcagttcaatagaagttcttaatactgcagaaactccagcctttcctttggatcaatcatcagaagttggcgaagatgtaaggttaaaacatcgcacacttgatctcagaagaccagttatgcaagaaaatctgagaataaaatctaaacttacaaaatctattagagattatttagaaaaacattcattcgttgatattgaaactcctatactaactaaagccactccagaaggagctcgtgattatttggttccaagcagaacaaatcctggcaatttttttgctttaccgcaatctccacaattatttaaacagatgttaatgatttctggatttgacaggtattatcaaatcgcaagatgttttagagatgaagatttaagagctgatcgacaaccagaattttctcagattgatatagaagcctcttttgtagaagaaagtgatgtaatgaaaatatcagaaggcatggtcaaacatgcttttaaagaagtgcttgattttaaaataaaagaaattccaaaaataaagtggtctgatgccatggagcactatggttcagataagccagatttgagaaatccgctaagactagttgaaatagctgaaatttttaaagaagaagagtttaaagttttctcagaccctgcaaatgatacagaatctagaatagcagctttagtaattgaaaatggagatagtgtaggtagaggtcaaattgatagatatacggattttgtaaaagaatttggcgctaaaggtttggcatatattagagtagaagaagccaatatatctggattaaactccccgattcttaaatacttatcagagaagtgcttagaaagcattttaaaagatttaaaacttaaaaagggctctttggttttctttggagctggtgacaagaagacagttaatgattatatgagcaaacttatttctagaattggtgaagaccttaatctattagaagatggctataagttttgctgggtaactgattttccaatgtttgaaaaatctgcagacggaaatttaacctctttacatcatccatttactagccctgaa

SEQ ID NO: 298105 - DNA, 1171 bp, Unknown
  Bacterial polypeptide expressing nucleotide sequence isolated from the Sargasso Sea
attgaataaatatagaactcataattgtggtgaattagatatagactctgttaaaaaaccagtcttagtatcaggctgggttcataaaaaacgagatcatggtaatttattatttattgatttaagagataattttggaattactcaatgtataactgataaagataacaaaagtttttctgatttagaaaaaatacctttagaaacagtaatcaaaattgaaggaattgttttaccaaggtctaacgaaactataaataatgaaatatcaactggtgaaattgaaataaaaattaaagattttgaaattttaggtaagactaaggagctaccattacctgtattctccgaacaagaatatgctgaagaaataagattgaaatatagatttttagatttaagaagaaaaaaaattcataacaacataattcttaggtcaaaagtaatttcatttattagaaaagaaatggagaagctcggtttcaatgagtttcagactccaatactaacatcttcaagtccggaaggggcaagagattttttagttcctagcagattaaacccaggtaaattttatgcattaccacaagctccacaacaatttaaacaattaataatggtatcaggattcgatagatattttcaaattgccccttgttttagagacgaggatgcaagggcggatagaagcccaggagaattttatcaattagatatagaaatgtcatttgtagaacaagaagatgtttttgaagtggtcgaaaagttaatggtaagtctatttaataaattttctaagaagaaaatgttatataaaaaattccctcgaattccatttaaagaggcaatgaacaagtatggaaccgataaaccagacttaagaaatccactactaatccacgatatctcagaagtattcaaaagagatgatgttaattttgaaatttttaaaaaattatttaaatcaggatcattaattaaatccattgtaacaaaaaaaacaagcgctaagccaagaagtttttttgataatattgataaatgggcaaaagatcaaggatggggcggattagcatatttttctattgaaaaagatgaaagtggaaaaataattggaaaaggtcccgttggaaaatttttttcggaagatgcattaaaaagaaatcagaaa

SEQ ID NO: 298106 - DNA, 435 bp, Unknown
  Bacterial polypeptide expressing nucleotide sequence isolated from the Sargasso Sea
ttaaatttagtcataacccattttcaatgccacaaggcgaattaaaagataaagactttgaaaatcctcttaatattcttgcttaccaatatgatatagtttgcaatggaatagagttatcttctggtgcaataaggaatcataaacctgaccttatgtataaactgttttcaattgcaggttacaataaagcagaggtagacgaaaaatttagcggtatgattaacgcattaagttatggtgcaccaccacatggtggaattgcacctggtatagatagaattgtcatgcttttagcaaatgaaaaaaatataagagaagttaccatgtttccaatgaaccaaaacgctcaagatttaatgatgaacgcaccatcagagattaatcaagcccaattgaaagaattaaatctttcaataaaaactaagagttaaa

SEQ ID NO: 298107 - DNA, 1300 bp, Unknown
  Bacterial polypeptide expressing nucleotide sequence isolated from the Sargasso Sea
agagaccccattacttacaaagtcaactcctgaaggggctcgcgattttcttgttcctgcacgtctttcaaatggagaattttttgctttacctcaatccccacaactctttaaacaacttttaatggttgggggcttagataagtattatcaaatcgcaaaatgtttccgtgatgaagacttaagggcagatagacagccagagtttactcaattagatattgagatgagctttattagtgaagaagaaataatttcttttaatgaaagtctcataaaaaaaatatggaaagaagtgttaaatattaattttaataatgcttttccaagaatgacatggcaggcagcaatggataattacggcactgatagaccagatactagatatcaaatgttattgaaagatttaggaggagtattaggtaatattggatttaatattttcaccaaggcaattaagtctggagggtatataaaatccataacagtcaaaggaggcaattcaagtattagcaacgtaagaattaaaccgggaggtgacatcttcaaagtagctcaagacgcaggagctggtggtttagcctttataagggtcaaaggagatgagcttgagactattggggcaattaaaaataatttaagtgaagagcatatagctgatattttaaaaatcacagaagcaaaagatggagacttaatcctcttaggagctggagataaacaaattgtcaatcagtcattagatagggttagacaatatatcgcaaaagaattaaatctcatagataaaagcaaatggaatttcttatgggtaactgacttccctatgtttgagagaaatgaagatgaaaatagatatgaagctttacatcatcctttttgttctccaaaaaatataaaatctaaagattctgaaaacttgaaaaaagaaattgagagctctacagcaaatgcttatgacttagttcttaatggattggagttaggaggtggctctttacgtattcatgaggcgaacttacaaagacaggttctgaaaacggtaggacttactgataaagagattgatgaaaaatttggatttttaatagaagccttagaaatgggggctcctcctcatggtggaatagcgtttggattggatcgtattaccatgctgatcattggtgcagattcaatcagagaaaccattgcgtttccaaaaaatcaacaagcaaaatgtcttctcacaaatgcaccttccaatgtctctgaatcacaattaaaagaattagatattgaaataacaattgatgaataa

SEQ ID NO: 298108 - DNA, 1753 bp, Unknown
  Bacterial polypeptide expressing nucleotide sequence isolated from the Sargasso Sea
aatgactattagaacacataattgtggtgaactgaataataatcatattgacaagaccgttcagctttcaggatgggtaaactctataagaacccatggtcagattatatttatagatattcgtgatcgctttggtaaaacgcaggttatactaagttctgatgaattaattgaaatcggtaaaaccttgtcaaatgaagatgttattcatgtatccggtaaagtttcttcaagagaaaaagatttaatcaatcctgatttatcaacaggtgaaattgaagttttagttgaaaaaattgatttattaagtactgctgatcctatgcctctatccatacaagatcgagaagcgtcatctgaagagcatagattaaaatatagatatttagagcttagaaattcttctcttcaaaataatttaattataagacataaaacagctcaggtagtaagaaatttcttatcagaaaataattttctagagattgaaacacccgtcttaatgaagtcgactcctgaaggtgctagagattatctagtaccaagcagagttcacaatggtcaattctatgcgttaccacaatctccacaaatgtataaacaactatttatgatttcaggcttagatcgatattttcaaatcgtaaaatgttttagagatgaagatttgagatctgatcgtcaaccagagttcactcaaattgatttagaaatgagttttgtggatgaagctgaagtcagaaatttagttcaaaatttaattgtcaaagtatttaaagaaataattaatgtggatttaaatgattttccaattcttccatataaagaagctattgaaaaatatggtactgataagcctgatttaagatttgaaatgcttataaatgatttcaagcctttttcagacaaatctgattttaaagcattttcttcttgcgaggctgtaagaatgattcacattcaagaagctgataaattttccagaaaagttatagatgaaatggatgcttatgctcaatcaattggcgctaaaggactagcgtggtataaagtgaataatggtgattttgagggtggaatttctaaattttttgattctgaacttcgtaatgaaatcattagcaattttggaattaaagataactcaatatgttttatgattggtgataatctaaataattcactcaaaattcttggaaaagtaagaagtaggcttggcgatatattaaatcttaaggataatagcctgtttgctcctgtttggattgtagattttcctttatttgattggaatgacgagactgaaagatttgattctgtaaatcatccttttactgctccaaaagactctgatatagaaaatgtcttatcaaatcctggagatattatttctaaaggctatgatatagtaattaatggttatgaagtagctggaggttcaataagaatccatgaccataaattacaaaaagatatatttaaaataatgaatctctctgataaggaaatttcggaaaaatttggattttttatagatgcacttaaatatggtactcctccacatggtggtattgcatttgggttagatagattagtcatgttgttagcaggagtgacaaatattagagacgttattgcatttccaaagacaacatcagcatctgctttgatggaagaagctccaaaccttgtttcagaagaacaattaaatgaacttggaataaagattgtagatgatgaaaaaaacgtttga

SEQ ID NO: 298109 - DNA, 1297 bp, Unknown
  Bacterial polypeptide expressing nucleotide sequence isolated from the Sargasso Sea
atgagaactaatttttgcggtgaattaaataaaaaatttattggaaaagaggtaactatctgtggttggattcatagaagaagagaccatggaggagtaatattcctagatataagagatacaacgggcatcgtccaaattgttatccgaccagaaactaaagaaacatttaaaattgcagaacaagtaagatctgaatttgtattaaaagccactgggaatgtagaagaaagaccaaaagattctgaaaatacaacacttacaacaggagagatagaaattgattgtagttcaatagaagttctcaatactgcagaaactccagcctttcctttagatcaatcatcagaagttggtgaagatgtaagattaaaacatcgtacacttgatctcagaagaccaatcatgcaagaaaatctgcgattaaagtctaaacttacaaaatctattagagactatctagagaaacattcatttgttgatattgaaactcctattctgacaaaagccactccagaaggagctcgtgactatttagtcccaagcagaacaaatcctggcaatttttttgctttgccacagtccccacaattatttaaacagatgctaatgatttctggatttgataggtattatcaaattgcaagatgttttagagatgaagatctaagagctgatcgacaaccagaattttctcagattgatatagaagcctcttttgtagaagaaaatgatgtaatgaaaatatcagaaggcatggttaagcatgcttttaaagaagtgctcaattttgaaataaaagaaattccaaaaataaattggtctgatgccatggagcactatggttcagataagccagacttgagaaacccgctaagactagttgaaataggtgaaattttcaaagaagaagaatttaaagttttctcagatcctgcaaatgatccagagtctagaatcgcagccttagtaattgaaaatggagatagtgtagggagaggtcaagttgataggtatacagattttgtaaaagaatttggcgctaaaggtttggcatacattagggtagaagaagccgatatatctggattaaattctccaattcttaaatacttgtcagaaaaatgtttaaaaagcattttaaaagatttaaatcttaaaaaggggtctttagttttctttggagctggtgataagaagacggttaatgactatatgagcaaacttatttctagagtcggcgatgatcttaatctactagaagatggctataaattttgctgggtaactgattttc

SEQ ID NO: 298110 - DNA, 940 bp, Unknown
  Bacterial polypeptide expressing nucleotide sequence isolated from the Sargasso Sea
aatgggttgggtaagtagtgttcgtgatcatggaaatcttatatttattgaattaagagacacagattcaagaatacaattagtattagacgctgaaaaggttgagttagacacatttaaatcagaatactatatatcaattgacggagaatttatcaaaagagatcctgcaatgataaatgaatcacaagcttttggtgaatttgaaatcaatgttaaaaatttcaatattctttcaaaaagtaaaactttgccatttcaattagatgactcggttgatacagaagaaaacatacgacttcaatatcgatatcttgatctaagacgagaagatatgaaaaaaaatattattactcgatctgaaacatttaaatctataagaggaactatgaacgaattaggatttttagaacttgacactccaacgttaactaaatcaacgccagagggtgcgaaagactttcttgtcccttctcgtaaacaaaatggggctttctacgcattaccgcaatcacctcaaatgtataaacaattattcatggtgtctggttttgataaatactaccaaattgctaagtgttacagagatgaagattcaagaaaagatagacaaccagagtttactcaacttgatttagaaatatcgaacggatcccctgaaatagttagagaagttactgaatcaatagtaaaaaatcttttaactgacgtatttgaatttgatgttgaaataccttttatagatatgacatatgatgaagctataaatacatatggtacagataagcctgatcttagaataaaaaataaaattaaagattttacaaatatctttgaaaaaactgaaattaaatttataaagtctgcattagaaaataacggatttgtaaaaggatttgttacagaagatattttatctagatcacaaatagatgaatta

SEQ ID NO: 298111 - DNA, 1604 bp, Unknown
  Bacterial polypeptide expressing nucleotide sequence isolated from the Sargasso Sea
catgaagtctcattattgtggtgaaataacatcttcaaatctaaaggaagaagtaacgatctgtggttgggtgcacagaagaagagatcatggtggagttatctttttagatgtaagagatatcaaaggaatatgtcaggcagtagtcaacccagataacaaggaatcttttaaattagctgaatcaataagaaatgaatatgtagttcagattaatggcgttgtacgaaataggctggaaggaactattaataaaaatatgcatacgggcgaaattgaaatagaagtaaaaaatatagatattcttagcaaggcgaacacaccagtattcccaattgatgaataccaagaagtaaatgaagatgtgaggttaaaaaatagagtgcttgatcttagaaggccagagatgaatgaaagaataattaccagatcaaaaattacttctctcataaggaattatctagataagaatgatttccatgaaattgagacacctatactaaccaaggcgactcctgagggtgcaagagactacattcttccaagcagagttcaaccaggaagtttttatgctttaccccaatctcctcaattatttaaacaattactaatgatgggaggtttgaataagtattatcaaattgctaggtgttttagagatgaagacttaagagcagataggcaacctgagtttactcaaatagatatcgaggcatcttttgtagagcaaaaagagattatgcagataagtgaaaaaatgataaaaaatattattaaagaattctgtgatgaaaccttagataaattcgaagtattaaattggcatgatgctatggaagaatatggttgtgataagcctgatttaagaatacctcttaaacttattgaaatatctgatttagtaaaagatgaagaatttaaagtatttgctgagcctgctaaagaccaaaattctagagtagttgcaatgagggttccaaatggaaactccttatcaagaggacaaatcgatgattacacaaaatttgtttcaaaacttggagctaaaggcctggcgtatataaaaataaatgatgttaaagatttagagaatggtattcagtcgcctattctcaagtttctaaaaagtgagacaatctcaaatattgtagatgttttaaaagttaaaactgatgatctaattttctttggcgctggacctcaatcagtagtaaatttatcaatgagcagtttaataaagaagttaggagaagatcttaatctttatagttcaaaatgggctccttgttggattgttaattttccaatgtttgaggaaaatgctgaaggagacttaactccactccatcatccgtttactttacctcaatgttctaaaaaagaattattagaagatccaaaaaaatctattgctcatgcttatgatgttgttctgaatggatatgagataggaggaggttcgctaaggatttttgataaagatatgcagcaaagtatatttagtattttaaatatttctaaagaagaagctgataaaaaatttggctttttattaaaagccctttcttcaggatgtcctcctcatggaggtattgcatttggtt

SEQ ID NO: 298112 - DNA, 1801 bp, Unknown
  Bacterial polypeptide expressing nucleotide sequence isolated from the Sargasso Sea
atggtaaaatatagaacacataattgtaacgagttaaaagaaagcgatgaaaataaagacgtcaaactcgctggatggattaatcgtaagcgagatcatggcaatgtcttatttattgatttgcgagatcattatggcgtaacccagtgtgtcattgaaaaaacaaatacaaagttattaaaagaatttgaaagtctaagggctgagtctgttattaaaatacatggtaaagttattaagcgtgataaagaaactattaatgagtccctattaactggtaaaattgaaatttctgttgatgcattagaagttctttctgctgcaaatgaattaccaatgcctgtattcggtgaaaatgattatcctgaagatataagattaaagtataggtttttagacattagaagagaagaattgcataacaacattgtattaagatcatctattatttcctatataagaaagttaatgtctgaggccggttttcttgaaatgcagacacccattttaactgcatcaagtcccgaaggtgctagagactatcttgttccaagcagaattcatcctggaaaattttacgccttacctcaagcgcctcaacaatttaaacaattaataatggcaggggggtttgataaatattttcaaattgctccttgttttagagatgaagatgccagagcagataggagtcctggtgagttttaccaattagatatggaaatggcatttgttgagcaagatgatgtatttaatgccattgaacctgttttatcttcagtatttaaaaagttttcaaattttaaagtgactgatttaccttttccaagaattacctacaaagaagcaatgaaaaagtatgcaacagataaaccagatttaagaaatccaattgaggtatgtgatattactcaagaattttctgatgacgatgttgaatttaaagctttcaaaaaagttatagatgctggtgggcgagtactaggaatacctgcaccaaaatcttcaatgcaaccaagaagtttttttgataatttaaacaattgggcaaaaaaagaaatgaatgctcctggcctcggctatattatttttgaagaagtagatggtatacttactggaaaaggcccaattgcaaaatttataccaagcaatattcaattagaaattgctaaaaaagcaaatttaaattcaggagattctatattctttgcatgtgataaaggtaagttggtatatgatattgctgcagcagcaagaaataaaatcggagagattcttgatcttatcgaaaaagatgtatttaggttctgttggattatagattttccaatgtacgagcaggatagagacacaggtaaaattgattttagtcacaacccattttctatgccacaaggtggattagaagcattagaaaatagtgatcctttagatgttctaggatatcaatatgatattgtttgcaatggcatcgagctctcatctggagccattagaaatcacataccagaaatcatgtacaaagcttttgaaataagtggttatactaaaaaacaagtacaagataaatttgggggaatgattaacgccttttcttacggagtgccacctcacggaggcatagctcctggcatagataggattgtaatgcttctagctcaagaaaagaatatcagggaggtaattttgtttcctatgaatcagcaagcacaagacctcatgatgcttgcgccggcagaagttgatgacaagactttagatgagctgaacctaaaagtaatacctaatgaagaagattaag

SEQ ID NO: 298113 - DNA, 1765 bp, Unknown
  Bacterial polypeptide expressing nucleotide sequence isolated from the Sargasso Sea
atgaaaattttaagtaaagacattagcgaaaaagatattgataagacggttacgctatctggctgggtgaataaaaggagagatcatggaggtattattttcgttgatctcagagatcacaccggaatagttcaaattgtattcaatccagataataaagatatcttcaaagatgcagaaatattgagatctgaatttgttatatctgtcactggtacaatcacagcacgttcagaagatacaattaataaggatatttcttctggtaagatagaggtagtggctgatcatttaacaatactcaataactctgaaactcctccttttatgattaatgaccataatgttagtgaagatttgaagttgcaatataggtatattgatttaagaagcagaaaacttcaaaataatttaaaatttagatcagacttattaaaagtaatccgagattattttcatgaaaatgagtttatagatgtagaaactcccattcttacgaaaacaacacctgaaggtgcaagagattatttagttccaagtagattgaagaaagaatctttttttgcacttcctcaatcgccacagatatttaaacaaacattgatgattggtggaatagaaaagtattatcaaatagcgagatgttttagagatgaagaccttagatcagatagacaacctgagtttacccagcttgatgtcgaacttgcatttgcaactgaagaaaaaattattaatttaacagaaaaactctttcataaaatattcagggatattttttctgtaaatgatgttgtatttaataaaatgacttatgaagatgcgatggaaaattatggatgtgacaaacctgatttgagaaatcctctaaaaatgatatctataaaagaagatattaaagatactaaatttaaagtttttagtgatcctgctaatactcaagatggcaaagttgttgccctaagagtcccaggtggaaacaaattatcaagaaaagatattgatgttttaacagagatgctaaaagaatttggtgctaaaggattagcctatttaaaatgcgatgatatcaatgatatatctgaaggtattaattctcccataaaaaagtttttagatgatgaaatagtaaaaaaaataattggaaagactaatgccgaaagcggtgatatcatttttttctcagcaggtaataaagatgtggttaacttatctatgtcgtgcttaattaaagagttaggaaaacagttgaatatgttatcagacgagtggaaatttttatggattactgattatccattatttgagcgtcaaagcggcactaatgccccaacgcccttgcatcatcctttcacagcaccagtaaatgttcatgatttagataaaaacaatatctttgagattaaatcaagggcatatgatttagtactgaatggcgctgaaattggcggaggatcaatcagaatacattctagtaaattgcaatcgaaagtttttgaattattaggtttatccaaggaagaagtagataataaatttggtttttttgtgaatgcgttatctatggggtgtccaccgcatggagggattgcttttggtattgatagaattgttatgatgttgctaaaaacagacagtatcagagacgtaattgcatttcctaaaactcagtcagcgtcttgtttgatgactgatgccccatcgagcgtatctaatgaacaattatctgaattaggaataaaaacaattaagaacccaaaatgaa

SEQ ID NO: 298114 - DNA, 662 bp, Unknown
  Bacterial polypeptide expressing nucleotide sequence isolated from the Sargasso Sea
tggttctgaacttcgcaatgaaatcattaataatttcggaattaaagataactcaatatgttttatggttggtgatgaacttaataattcacttaaaattcttggaaaagtaagaagtaggcttggcgatatgttaaatctcaaagataataacctgttttcccctgtgtggattgtagattttcctttatttgattggaatgatgaaaccaaaagatttgattctgttaatcatccctttacagctccaaaagactctgatattgaaaatgttttatcaaatcctggagaaattatttctaaaggctatgacatagttattaatggatatgaagttgctggaggttcaataagaatccacgatcataaattgcaaaaagatatttttaaaataatgaatttatctgataatgaaatttcagaaaaatttggattttttatagatgcactcaaatatggaactcctcctcatggaggtattgcctttggattagatagacttgtcatgttattagctggagtgacaaatattagagatgtaatagcctttccaaaaacaacatcagcatcagctttgatggaagaagctccaaacgttgtctctgaagaacaattaaatgaactcggaataaagattttagatgatgaaaaaaacatttgaa

SEQ ID NO: 298115 - DNA, 928 bp, Unknown
  Bacterial polypeptide expressing nucleotide sequence isolated from the Sargasso Sea
tatgtacagaagtcataattgtggagagctaaaaattagtgatgttggtaagaatgttaagcttgctgggtgggttcaaaaaattagaaacaaagggtttttaatttggattgatcttagagatagatatgggataacacagcttattattaattctgaaaaaagttcaaaaaaagttatagaatcagtaaaagatattggtagagaatttgtaattcaagttgaaggagaggtaattaaaagagaagcaattaataagaatatatcaactggtgagattgaaattttagtttcagaaatatctgttttaaactcatctaaacttcctcctttcacaattgaaaatgatactgacggtggagaagagttgagaatgaaatataggtatctagatttaagaagatctattctcaaggacaatattatttttagaaatgaactaacatttcaagttcgtaaatatttaaaagagcaaggattcattgatattgaaactccatatttaattaaatcgacacctgaaggagccagagattttgtagtgccttcaagaataaatccgggtgagttttatgcccttccgcaatcacctcaaacatttaaacaactactaatggtctcaggatttgacaaatatgttcaaattgtaaagtgttttagagatgaagatttaagggctgatagacaacctgaatttactcaaattgattgtgaaatgtcgtttgttaatcaagaagatgttctaaatacttttgaaggtttagtacaaaatttattcaaagtttgtattggagcgtctttagaaaaattcgatcgtatatcttacagcgatgcgatggaactttacggatcggacaaacctgatacacgatttggaatgcagtttctaaacctctcagaaaaggctaaaggaagtggtttcaaaatt

SEQ ID NO: 298116 - DNA, 1438 bp, Unknown
  Bacterial polypeptide expressing nucleotide sequence isolated from the Sargasso Sea
accgtaataatggttagcggaattattaatgaaaggcccaaagattccataaatacaaatttaagtactggagagttagagcttaaggttgaagatttgcaagttctcaaccaaattaaaaacaacttaccttttccagtgtctatacatgattatgaaaatacaaaagaagaactcagattaaaatatagataccttgatttaagaaggggaaaattactagaaaatttaaaaacaagacataagattattaaagttgctagagaatttcttgataattttggatttacagaagtagagaccccattacttacaaagtcaactcctgaaggcgctcgcgattttcttgttcctgcacgtctttcaaatggagaattttttgctttacctcaatccccacaactatttaaacaacttttaatggttgggggcttagataagtattatcaaatcgcaaaatgtttccgtgatgaagacttaagggcagatagacagccagagtttactcaattagatattgagatgagctttattagtgaagaagaaataatttcttttaatgaaagtctcataaaaaaaatatggaaagaagttttaaatattaattttaataatgcttttccaagaatgtcatggcaggcagcaatggataattacggcactgatagaccagatactagatatcaaatgttattaaaagatttaggaggagtattaggtgatattggatttaatattttcaccaaggcaattaagtctggaggttatataaaatccataacagtcaaaggaggtaattcaagtattagcaacgtaagaattaaaccaggaggtgacatcttccaagtagctcaagatgctggagctggtggtttggcctttataagggtcaaaggagatgagcttgagactattggggcaattaaaaataatttaagtgaagagcatatagctgatattttaaaaatcacagaagcaaaagatggagacttaatcctcttaggagctggagataaacaaattgtcaatcagtcattagatagggttagacaatatatcgcaaaagacttaaatctcattgataaaagtaaatggaatttcttatgggtaactgacttcccgatgtttgaaagaaatgaagaggaaaatagatatgaagctttacatcatcctttttgttctccaaaaaatataaaatctaaagattctgaaaacttgaaaaaagaaattgagagctctacagcaaatgcttatgacttagttcttaatggattagagttaggaggtggctctttacgtattcatgaaggaaacttacaaagagaggttctgaaaacggtagggctttctgatcaagagattgatgaaaaatttggatttttaatagaagcgctagaaatgggtgctcctcctcatggtggaatagcatttggattgg

SEQ ID NO: 298117 - DNA, 698 bp, Unknown
  Bacterial polypeptide expressing nucleotide sequence isolated from the Sargasso Sea
aaagaacaatgaaatatctgctaaaggacctgtaggtaaatttttttctaaggaatctttggaggaaataatgcaaaaaaccggagcaaaaattggagatagtatttttttagcttgtaacaatcaaaaagaattagaaagagttacttctttagcaagagagaagatagcaaatgatttagatttaattgataatgattcatttgctttttgctggatagttgactacccaatgttcgaaagagatgaacaaaccaataaaattaagtttagtcataatcctttctctatgcctcaaggagatttagataaaatcaattttgagaaacctttggatatacttgcttttcaatacgatattgtatgtaacggtattgagctttcctctggtgcaattagaaatcatattcctgatcttatgtataaattattttcaattgcgggttataataaaaagcaggtggatgaaaaatttagtggtatgattaatgctttaagttatggagcaccacctcatggaggaatagcaccgggtattgatagaatagtaatgcttttagctaatgaaaaaaatattagagaagtaactatgtttccaatgaatcaaaatgctcaagatttaatgatgaacgcaccgtcaaacgtgaatgaaagtcaattaaaagagttaaacttatctttaaaattgaaaaaataat

SEQ ID NO: 298118 - DNA, 1816 bp, Unknown
  Bacterial polypeptide expressing nucleotide sequence isolated from the Sargasso Sea
catgcgcagccactcctgcggcgatctgcgcagcgatgccatcgacagcagcgttctgctcagcggctgggtggatcgccgccgcgaccatggcggggtgatctttattgatttgcgcgaccgcagtggcaccgtgcaaatcacggtggaccctgatatgggggccgaagcgtttgctgttgctgagcacctgcgcaatgaaacggtgctgcaggtggagggacgggtgcgggcgcgtcccgatgaatcccgcaacgagcgcttggccaccggtgaggtggaggttctggcccagcacctaaaggtcctcaatgcccccagccgcaatctgccctttgcggtttcggtgcatgatgacgaacaggtgcgcgaagagctgcgcctgcgtcaccgttatctggacctgcgccgcgagcgcatgcgccgcaacctcaatctgcgccaccaaacagtgcagaccgcccgccgcttccttgaagacgagggcttcattgaggtggaaacgccggtgctaacccgctccaccccagaaggcgcccgcgactacttggttccatcccgcgtttgcgggggcgaatggtttgccctgccccaatcaccgcagctgttcaaacagctgctgatggtgggtgggcttgagcgctactaccaagtggcccgctgcttccgcgatgaagacctcagggccgatcgccagccggaattcacccagctggatatggagatgagcttcctggatcaagaacagatcctcgatctgaatgaacgcctgatcgcccgcatctggaaggtggtcaaaggggtggaactgccgttgccgctgccgcgcatgacttggcacgaagccatggagcgttacggcaccgatcgccccgatacccgttacggcatggagctggtgggcgtcagcgacatcgttgccgacatgggcttcaaggtcttttccggtgcggtcgctgccggcggctcggtcaaatgcatcaccgtgcccggcggcaatgacaaggtcagcaatgtgcgcatcaaacctggcggtgatgtgttcagcgaagcgcagaaggctggagctggcggtttggcgttcatccgggtgcgcgaaggcggcgagatcgacaccatcggcgccatcaaagacaacctcagcgatgagaaaaaagccgaactcatccgccgcaccggagcccaaccgggcagcttgatcctgtttggtgcaggcgataccgccacggtgaacaaggccctcgatcgagtgcgccaatacctggccaaagagctggagatggtgccggctgaggcctggaacttcctctgggtggtggattttccaatgttcgaattcaacgccgatgaaaaccggcttgaagcgctgcatcacccgttctgcgctgccaaccccgaggaccttggcgacgatccagcccaatggagcgaacggctacccaaagcccgcgcccaggcctacgacctggtgctcaatggcctggaactcggtggtggctcgctgcgcatccacgatgcagcgctgcaaaaccaagtgctgcaaaccatcggcctggcacaagaggaagcccaagagcaattcggtttcctgctcgaagccctggaaatgggtgcccctccccatggcggcattgcctttggcctcgaccggatggtgatgctcctggcaggcgaggaatccatccgcgacaccatcgctttccccaagacacagcaggcccgctgcctgatgacatcagcaccaggcggtgctaacgacaagcaactcgaggaactgcacgtagcaagcacctgggtggaaccggaagaaaactga

SEQ ID NO: 298119 - DNA, 1216 bp, Unknown
  Bacterial polypeptide expressing nucleotide sequence isolated from the Sargasso Sea
attttatgcactccctcaagcacctcaacaattcaaacaattaataatgatttcaggttttgacaaatattttcaaattgcaccttgttttagagatgaggatgcaagatcagatagaagcccaggagaattttatcaattagacttagaaatgtcatttgtagaacaagaagatgtattcaaagtagttgaaaaattaatggttaatttatttaaaaacttttcatcaaaaaaattaatacatgaaaaatttccaagaatctcttacgaagaagcaatgcttaagtatggttctgataaacctgatttacgtaatcctttaattattagtgatttgacaaaaatttttactagagatgatgttacttttgaaatatttaaaaaacttgtaaaaaaaggatcaaaagtaagatgtattgtagcaaaaaatacaaaagataaatctagaaatttttttgataatattgataagtgggcaaaagaacaaggagcatctggtttagcatattttactttggaaaaaaatacaaaaatcacaggtaaaggaccagttggaaaatttttttctgaagaggctttaaaagaaattatgaaaataacatcagctgaaattggtgatagtatattttttgcttgtggcaatattcatgaggttcaatcaatttcatctttggcaagagacaaaatagccaaagatcttgaccttatagatgaaagtaaatttgcattttgttggattgttgactatccaatgttcgaattagacgaaaaaacaaaaaaaattaaatttagtcacaatcctttttcaatgccccaaggtgatattaataaactaaattttgataaacctttagaaattaaagcttatcaatatgacattgtttgtaacggtattgaattatcttctggagcaattagaaatcatttacctgagttaatgtataagcttttttccatagcaggatataataacaaacaagttaatgaaaaatttagtgggatgattaatgccttgagctatggagcgccgccacatggtggcattgcgccaggtattgatagaatagttatgttattagctaatgaaaaaaatataagagaggtgacgatgtttccaatgaatcaaaatgcacaagatttaatgatgaatgctccctcagaagtatcagaggatcaattgaaggaacttaacctttctttaaaaaagaaaaaataa

SEQ ID NO: 298120 - DNA, 1783 bp, Unknown
  Bacterial polypeptide expressing nucleotide sequence isolated from the Sargasso Sea
aatgaaaaaaagaacgcataaatgcaatgagatctcaaaagacctaataggtaaggagatatctattgcgggatggattcgaagaaggagagatcatggcggtgtaatcttctttgatgttagagatgagactggtctagttcaagtcgtttacaatcccgaactcaaagagatctttgaacttgcagaaagttgtagaaatgaatttgttatttattcaaaaggtaaagtaagggaaagaccagatggaacagtaaatgaaaatctaatttctggaaaagttgagatagaagctaatgaattaactattttaaacacttctttgccattaccatttcaattagatgagtattcatctgtaggggaggaaacaagacttaaatttagattcttggaccttaggagagatgaaatgcaatctaatcttaggcttagagctaaagcatcacaggttttaagagaatttttagaccttaatgatttcatagagatagagactcctttattgactaaagctactcccgaaggagcaagagattatgtggttccgagtagaacttttccgggttctttctttgctttgcctcagtctccgcagttatttaaacaaactttgatggcctctggatttgaaagatactatcagtttgctaaatgttttagggacgaagatctaagagctgataggcagccagaatttacgcagctagatattgaatcatcctttgtggatgcctccgatatcattaatcttgtaactgagatgattaaacacgtttttaaagaatcattagatattgatttaggtgattttcctgttttgacttactctgaagctattgagctatatggaatagataaaccagatttaagaaaccctctaaccttaattgaagttaaagacttatttaaagattctgattttaaagtctttagtgagccagctaatgacgaagagtccaggatagctgctctatctgtacctaaaggcgaaacgcttacaagaaaacagatagatgactatacagaatttgttggaaattatggagccaaaggcttggcttacataagagtagaagatccctctaaaggcaaagaaggtttgcaatcccctattatcaaatttattgatgatgagataatcaagaaacttcttaaagtactagatgttaaaaaaggtgacataatattttttggagcaggtaaaagaaatgtagtgaatgactctcttgctgctttaagaaatttgcttggtaaggacttagatttattagaatctgattgggctccttgttgggtagttgattttcctatgtttgaaaagaatagcaaaggagagttgactcctttacatcatccttttacagcccctagaggtagtatcgacgaattaaaggcagaacctctaaatgcccttactgatgcctatgatgtggttttaaatggcactgagttaggtggaggatcggttaggatatatgatcatgagatgcaaaaggtggttcttagcttattaggtataaacgaagaacaagctgaagaaaagtttggatttttaacttcagctctacagcatggttgtcctcctcatgcaggattagccatcggttttgataggatgattatgttgatgaccaattctgaatctataagagatgttatcgctttccctaaaacacaaaccgcctcttgtttgttaacagatgctccgggagaagcttcaaatgaacagcttgatgaattgcatattaaatttcatggcctagagaaggagaaaaaatag

SEQ ID NO: 298121 - DNA, 1180 bp, Unknown
  Bacterial polypeptide expressing nucleotide sequence isolated from the Sargasso Sea
tatgtacagagatttaatgtgtggaaaaatttcctcaacgaatgaggggaaaaaagtaaaattagctggttgggtttctagaagaagagatcatggccaacttatatttattgatttgagagataagtctggaattatgcaaatagtttttaatcctgaaacttctcaagaaactcatgaaaaagcaaaaaatcttagaagtgaatgggttatttcagttaccggaaccgttaatagaaggatcgaaggggctgaaaacaaagagatttctacaggtgattatgaaatgactgtagaatcaatggatgtcttgtcaaaatcaaagactcctccctttgaaatttcagataataaggaagtttcagaagaagttagacttaagtatagatttctagacctaagaagagaatctatgcaaaacaaattaaacttaagacataaggttacaagatttatttgggatgacctttcaagtaaaggttttacacatattgaaactcctatacttattaaaagtacgcctgaaggagcaagggattatgttgttccttctagagtaaacaatggatctttttatgcattaccgcagtccccgcaacagatgaaacagatgctgatggtttctggttgtgatagatattttcagatagctagatgttttagagatgaagacttaagagctgataggcaacctgaacatactcaactagatttagaaatgagttttgttcatcaaaatgatgttattgatgtagttgaaagcttatatatagatttaattaaaaatatagataaaacaataaaagtagattcttcatttgaaaaacttacctattctgcggcaatggatagatttggaactgataaacctgatatgagatttggaatggaactaagtaattttacaaatatagctcaatcaatagaatcaaatgtgattagtaattctctcaagagtggaggaatattaaaaggattagttgctaaaaatttaagcaaatatggacgaagagactttgatagattaacagataaggtcaaagagcaaggtgcaggaggattgatttatatttcaatccctgaggatattgatggtgaaataactttagataaaactagtggtccacttaataagttctacagtgaaaagaattttcaagatataagaaacttaacttca

SEQ ID NO: 298122 - DNA, 1708 bp, Unknown
  Bacterial polypeptide expressing nucleotide sequence isolated from the Sargasso Sea
tatggatatttccgatttatcaaaattaaaaaataaagaaaaagtaaatgacctaagagggtgggtagacactataaggcaccacgggggtttaatgttttttgaacttagggatcatgaaacaaaagttcaaatagttactgataacccagaacaatttgataatctaaaaaacgaattctacgtatcagtaactggaattttagtaaaaagaaaaaaagaaaatgttaacaaagaggtattgtttggtgatttagaaattgaattatcaaatttagaaattatttctgaaagtaaaactttaccttttcaaatcgaagacaacattgaaacagatgaacagattagattaaaacatcgttatttagatataagaagaaaagaaatgaataataacataattgcacgttcaaacacatttaaaagtataagagaagtaatgaataagttaaatattaacgaactagatacacctacattaataaaatcaacacctgaaggtgcgaaagattttatagttccttctagaaaatcacccggttctttttatgcattacctcaatctccacaaatgtataaacaactatttatgctatctggattaaagaactactatcaaattgctaaatgttatagagatgaggactctagaaaagatcgtcagcctgaatttacacagttagatatagaaatatctaatggagatcctaagattgttcaaaaaataattgaatcaacgatgaaacacgtattaaaaactgtatattcaattgaagtaaaaacaccatttacaaaaataacttatgatgaagctatgtctttgtatggtacagataaacctgatttaaggattaaagaaactattacagactttacaaatatttttatggatactgaaatttcatttataaaagaaacaattaaaaataatggaacagttagaggatttctaataaacaatctattaagtagatctgagatagataatttagataaactattgaaaaacgaaggaagcccaggattaggttggtttaaaatagaaaataaaaaagtatcggggcctttagcaaaaatacttaatgaaaaagaaaataatgaattagtaaaaaatgataattgtacaatgctatttcaatctggtaaacaggatgaatcttctcattatttagacactttaagacgtaaaatatatagtattccaaatgaaaatacttatgagtttgtatggattgatgatttcccttatttcgaaatagaaaacggagaattgcaaccttcacatcacccatttacttcaccaaaagatacttcagaatttctctctaatccaaatgatgctaaagctttacattatgatttagtattaaatggcatagaattaggatctggatctcaaagaattaatgatcccaaattacaaaaagaagtactatccaaatggggattatcagaatctgatataaatgatcgttttgggtggtttatagaagctttatcatatgggtcaccacaacatgctggatttgcagtaggtattgatagatttatagctgaaatgatgaatgcagattcaataagagacgttatcccttttcctaagacgcagtctggtctagacccattaactaatgcaccatcaaatttgtcaatattagaattacaagaatacaatatttcaattgaaagtatagaaaatgaagagtga

SEQ ID NO: 298123 - DNA, 1753 bp, Unknown
  Bacterial polypeptide expressing nucleotide sequence isolated from the Sargasso Sea
gatggcattaagaactcataattgcggtgaactaaataaaaatcatattgatcaaactgttaaactttccggttgggtcaactctataagaacacatggtcaaattatttttattgatttacgtgatcgattcggaaaaactcaaattattttgaattctgatgaattaattaaaattgggaaaaccttatctaatgaagatgttgtttgtatagaaggaaaagtttcttcaagatcaaaagatttaataaatcctgatttagaaacgggtgagattgaagttttagtggaaaaaatgaatgtacttagtaatgcagagccattacctatgtccattcaagatagagatgcctcatctgaagagcatagacttaagtatagatacttagagctaagaaataatgatttacaaaaaaatattattattagacataatacagcacaaactgtgcgaaattttctttcagataataaatttttagaaattgaaacaccagtcttgatgaaatctaccccagaaggagctagagattatttagttcctagcagagttcacaatggaaggttttatgcattgcctcaatctcctcagatgtataaacaattatttatgatctctggcctagatagatattttcaaattgttaaatgttttagagatgaagatttaagatctgatagacagcctgagtttactcaaattgacctagaaatgagttttgttgatgaaaaagatgttagattaatagttgagaaattattaactaaagttttcaaagaagtaatcaacattgagctaaaagaatttccaatattatcttatcatgacgcaattgaaaaatatggtactgataagccagacttgagatttggtattacgattgaagattttaaaccattttcaaataagtcaggctttaaagctttttcagattgtgattctgttaggataatttcagtacctaatagtgaattttttactcgaaaaattattgatgagttagattcttatgctcaatctttaggtgcaaaaggtcttgcttggtttaaagtaaataacaatgaattttctggtggaatttccaaattttttgattctaatttaactaaagagattattgatagtttaaagcttgaagacaattctatttgctttatgattggagacaagcttaatacttctttacatgttttaggtaaaattagaagcaagttaggagatttgcttgaattaaaagataactctatattttcacctgtttggattgttgattttccattatttatgtggaatgaagaaacacaaaggtatgattcagtaaatcatccgtttactgctcctaaagattctgatttaagtgatgttaattcaaatccttcagaagttatttctaagggttatgatattgtcattaatggttatgaggtagctggtggttcaattagaattcatgatcatagtttacaaaaagatatttttaagattatggatttatctgatgaagaaatttctgaaaaatttggattttttattgatgcattaaaatatggaactcctccacatggtggtattgcatttggtttagatagactagtaatgttattagctggagtaagtaatattagagacgtgattgcatttccaaagacaacatcagcatctgctttaatggaagaagctccaaaccttgtttctgaagaacaattagatgaacttggaataaagattctagatgatgaaaaagacgtttga

SEQ ID NO: 298124 - DNA, 1275 bp, Unknown
  Bacterial polypeptide expressing nucleotide sequence isolated from the Sargasso Sea
attgattggtaaagaaatagagctatctggttggataaataaacgcagagatcacggtggactgttatttatagacttaagagatagaacaggattgattcaagttgtttttgaccctgaaaatataaaagaaaacgaatttcattggaatcaatttagatcggaatgggtaattcaagttaaaggcatagttcaagcaagacctgagggaacagaaaattcaaatatgactactggtaaaattgaattgattgctaaagattataaggtgttaaatatttctaaaactttaccttttgaactaacagattttaaagaagagactgacgaattattacgtttaaaatacagatatttggatttaagacgacctcaaaaatatgagatgttaaatttacgacataaggttgtgaagtatataagagattatttagataaagatggttttttagaagttgagactcctattttaattaaaagtacacctgaaggtgctagagattttgttgtacctagcagaaacaacaaaggccaattttatgcgctgcctcagtctcctcaacaactaaaacaattacttatggtttcgggagttgataaatattttcaaattgttaaatgttttagagatgaagatcccagggctgatagacaacccgaatttactcaattagatctcgaaatgagttttgttactcaggaagatgttttgaatttaactgaaaaaatgttttctgggttagttaattcattagatttaaataaaaaaataaatatgccttttcaaagaatgaaatatgatgttgcgatgaatttatatggaactgacaaacccgatttgagatttgatatgcaaattaaagattttacacaacaaagttctggtaatacttttaaagtattgtcagatactgtgaaaaatggtgattcagtaaaaggaatagttgctccaactgaaggtaattattctagaaaaaaaattgattctctagttgaatatgtaaaagaattaggtggctcaggattgatttggatagtattagaagaagattataattcttcaaattttgattttaaaagtattgttaagaaatacttagatgatgaatatgttaagagtatagctaaatcatgtgaagcaaccaaaggtgatatgattttattagttgcaggcgaagaaaaatctagcttagagatattgggtgcattaagaaacaaattaggtaaagatttagatttaatagatgaaagccaactgaatttttgctttattac

SEQ ID NO: 298125 - DNA, 1393 bp, Unknown
  Bacterial polypeptide expressing nucleotide sequence isolated from the Sargasso Sea
ttgaacaaatttagaactcataaatgtaacgaattaagaaaagaaaaagttggagatgaggtaatcctttctggttggataaataaaaaaagagaccacggaaatcttttgttcgtagatttaagagataattatggaataacacagtgtattatagataaagaaaattctaattttaaaatattggaaaaaatacagttagaaactgtaattaaaattgttggaaaagttgttgaaagatcaaaagagtcaatcaataatgatattgaaacaggagaaattgaagtagttattaagaattttcaaattcttggtgaatgtaaagaacttcctttaccagtttttactgatcgagagtatgcggaagaaataaggcttaagtatcgtttcttagatttaagaagaaaaaaaattcatgaaaatattatattaagatccaaagtaatttcatttattagaaatgagatgaataagttaggatttttagaatttcaaacaccaattttgacttcatcaagtccagaaggagcaagagattttttagtaccaagtagattaaatcctggcaaattttatgcacttcctcaagcacctcaacaattcaaacaattagtgatggtatctggctttgataagtattttcagattgcgccttgttttagagatgaagatgcaagagcagatagaagtcctggggagttctatcaattagatttggaaatgtcttttgttgagcaagaagatgtattcaatgtagtagagaagttatttgttaatacattcaaaaagttttcaaatagaaaattattgtttaatcagtttccaagaatctcatttaaagaatcaatgattaaatatggaacagataagccagacttaagaaatccattaattatctatgacattactgaaatttttttaagagaagatgtttcctttgaaatatttaaaaaactagttaaatctggatctaaagtaagatgcattgttacaaaaaatacaattaataaaccgcgaagttttttcgataatattgataaatgggctaaagaacaaggcgcttcaggattagcttattttactattgaaaaagataaagaaatttcagccaaagggccggtaggtaaatttttttcaaaagactcactaaatgaaataatgattaaaactgaagcaaaagtaggcgacagtatttttcttgcttgtggtaaattagaagaggtagaaaaaataactgcattggccagagataaaattggaaaagatttaggtttaattgatgaaaacgttttcgcattctgttggattgtggattatccaatgtatgaaatagaaaatcaaacaaataaaattaagttcagtcataatcctttttctatgccgcaaggagata

SEQ ID NO: 298126 - DNA, 868 bp, Unknown
  Bacterial polypeptide expressing nucleotide sequence isolated from the Sargasso Sea
catgaagtctcattattgcggtgaaataacatcctcaaatcttaaagaagaggtaacaatctgtggctggattcatagaagaagagatcatggtggtgtaatttttctcgatgtaagagatataaaaggtatttgccaagctgtagtaaatcctgacaatgaaaagtcttttaaattagctgagtcaattagaaatgaatatgttgttaagattaaaggtattgtaagaaaaaggttagagggaacaataaataaaaatatgcatacgggagaaatagaaattgaggttaaagacttaatcattctcagtaaagcaaatacacctgtctttccaattgatgagtatcaagaagtaaatgaagatgttaggttaaaaaatagagttttagatctaagaagacctgaaatgaatgaaagaataataactaggtcgaaaattacttctttaataagaaattatttagataaaaatgattttcatgagattgaaacacctatattaactaaagctactccagagggagctagagattatattttacccagcagagttcaaccaggaagtttctatgctttacctcagtcacctcaactttttaagcagctattaatgataggtggtctagataagtattatcagatagctagatgttttagggacgaagatttaagagctgatagacaaccagagtttactcaaatagatattgaggcatcattcattgatcaagatgaaattatgaagataagcgaaaagatgattaaagatattatcaaggaattctgtggagacaagctagaaaaatttaaaataattaattggcatgatgctatgcgagattatggatgcgataaacctgatttaaga

SEQ ID NO: 298127 - DNA, 304 bp, Unknown
  Bacterial polypeptide expressing nucleotide sequence isolated from the Sargasso Sea
tggttctgttaggattcataattctgatatgcagaaagtaatttttgatatacttggtattgatcgtaaagaagccaatgaaagatttgggttttttatagatgcgctcaaatatggaacgcccccgcatggtggtatagcatttggatttgatagattagttatgttgctagctggtactaataatatcagagatgttattgcattcccaaaaacaacatcggccatgtcacttatggatggtgcgccaagccctgtttcaaaaactcaaatgaaagaactaggaattcaaattaaaaaatga

SEQ ID NO: 298128 - DNA, 1059 bp, Unknown
  Bacterial polypeptide expressing nucleotide sequence isolated from the Sargasso Sea
catgagtgaacagcgtgactgtctttgcgccgatctggatgccacatcggtagatcgcgagattcgactgtgcggctgggttcagcgtcgacgggatcacggcggtgtcatctttatcgatcttcgcgaccgcagtggtttagtgcaggtggtctttgatcctgatcgggagcagcagtttgctgtcgccgaatccgtgcgaagtgaatacgtcctgcaggtcgtcggccgtgttcggctgcgcccggaaggcacagtaaatgcggatctgcccacgggtgagatcgagctgctcggtttggagatcacggtactcaacagtgctgaccccttgccgttcccgattgaggatcccgacacgggcgaggcgttgcgcctgcggtatcggtatctcgaccttcgcagtgaccgtatgcagcataacctgcgcctgcggcatcaggtgattcgtgcgttgcgcggatatctggatgatcgggattttgttgagatggaaaccccggtgcttacacggtccacgcctgagggcgcccgcgattatctggttccaagccgggttcatccgggccagttttttgctttgccccaatcgccgcagttattcaaacagcttctgatggtctccggcttcgaacgctactatcagatcgcacgatgttttcgggatgaggacctgcgggcggatcgtcagccggaattcactcaactcgatatcgaaatgtccttcgtcgaggagagcgacatcatgtctctcatggaggagatggtgcgttcggtgttcgagagcgtcctgtcagtgactctcccggatcctctgccgactctgacttatgctgaggcaatgcagcgtttcggaacggatcgtccggatctgcgtattccgcttgaattggttgatattgccgatctgatggcagaggtggagtttaaggtgttcgccggaccggcgaccacgccaggcagtcgtgtcgctgtgctgcgggtgccgggtggtgcggccctcagtcgacagcagatagacggttacacagagtttgttaagcagtttggtgccggcgg

SEQ ID NO: 298129 - DNA, 700 bp, Unknown
  Bacterial polypeptide expressing nucleotide sequence isolated from the Sargasso Sea
cctgcagtcgccgatcctgaaattcttacccgatgcggttgtacagcaggtgatgcagcgatcaggcgcagaagacggagacctccttttcttcggtgctgaccgtgcccgcgtcgttaatgatgccctggggggtctcaggattcgactggggcatgacctgggtcttgtggccgaaggttggcagccgctttgggtggtggagtttccactgctcgaagaggactccgacgcaggtcggtgggtcgccctgcaccatccgtttaccgcgccccacccggaggatgtgccactccttgagagtgatcgtggtgcggttcggtctcgcgcatatgatcttgtgctcaacgggactgaaatcggtggcggatcgattcgtatccaccagagcgctatccagcagaaggtcttcgaggctctcggccttgatgaagcccaagccaaagcccagttcggtttcctgctggacgcgctgcgttatggcgcaccgccgcatggcggcattgcttttggcatagaccgaatcgtatcaatggccgcgggggaggattcgattcgcgatgtcatcgctttccccaagacccaaaaagcatcgtgcctgcttaccgacgcgccaggggaagtggatgcagagcagatgcgggaactcggcctgcggctttcgagcgcggcacagaccggcggcacgacagcgggttga

SEQ ID NO: 298130 - DNA, 972 bp, Unknown
  Bacterial polypeptide expressing nucleotide sequence isolated from the Sargasso Sea
taaaaataagtcttgataatgatttcgaaaggattacatatgatgattcaataagaaggtttggaaatgatagacctgatatgagatttggccttgaacttgaagatattactgatattttcaaggatactgagtttaaagtttttaaagatgtagtaaaaaataatggtgtaataaagtgcctaaaagtcaaagatgcaaatttatccagaaaagatatagacgagctaacaatttttgcacaaagcaacggagccaaaggacttgcatggattaaggtaaatggagaagaattgcaatcaccaatcattaaatttttctctgaaaatgagattacattccttaaaaaaaatcaagatttatctgatagagatatattattctttggtgcaggatcaattgacgaagtaaacaaatatatgtctgcagttaggcttaaattaggtgaggatctaaacctaatgaataaaaatgattttaaatttgtttgggtgacagattttcctctatttatcaaagatggtgctgcagtcacctctgttcaccacccttttactgagccaattgctcatgattttaatagtgacgaaatattacaagttaaatccaatgcttatgatattgttttaaatggaacagagcttgggggcggaagtataaggattcataggaaagaacttcaagaaaaaatttttggtatattaaatataagtgagaaagagtacaaaaataattttggcttccttctatcagcacttgaaagtggcacacctccgcatggaggattagcattaggtctggatagaatattaatgtttttaacaggtgctaattctattagagatataatagcttttcctaagacacaaaaagcatcatgcctactaactgaagctccctctaaagtattctcagaaaaacaacttgaagaacttggaattaatttaattattcctgatgaggaacaataga

SEQ ID NO: 298131 - DNA, 736 bp, Unknown
  Bacterial polypeptide expressing nucleotide sequence isolated from the Sargasso Sea
tatgaaaactaattttagaacagactattgtgcaactttcaatgaatctaatgagggcgaggaagtaagcataactggatggtcttctaccgtgcgagaccatggtggagtcatatttatagatgtcagagataaatctggaattatccaaatagtatcagacccagaattatttcctgaagctcataagactattgagaagattagaaatgaatttgtaataaatgttaaagggaaaattagattgcgttcagataatagtgtaaatccaaaattaccaaccggaaaaattgaaattttggcggaacatgttgagatttttaatacttgtgttcctttaccttttcaaattgaagatgaaatcgatactgatgagaatataagattgaaatatagatatctagatttaagaaggcctagtatcagtaagaactttattcttaagagtgaaactatgagggtaattagggattactttcatgagcataattttattgatattgaaacaccttatcttacgaaatcaactccagaaggtgcaagagattatttggttcccagcagagttcatcagaatcatttttttgcacttccacaatccccctcaatattaaaacaaattttgatgacatcaggttttgataggtatttccaaattgttagatgctttagagatgaggacttaagagctgaccgaacacctgaatttacaccagtagattttgaaatgtcattt

SEQ ID NO: 298132 - DNA, 913 bp, Unknown
  Bacterial polypeptide expressing nucleotide sequence isolated from the Sargasso Sea
acaccccggtttgaactcaaactggtagacctttccgatattgcttcggaatgcggacttcgagttttttctgaagttgtcaagaagggtggtttggtgaaggcaattcgtgtcccgggaggagcggacttgtcccgcaaagcattggatgatttgactgattttgcagcgatttatggcgccaaggggatggcttggataaaacgtaatgaggaaggctggcaatctccaattgcgaaatttttctctgaggagcatcaagctgctcttgaaaaacgaacttccatggaagtgggggatttagtcttattctgtgcagataagcctaggatcgttcatgacacattgggaaacctgcgtaaagaaattgcccgacagcgtggactgattccagaaaatgagttccgttttgtctgggttaccgattttccactctttgaatacagcgaggcagaaaaacgttttgtttcaagtcaccatcctttcaccatgcccaacctcgaagatcttgaagcatatggacaggatcagcctgagcgtattcgctccagggcttatgatatcaccctcaatggagtagaaatcggcggaggcagtatccgtattcatcggggggatatacaggaccaggtctttaaattgttgaagcttgaagaagatgaaattgaaagcaaattcggttttctgatgaaagctctctcctacggagcaccaccccatggcggaattgcccttggctttgaccggatcatgatgtttttactgaataccgaatcgatccgggatgtcattgcctttcccaaaacccaaagggcttcctgcctgatgaccgaggcgccttcgaatgtttccgaggatcagctcgaggaacttcggctcaggatccgtgcttctgcggtaaagcagaactgag

SEQ ID NO: 298133 - DNA, 625 bp, Unknown
  Bacterial polypeptide expressing nucleotide sequence isolated from the Sargasso Sea
ttattattaaaacttaaagaaaatgactcaatatttttcatttgtgataaattaaaagatgctcaattattttctggtaaagtaagagaaagaatttgtaatgatttaaatttacttaatgaaaattcttttgaattttgttggatagttgatttcccaatgtatgaaattgatgaaaaaactaataaaatacaatttagtcataatcctttttcaatgcctcaaggtgaaatggaagctttagaaaaaaaagatcctttagatataaaagcatatcaatatgatattgtttgcaatggtgtagagttatcttctggcgcaattagaaatcataagccagaaattatgtataaagcttttgatattgctggatattcaaaaaaagatttagaagaaaaattttcagggatgcttaatgctcttaagtttggagcacctcctcatggaggcagtgcaccaggtattgatagaattgttatgttactagctgatgaaccaaacataagagaagtaatagcatttccaatgaatcaacaagctatggatttaatgatggatgctccagcaactattaataaagaaagattagaagaattaggtattaaattaatagataaaaattaat

SEQ ID NO: 298134 - DNA, 943 bp, Unknown
  Bacterial polypeptide expressing nucleotide sequence isolated from the Sargasso Sea
ctattttgagagaattacttatcaagaatcaatgcaaagatttggaaatgatagaccagacatgaggtttgatttagagcttaaagacataactaatttctttaaagaaacagaatttaaagtttttaaacaagtaattgaggcaaatggaataataaaagctttaaaagtagaaaaatcttcattatcccgtaaagaaatagatgaactaactgtttttgctcaagaaaatggtgctaaaggtctagcatggattaaggtaaatgaagatggcttacaatcacctattataaaatttttcagtgataacgagttaaataatataaaaaaagaaatgaatcttgatataggagatattatgttttttggtgctggccctgaggaagaagtaaataagtatctctctgcagtaagactcaaactaggcaaggatttgaatttaattaaaaatggcgaatttaaatttgtttggataacagattttccgcttttcatcaaagaaggtaaacaccttaattctgtccatcatccattcactatgcccaaagatgaaataaatgatacaaatatttcaagtgttagatcatgtgcatatgatgttgtattgaacggtattgagcttggaggcggtagccttagaatacataaaagaaagctacaagaaaaaatatttaatttacttaaaatttccaaagaagaatcaaaagataattttggatttctactagatgcattagaaagtggtacccctcctcatggtggtttagctttggggcttgatagaatattaatgttcctaacaaattctgattccattagggatgttatagcatttcctaaaacacaaaaatcttcttgcttattaacaaatgcaccatcaaaagttttttctgaaaaacaacttttagaattaggaatagagcttattgaatctgaggattga

SEQ ID NO: 298135 - DNA, 598 bp, Unknown
  Bacterial polypeptide expressing nucleotide sequence isolated from the Sargasso Sea
cttaggagctggagataaacaaattgtcaatcagtcattagatagggttagacaatatatcgcaaaagaattaaatctcatagataaaagcaaatggaatttcttatgggtaactgacttccctatgtttgagagaaatgaagatgaaaatagatatgaagctttgcatcatcctttttgttctccaaaaaatataaaatctaaagattctgaaaacttgaaaaaagaaattgagagctctacagcaaatgcttatgacttagttcttaatggattggagttaggaggtggctctttacgtattcatgaggcaaacttacaaagacaggttctgaaaacggtaggacttactgataaagagattgatgaaaaatttggatttttaatagaagccttagaaatgggggctcctcctcatggtggaatagcgtttggattggatcgtattaccatgctgatcattggtgcagattcaatcagagaaaccattgcttttccaaaaaatcaacaagcaaaatgtcttctcacaaatgcaccttcaaatgtctctgaatcacaattaaaagaattagatattgaaataacaattgatgaataa

SEQ ID NO: 298136 - DNA, 1434 bp, Unknown
  Bacterial polypeptide expressing nucleotide sequence isolated from the Sargasso Sea
tctcaaattagaaatacttaataagtcagagaacccacctttcaagattaatgatccacatgttaatgaggatcagagattacagtttaggtatcttgatattaggaatgataagatgcagaataatataaggtttagatctaaactagttgcatctataagagagtatttttacactagagattttattgatgtagaaacgcctgtgctaactaaaacaacaccagaaggtgcaagagattatcttgtacccagtagaattcatgagagaaagttttttgctttacctcagtctccccaactttttaaacaaactttaatggtgggagggatcgataaatattttcagattgcaaaatgtttcagagatgaagatttacgatcagacagacaacctgagttcacacagctagatgtagaaatgtcctttgttagcgaagaagatataatattacttgtagagggtttatgtaacaaaatatttaaagatttaatgccctctcaaggaaagttagtttttgagagaatgtcatatgatcaatcacttcaaagttatggatgtgataaaccagatttacggaatccgctaaaattaattgagattaaagagatagtgaaagattcagagttcaaagtattctctgatcatgtaatggatcaagaatcaagaatagttgcattaaaggtacctaatggtatagctttatctagaaaagatattgacgaattaactaatcttgttaaaaaatttaatgcaaaaggtttggcttatttaaaatgtgaaaaaattaatgatattgataatggaatagtatcaccgataaagaaatttttggattctaatctaatcaaggatattttgaatgctgtgagcgcaaaagatggagatttagtgtttttctctgcagatcataaagatattgtaaatagttcaatgtcagttcttataaaaaagcttggcagccaattaaatttattaactaatgaatggaaatttttatggattcttgactatcctctttttgaaaaagatagtgatgataatcctacttctttacatcatcctttcactgcaccatcagatcctgctgatctaacagcagaagatatatattcgattaaatcacgagcatatgatcttgtccttaatggtaatgaaattggtggaggttcaattcgtatacattctaaagatattcaacttaaaatatttgaacttttaaatattgaaaaaaacgaaattgataaaaaatttggtttctttttaaaagcattgtcttatggatgtccgcctcatggtggaattgcttttggaattgatagacttgttatgcttcttttaaatcttgaatctattagagatactattgcttttcctaaaactcaatcatcttcatgtctgatgacagatgctccgtctgatgttgatactga

SEQ ID NO: 298137 - DNA, 1606 bp, Unknown
  Bacterial polypeptide expressing nucleotide sequence isolated from the Sargasso Sea
ttttctatagcggagggctgtagaaatgaatttgtaataagagcaaaaggtatagttcgcaaaaggcctgaagggacagtcaataagggtcttccaacaggcatggttgaactgaatagttctgtactagagatacttaatccatcaaaaccattacctttttctttagatgaacacacttcagtcggagaagaaactcggctgaaatatcgcttcttagatttgagaagagaagaaatgcaaagaaatcttagattgagatctaaggtttctcaagaaattaggaaattccttgagaaaaatgagtttctggagatagaaactccaatattgacgaaagctactcctgagggagctagagactatatagttccaagtagaacttatccaggatcgttttttgcgctacctcaatcacctcaactcttcaaacaaacattaatggcttctggttttgaaaaatattaccaatttgctaaatgctttagagatgaagacctaagggcagatagacaacctgaattcactcaactagaccttgaatgttcttttgttgcctcacaagacattatggatttaattactgaaatgattagaaaagtatttaaaaaggcaattgatgtagatcttggagattttcctgtcttaacttataaagaagcgatcaaaaaatatggatcggataaacctgacttgagaaacccacttcaatttgttgaggttaaagagttatttacagattcagatttcaaggtttttagtgatcctgctaattctgtagattctagaattgcagcattaagagtacctaatggagaaaaactaacaaggaagcaaattgatgattacacaaattttgtaggtcaatttggtgcaaaaggattggcttatataagggtaatagatttatcgtctagcaaagaaggtcttcagtctccaatacttaaatttatagatgaaaaaataatagaagaacttttaacaaaacttgaatgccaaaatggagacataatcttttttggtgcaggaaagacaaatgtagttaatgaatcattatcttctttgagagatcttgttgcctctgacttggacctcttaaataaagattgggcaccttgttggatagtagattttcctatgtttgaatacaacaaatctggagaattaactcctttgcatcatcctttcacttcaccaacttcacttgatgatattgagaaagatcctactagaactttatctgatgcttatgatgttgttctaaacggcacagaacttggaggtggttctgtgagaattcatgaaagtgaaattttgtacaaagttttgtctttattaggaattgaacaaaaagaagcacaagagaaatttggttttcttctttctgccttagaacatggttgtccccctcatgctggacttgctatagggtttgatcgaatgattatgcttatgactaattcagattctattcgtgactcaatagcttttccaaaaactcagagtgcttcatgtttgttaactgaagctccaggctcagcttccatcgaacaactcgatgaattaaacatctcaatcgatatagatacagaagaggagatgtaat

SEQ ID NO: 298138 - DNA, 1341 bp, Unknown
  Bacterial polypeptide expressing nucleotide sequence isolated from the Sargasso Sea
tttcttacataagaaatgaaatgataaaattaggctttttagaatttcaaactccaattttgacctcttctagccctgaaggagcaagagattttcttgtaccaagtcgtttaaatccaggaaaattttatgctttgccacaagctcctcaacaatttaagcaattaataatggtttcaggtttcgataaatattttcaaatagctccttgctttagagatgaggatgctagagctgacagaagtcctggtgaattttatcaactagacttagaaatgtcttttgtcgaacaagaagatgtatttaatattgtagaaaaactaatggttaatacttttaaaaatttttctgataaaaaactaatgtatgatacttttcccaaaataccctactctgaagcaatgcttaagtatggaagtgacaagcctgatttaagaaaccctcttattataaatgatattacagaaatatttagtagagaggatgtttcttttgatatttttaaaaaattagtaaaatctggatctaaagttagatctattactactaaaaatacaaaagataaacctagaagtttttttgataatattgataaatgggccaaagaccaaggtgcgtccggactagcatactttacctttgaaaaagataataaaatttcagctaaaggacctgtgggaaaatttttttctgaggatgcactcttagaaataatgaaaatcactaaatctgagttaggggatagtatttttttagcatgtggaaagcaaaatgaattagaaaaaataacagccctagctagagataaaattgctaaagatttagatctaattgatgatgatacttttgctttctgctggatagttgactatcctatgtttgaaaaagatgaattaacaaataagattaaatttagtcataacccattttcaatgccacagggtgaattaaaagataaagattttgaaaatcctctagatattcttgcttaccaatatgatatagtttgtaatggaatagagttatcttctggtgcaataagaaatcataaacctgatcttatgtataaactcttttcaattgcaggttacaataaagcagaagtagatgaaaaatttagcgggatgattaacgcgttaagttatggtgcaccaccacatggtggaattgcacctggaatagatagaattgtcatgcttttagcaaatgaaaaaaatataagagaagttactatgtttccaatgaaccaaaacgctcaagatttaatgatgaacgcaccatcagagattaatcaagaccaattgaaagaattaaatctttcaataaaaactaagaattaaa

SEQ ID NO: 298139 - DNA, 2092 bp, Unknown
  Bacterial polypeptide expressing nucleotide sequence isolated from the Sargasso Sea
attgctcgcagacgctcacatgccgctgggcaacctgcgccttctcgatgcccctgcgcaacggcagatgctcgctctgagccactcagccgcagcgccccaggccaacgaacgcgtgcatcagcgtatcgcagcccaggccgaggcgacgccagacgccctggctgtacaggccggtgacgccagcttgagctacgcccagttgaaccatcgcgccaaccgcctggcccatcgcctgttggcgcttggcgtcggccccggccaacgggtgggcctggcttcgcggcgtggcccgcagttgatcgtcagcctgctggcagtgctcaaaagcggggcggcctacgtaccgttggaccctgaatacccggcggaacgtttggcctacatgctcgccgacagccgcctggacgtgctgctcagcgaaaccggcttgctcgccgacttgcctttgccccgcggcctgacccgcatggatttcagcgccagtggcgacgaactgaccggctacccgaccaccaatccgcctaatcacgcggcggcggctgacctggcctatgtgatctacacctctggctccaccggccagcccaaaggcgtggccatcgaccatgccgcccttggccagttctgtgacagcgccacgctgtacagccgactgagcgccgaggaccgcgtgttgcagtttgcgaccttcagtttcgatggttttgtcgaacagtgcttcccgcccctgtgtgcgggcgcggcgttgatcatgcgtggcgatgaactctgggatgccgggcaactggcgcaagagattgtcgagcagggcgtgaccctggccgatctgcccgccgcctactggtacctgttggcgcaagagtgcgccgagcaccgtcgctccctgggcaagctgcgccaggtacatgtggggggtgaagccatgtcagtggagggcgtgcgtgcgtggtacgccgcgggcttgggcaatgtgcgcctggtcaacacctacgggccgaccgaagccacggtggtctctagcgtgcatgagtgccaattggccgatgccaacgacgcctacggcgtgccaatcgggcaggcgattgccgggcgcggcctgtatgtactcgacagcggtttcgaactgttggccaccgatggcgtgggcgagctgtgcattggtgccgaggttggcttggcgcaacgctatttcgaccgcccggcgctgaccgccgagcgcttcttgccggacccgttttccgccatgcccggtgcgcggctttatcgcagtggcgacctggcccggtacaacccggcgggtgcgctggagtacgtcgggcgtatcgaccatcaagtgaagattcgtggcctgcgtatcgaaatgggcgaaatcgaagccagcctgcaagccttgccaaatgtgcgagaagccgccgtgcttgcgcagccgagcgcgaccggcgtgcagttggtggcgtacgtggtgcccgccgaaggccaagcgctggaggcacaggcactggcggcgcgcttgcgccagacgttgccggactacatggtgccgggccattgggtggtcctcgatgccttgccgttgaaccacaacggcaagctcgaccgccgtgcgctgcccacacccgacctgaaccaggccagcgccgcctacgtggcgccgcaaagtccattgcaaatccagttggcggcgatctggcaagcagtgttgcaggtcgagcaggttggcctggaagatcacttcttcgaacgcggcggccactccttgctggccacccaagtgatctcccgggtgcgccacgatctcaagctggaagtgccgttgcgggccctgttcgaacagccgacgctggccgctttcgcagcggcgtgcgcaggcgtgcaggccgataccgcgcctgtgatgcaggcggctggccgtgagcagccgctggcgttgtcctttgcccaggagcggcagtggtttctctggcaattggatcccaccagcgcggcctatcatgtgcccagcgccttgcacctgcgcggtgaactccacagcgcggcgctggagcgcgccgtcgaggccctggtgcagcgccatgaaccactgcgcacc

SEQ ID NO: 298140 - DNA, 998 bp, Unknown
  Bacterial polypeptide expressing nucleotide sequence isolated from the Sargasso Sea
aactcaaagactaagaaaaatggcttattttatttcagaccaattaaatataaataaagaaaaattagaaatagcttcttcagtatcaaaatctgacttagcatcagatttagtctcagagtttcctgaacttcagggagaaatgggaaaatattttgctcttaatcaaggttttgaacaagatgtttcgaatgccataagtgagcattacctgccaattggaaattcatcttttattccaaaaaagccaatcagttattctctatcaattttagacaaattagataatttagttggtttttatttgatcaatgaaaaacctacaagttcaaaagatccatttgcacttagacggtctgctattggattgttaagaacaattattgaaaataatttagttataaatatatctgatttaattgactattttattagaatttatctggaacaaggagttaaagaaaaaaacacgcagtcaaaaaaagaattaattaattttttaagagaaagaatgaaaaatattttaaaagaaaaaagaataagagcagatataattgaagcttcgattagttcacataacaacgataattttttagagctttacaaaaagactttaataatgaataaatttatttctaaagagctaggcaaaaatgcagtatcaacttacaaaagagcatacaatatattagaacaagaaagattaatatcgaaagatggtccagacgcagttcttttcaaagaagaagaagaaaaagaactttttgagagaataaatataattcgcaaagcttttaccgttaaagaggaaagaaaaaattacgaagaacatttaaagcttttgtcagatacaaaattatcaacagataaattttttgaaaaagtaaaggttaatgatgataataacgatattaaaaacaaccgtttagaactattgcaaatactatgctcaacgtttaatacttttgtagatttctctaaattagaaggatcttgat

SEQ ID NO: 298141 - DNA, 167 bp, Unknown
  Bacterial polypeptide expressing nucleotide sequence isolated from the Sargasso Sea
tatggattctaaaaaaaataattccaaaaaaaaatctcaaacatttcaagaaacaattttaaatcttcaaaaattttggagtaaaaaagggtgtgttattcttcaaccatatgatatggaagttggagctggcacttttcatcctgccactacactcaagtctcttg

SEQ ID NO: 298142 - DNA, 208 bp, Unknown
  Bacterial polypeptide expressing nucleotide sequence isolated from the Sargasso Sea
attgggcttagggagagtagtgcttgataatgcaggcaatattggtaaaagctatagaagacatgatgaagttgggacaccaatgtgcataacaattgactttgaaacattagatgataattctgttacagtaagagatagagatactatggagcaaaaaagaattaaattagatgaaatttctgatttttttgtcaaaaatctctaa

SEQ ID NO: 298143 - DNA, 931 bp, Unknown
  Bacterial polypeptide expressing nucleotide sequence isolated from the Sargasso Sea
aacttgaataaagaaaaaattgaaattgccgcttcaatctccaaatctgatttagtttctggtctcgttggtgaattccctgagcttcagggggtaatgggaaaatactttgctttcagccaaggttttgaagaagatgtttgtcgggcaataagcgagcactacttgccaataagtatttcttcatctgttccaaaaaaaccaattagctctgctctttctattatagacaaattggatactctagttggattttatttaattaatgaaaagcccaccagttccaaagatccttttgcgttgagaagagctgctattggtttattaagaacaataattgaaaacaatcttacaataaaattgagggatctgatcgataaatctataaaaatttacttagatcaaggcgtaaaacagataaataacaacgtgagtaaagagttaatagtattttttagggaaagaatgaaaaatatttttaaagaaaaaaatataagaaatgatattattgaagcctcaattagttcacatttaagtgataattttttggaattgtataaaaagactttaattatgaaaaaattcatttctagagatttaggtaaaaatgcggtttctacttataaaagagcatcaaatattttagatcaagaaaaaatagaattaaagaacggacctgatgcagttctttttcaatacgacgaagaaaaagagctttttcaaagaatcaatgaaattagaaaagcttttactttaaaagaagataagaaaaattatgaggaacatctaaaacttttatctgaaaccaaactatcaacagataagttttttaataatgtaaaggttaacgatgaaaataaagacctaaagaataatcgtctagaacttttgcaaattttgtgctctacttttaatagttttgtagatttct

SEQ ID NO: 298144 - DNA, 950 bp, Unknown
  Bacterial polypeptide expressing nucleotide sequence isolated from the Sargasso Sea
tttttcttgggataaaaataaatcaaaaaatttagttaaaggaatatcagatctaaaaaaaataaattattttgaaggattaggaacttactttgataaaacccaaagattaagaaagctcgggtcgcttatatctgatgaacttttaattagtaaagaaaaagttgaagtggcatcatccatttgcaaagtagacttagtgtctgatttagttggagaattcccagaacttcaaggtgtaatgggtggccactttgctaaagctcaaggtttcgataatgaaatctgtttggccattagtgaacattacttaccaataggcccggagacaaagacaccaaaaaaaccttactcagtcactttagctttaagtgataaaatagataccttagttggtttttttacaataaatttaaaaccatctagttcaaaggatccgttcgcattaagaaggtcagcaattggtcttataagattaataatagaaaataaattagagattaaattaaaagatttaataaattattcttgtgttttgtttgctgaacaagatttagattttgatattaagactgtccaacaagatctgtttaattttttttctgaaaggcttaaattctatatgaaagaaaaaaaagttagatcggatattgtagaatgctcaataaatagttatagtgcagatcaaatttataaaatttataacaaggcatttattttaaataaattaatcgataaaaatattggtcaagatgtaattttttcttacaaaagagcatccaatatcctttcaaacgaaatatcaaaaaataagattgaattagaaaattcgaccgatccaggattattcaaaaatgattttgagaagaaattatacaaaaagatacaagaaataagaaaatattttacaagcctaggtagtcgtgaagactgtaaaaaaactttagaga

SEQ ID NO: 298145 - DNA, 576 bp, Unknown
  Bacterial polypeptide expressing nucleotide sequence isolated from the Sargasso Sea
gatgtttctttttaaaggcttatattttcacaaaaaagaaagatataattttttcataacatttcgaggtgcattcttggctgcaaaaaacatggatgagttggtttctctctgtaaaaggagggggtttgtatttcaatctggagaggtctacggagggctccagggtgtttatgattatggtcctcttggggtagagcttaaaaataatctgaaaagctcttggtggagtgcaatggtttttgaaagagacgacattgagggtcttgatgcatccatattgtcgaaaaaggagttattcaaatactctggccacgaagatacattttcggaccctttggtagattgtaaatcctgtaagtcaaggtggagagaggatctgattgaagacggaaaatgcccaggctgcggttcatctgaactaacagaggcaagaccatttaacttaatgtttaaaacaccagttggcccggtacaaaacgaagaaagttttgcgtacctgaggcctgaaaccgcacaacatatttttgcaagttttaaaaacgttaaagactcgacatcgagacaagtaccttt

SEQ ID NO: 298146 - DNA, 365 bp, Unknown
  Bacterial polypeptide expressing nucleotide sequence isolated from the Sargasso Sea
gctgaccttctgggcagaatcaacccccaggcacctccggttcgcagtgcattttcaggacatcatcagcaccctcaaccgcttctgggcggatcagggatgcctgctgctgcagccctacgacaccgagaaaggggccggcaccatgagtccccatacggtgctgcgggcgatcggtcccgagccctgggctgtggcataccccgagccctgtcgccgcccgaccgatggccgctacggcgacaaccccaaccgggcccagcactacttccagttccaggtactgatcaagccctccccagacggtatccaggagacctatctcgcgtcgctggaagccctgggcatcaaggcggcggaccatg

SEQ ID NO: 298147 - DNA, 128 bp, Unknown
  Bacterial polypeptide expressing nucleotide sequence isolated from the Sargasso Sea
cgataaaggtgcctggctattataccggcaacagcaacaagggcaggcgacggtcagcttgctgccagagatggtcagcacatccttagccaaactacctattgccaagccgatgcgctggggtagct

SEQ ID NO: 298148 - DNA, 839 bp, Unknown
  Bacterial polypeptide expressing nucleotide sequence isolated from the Sargasso Sea
gatattattttaaaaaaaagaaatataaatattgatatcaatctcaagcttcttcaggaagtagtcgatttaactgaccaaccaaacgtaattgtttgtgaatttgataaaaaatttttaaatatacctaaagagatcttaatactaaccatgcagcaccaccaaaagtattttcctacttttgacaaaaaaggaaatattacaaatcaatttttggtagtagcaaacaataaagataaaaaaggattaattaaattaggaaatgaaagagtagttgaagcaagattaagtgatgcagaatttttctggcaaaaagataaagctcaaaacatggtcaaaaaaatttctgatttaaaattaatgaattatttcaaaggtcttggaaattattttgataaagctcaaagaatgagaaagcttggtgctattatttctgatgagttattaattagcaaagaaaaagtagaattaacagcatcgataagcaaagtagacttgttatctgaaatggttagtgaatttccagaacttcagggaattatgggaggttattttgcaaatgctcaaggttttgaaaaagaaatatcacttgctgttagtgagcaatatttacccgttggatctggaacaaaaattccaaaaaaaccttatagcattgctttatccttagctgacaagattgatactttagttggattttttggtgtaaaccaaaaaccaacaagttccaaggatccttttgccttaagaagattagcattagggattattagaattatcattgaaaataaaaaagattttaaaattatagatttaataaattattcttcaagtttgta

SEQ ID NO: 298149 - DNA, 226 bp, Unknown
  Bacterial polypeptide expressing nucleotide sequence isolated from the Sargasso Sea
aatgttttttcaggacataattcaaaaattaaataatttttggtctgaagaaggatgcctgatattgcaaccatatgatactgaaaaaggtgctgggactatgaatccacatacttttttaagggctattggcccagagccatggagtgttgcatacgcagagccatgtagaaaggctacagatggaaggtttggtgaaaatccaatagagctcaacattactttt

SEQ ID NO: 298150 - DNA, 819 bp, Unknown
  Bacterial polypeptide expressing nucleotide sequence isolated from the Sargasso Sea
agaacaactagccgactcaaaacagctttgcagcccaaataacccaagtctattagaggaagtaaacaacttagtagaatggcccaatggtttgttatgccaatttgaccaagcctttttaaaagtaccgcaagaagcgctgtttgcatccattacccagcatcaaaaagcttttcctctaacggataaagacggcgtatgtcaggcctactttgtgacgtttagcaacttaaatgtaaaagatacctcgcacattatcaagggcaatgaaaaagtaatgcgcgcccgcttagcagatgcagcattcttttttgaagtagatcaaaaacagcccttagaacattttaatgaagccttaaaaaccatacaatttcaaaagtccttaggtagcatgtatcaacgtgcacagcgtattgcacatggtgcagcgtttctagcaccgatgttgggatgcgataaaaagcgcgcccttcgcgctggcttgttatctaaagcagatttagccagtgatatggtaggggaattcccagaatgccaaggtattatggggcgctattatgcgcttttaagtggtgaagataaagccgtagcagaggccatacaggagcaatatctgcctcgtttcaaagaagatgacaccgcgcaatcggcgctgggtcagtgtgttgcgcttgcagaaaagctcgacaccttaaccgctatgtttggaattggcgccaagccttctggctctaaagatccatttgcactgcgtcgtggtgcgctgggtattattcgcaccatcatccaaagccagcagcatctatctttaagacagat

SEQ ID NO: 298151 - DNA, 388 bp, Unknown
  Bacterial polypeptide expressing nucleotide sequence isolated from the Sargasso Sea
atggaagacttagtatctctgtgtaagagaagagggtttatttttccatcaaatgacatctacggtggcatgaaaggtctctatgattttggacctatgggtgtagagctaaaattaaatttaaaatcagcctggtggaaatcaatagtctatgaaagagatgatgttgagggattggactcaactattttaacctcacctactgttttaaaatattcaggccacgaagatacattttctgatcctttagttgattgcaagaaatgtaaatcaagatggagagcagatcaacttgaagacggaaaatgtccaaattgcaaatcaactgatttaactgatcctagaccatttaatttaatgtttaaaacagctattggtcctgtggatg

SEQ ID NO: 298152 - DNA, 835 bp, Unknown
  Bacterial polypeptide expressing nucleotide sequence isolated from the Sargasso Sea
ttaataaaaactggaaatgaaaatgtagtcgaggcccgtttaaatgatgcgaaatttttttggaataaaaataaaactcaaaatttggttaagggcatatcaaatttaaaaaaactaagttattttgagggattaggatcttactttgaaaaaattcaaagacttagaaaattaggtgccttaatttctgacgaattattaataagcaaagaaaaagttgagatagccagttcaatttgtaaagtagatttgacatcagatttagtaaatgagttcccggaactccaaggcgttatgggaggtcattttgcaaaatcacaaggttttgacaacgatatatgcttagctataagagaacattacctacccacaggtccagaaactaaaactccaaaaaaactttactccgttacattagctattagcgataagttagatactctttcaggtttctttgcaattaatttaaaaccctctagttcaaaagacccatttgcattgagaagatctaccattggtcttattaggctaatagtagaaaataaattagaaattaaattaaaagatataataaattattcatttttactttttagtgaacaagatgtgaattttgatattaaattagcccaacaagatttgtatagatttatatcagatagactaagattttatatgaaagaaaaaaatattagaccagatattattgaatgctctatgagtagttacaatatagatcaaatttacaaaatatataataaagcatttattttaaacaaactaatagataaaaatataggtcaagacattattttctcatataaaagagcttcaa

SEQ ID NO: 298153 - DNA, 266 bp, Unknown
  Bacterial polypeptide expressing nucleotide sequence isolated from the Sargasso Sea
tatttataattttgaaaagtcaaattcttccatgttattgcaacattttaacgacgctgaaaaagaatgtgaactattgttaaaagataaaattaatcctttatcattaccagcttatcatctgtgtataagagccagtcatatttttaatcttttggacgctaggggagttatttctgtttcagaaaggcaagcatatatattaagggtaagaaatatgtcaagatcttgttgtttagcttacatgggtaaattacatgagtgac

SEQ ID NO: 298154 - DNA, 625 bp, Unknown
  Bacterial polypeptide expressing nucleotide sequence isolated from the Sargasso Sea
atgaacgcggatgaaaacaaaagtaagagattagtctctctgatgaaaaaaagaggctttattcaacctgcttttgaattgtatggaggggtcgcaggattatacgattatggccccttaggtggaaggctaaggaggaatgtaattagcaaatggattaaccattggatttcattaggaaatatagttgaaattgattcacctacaattactcctgaacctgtactaaaagctagtggacatattggagcgttcaatgattatgcttctgaatgtaaattctgtagctctatttatagatctgatcatttattagaagaagtgcataataatcctgattcactagataattcatcgctagatgaagaattatcaaaacacaaaatcccctgcccttcttgtaaaaaatcgggttggttaccttctgaacctttaaatttgatgttttctactacaataggagcgagtaaaggcggtagaagagcgtacatgagacctgaaacggcccaaggaatgtttcttcaatacccttcaatatacaggcattttagagggaaattaccatttggtgctgtacaagtaggtaaaggatacagaaacgaaataagtccaagacaagggatga

SEQ ID NO: 298155 - DNA, 229 bp, Unknown
  Bacterial polypeptide expressing nucleotide sequence isolated from the Sargasso Sea
aatgcctgctaaaaaaaaagtcaaaaaaaaaactaatattctttcatttcaagacatcattatgagtcttcaaaagttttggggaaaaaatggatgtataattttacaaccttatgatttagaggttggtgccggaacttttcaccctgccactacattaagatctctaggtcctcaaccatggaaagccgcttatgtacaaccatcaagaaggccaacagacggaagg

SEQ ID NO: 298156 - DNA, 751 bp, Unknown
  Bacterial polypeptide expressing nucleotide sequence isolated from the Sargasso Sea
tttgcgtttattaaatagtgtaacttatcatcagaaattgggaagcttgggttcaaaagttgagaggattgagcttattgcgctagagcttgatcaaactcttggcttaaatctagaaaatattccaatagctgcaaaattaatcaaaaatgatcttttatctgaaatggttggtgaatttccagatttacagggtattatgggaagttattatgccgaacatcaaggctatgatgaagacgtatgtgatgctgttaaaaatcactatatgccagtaacagcacgagacgaaactcctaagaaagccctctctttttgcctctcagttgccgataaaattgatactttagttggtttttggtcgattggcgagacgccgacaggttcaaaagatccatatgctctcagaagagcaggtaatggcctaattcggaatattattgaaaataagcttgattttgattttgcacacttcattgaaaaaatactacaaaaatcagacttgttaaaaaaacaacaacatagctcagttagggaagggcttgttaattttatgaacgaaagattccgaagttatattcttgataataaatatgatgttagaatttgcgacgctatttctcgtgatgatgattttgtaaattattatatgactctatcacgcatacaattattaagtcagtttatcaaaacagacaatggcttatctttgcttaaagcactgaaacgaatcaataacattctagatcca

SEQ ID NO: 298157 - DNA, 184 bp, Unknown
  Bacterial polypeptide expressing nucleotide sequence isolated from the Sargasso Sea
aatggttgatgcctcacatacattcaacctacttgattcgagaaaagcaatatcggttacagaaagacaacagtatattttacgagtaagaagcatggctcaaaaagtggccagagcttatctagaggttagagaggaattaggtttccctctactgtcaaagacagaaagtgctagcacatga

SEQ ID NO: 298158 - DNA, 322 bp, Unknown
  Bacterial polypeptide expressing nucleotide sequence isolated from the Sargasso Sea
ctgactccctgggcagaatcaacccccaggcaccttcggttcgcagtgtatttacaggacatcatctcgaccttgcagcgcttctgggcggatcaggaatgcctgctgctgcagccctacgacaccgagaaaggggccggcaccatgagcccccatacggtgctgcgggcgatcggtccggaaccctgggccgtggcctatcccgagccctgccgccggcccaccgatggtcgctacggcgataaccccaaccgggctcagcactactttcagttccaggtgctgatcaaaccctcccctgacggcatccaggagacctacc

SEQ ID NO: 298159 - DNA, 827 bp, Unknown
  Bacterial polypeptide expressing nucleotide sequence isolated from the Sargasso Sea
aatgatttctgatgaattattaattagcaaagataaagtggaaatatctgcctcggtttgtaaagtcgacttgttgtcagatattgtaggtgagtttcctgaactacaagggattatgggaggatattttgctgagtttcagggctttgacaaagatgtatctctagctattagtgaacattatttaccaattggtaataatagcaaaattccaagaaaaccttttagtatagctttgtctttaactgataagttagatactttaatcggtttttttggtatcgatcaaaaacctacaagctcaaaagatccttttgcactgagacgtaacgctttgagcattataaggcttttattggaaaataaaaaagattttaaactaaaagatttaattaactattcttctaaattatatcaggagcaaggttttgatttgaccaatcgatcacatcataaagatttaaataatttttttatagaaagattaaaaaattatatgaaagaaaaagatattaggccagatataatagaagcctcactaagctcttatggcataaataatataattaaactttataataaggcttcaacttttaataaaatgataaataaagaaacgggtaaaatagtaattttatgttataaaagagcttcaaatattttagagcacgaaactaataaccaaaaattaatattgtcaaataatatagatcctggcctttttaaaaacgattatgaaaaaaatttatataaaaaaatacatgaattaagaaaatattttactagctttggtgaagatgaaaattatgaattatctttaaaaaatt

SEQ ID NO: 298160 - DNA, 433 bp, Unknown
  Bacterial polypeptide expressing nucleotide sequence isolated from the Sargasso Sea
atggaagaattagtctccttatgtaaaagaagaggttttatttttcaatctagtgatatttatggcggggtaaaaggattgtatgattttggcccaatgggtgtagaattaaaaaataaccttaaacaatcctggtggaaatctatggtttatgagagagatgatattgaaggaattgatgcatcaattcttagctctcctcaaatttttaagcaatcaggacatgaagaaacatttactgatcctttggtagattgtcgttcatgtaaatcaagatggagatctgatcaacttatcaattatacatgtccgaattgtaaatcaaaagatttaacagaacccagaccttttaatttaatgtttaaaactgctataggtccagttgatgatggaagttcttttgcatatttaagacctgaaacatgccagcaaa

SEQ ID NO: 298161 - DNA, 214 bp, Unknown
  Bacterial polypeptide expressing nucleotide sequence isolated from the Sargasso Sea
atgccaaaaaaaactaaaaagaaaaataaagtcttatcatttcaaaatttaatttttaatttacaaaaattttgggataaacaagggtgcattattttacaaccttacgacttagaagttggtgcaggtacttttcatccagcaactactttgagatccctaggaccaaaaccttggaaagcagcttacgttcaaccatcaagaagaccaacag

SEQ ID NO: 298162 - DNA, 241 bp, Unknown
  Bacterial polypeptide expressing nucleotide sequence isolated from the Sargasso Sea
aatttaaaggccaatcttcagaaactagggcttggaaaaatcacttacgaagatactggaaacatcggaaaagggtatagacgccacgacgagattggcacacccttttgctttacggtcgactttcaaacgatcgaggaagattcttcggttacagcacgcaacagagataccatggagcaagagcgagttaatattgaaaatctgcctaacttcttagcttctcagttgaaaccttaag

SEQ ID NO: 298163 - DNA, 968 bp, Unknown
  Bacterial polypeptide expressing nucleotide sequence isolated from the Sargasso Sea
tttttgggaaaagataagtcgaaaaatcttattaaacagattgggaaaattaaaatctattactttttatgataaaataggaacgatctacgacaaaacacaaagattgagaaggttagcatcttttatttccgatgaatttaatatcaataaagaaaaagttgaaatagctgcatctatatcaaaatctgatttatgttcagatcttgtatcagagtttcccgagcttcaaggagttatgggaaaatattttgctctcacgcaaggtttcgatgtcgatatatccaatgctataagcgaacattaccttccacttggtttaaattctgatgttccaaaaaaacctattagttatacaatatctttagcggataaattagacagtttagtgagtttcttttttattaatgaaaaacccacaagctccaaagatccttttgctcttagaaggtcagcaataggtttattgagaataattattgaaaataaattaaatattaaactaagagatttgattgatcaaaacataagaattttagaagagcaaaatgtgaaaagattaaaccagaaagcggaaaaagaagtttttgacttttttaaagaaagaatgagaaatattttaaaagaaaaaagcatcaaaccagatattattgaagcctcaataagctcacatcatggagacaacttcttagatttatataaaaaaaacttttttatgaataagtatattaataaagaagttggacaaaatacgataaattcttataaaagagcatttaatataattgagaaagaaggtttaaaaatcgaaggaagaccagacgcagtcctatttagaaaggaagaagaaaagggtctttttgataaaataaatgagattagaaaagcctttacagtaaaagaagacaataaaaactatgaaaatttactatttcatttatctgagataaaaccattcacagataatt

SEQ ID NO: 298164 - DNA, 454 bp, Unknown
  Bacterial polypeptide expressing nucleotide sequence isolated from the Sargasso Sea
ggcgtcgaagtggccgtgtatcaggccgtgcgtgcggtgaacccgacctcgccgctggacttcgaccagcgcgtgcaggccgtgcaggccttccgcaagctgccgcaggccgctgccctggccgccgccaacaagcgtgtgtcgaacctgctgagcaaggccgaaggtggcgttgccgcccaggtcgaagcgcactacttcgacaaccccagcgagttcgccctgcacgccgccatccagcaggccgaccaggccgtacagcccctggccgccgcccgccagtacaacgaggccctggccaaactggctggtctgcgcgagccggtggacgccttcttcgaggcggtgctggtcaacgccgaagacgcgcgcgtgcgcgccaaccgttacgccctgctggcccgcctgcgcgggctgttcctcggcgtggcggacatctcggtactgggctgac

SEQ ID NO: 298165 - DNA, 415 bp, Unknown
  Bacterial polypeptide expressing nucleotide sequence isolated from the Sargasso Sea
aatgcctgaagaaatatttgataaggtagttaaaattgctcaatcaagaggttttgtctttaatgcctcatctatatatggaggattaagaagttcgtatgattatgggccacttggagtacttttaaaaaataatattgcaaggttgtggtggagtagcattaatgatcttgatgttcaaatttatccagtagataccgcaattatccaatcaagtgaagtttggaaggcttcaggccatttagctgaatttacagatccaatggttgaccataaaccaacaggtgaaaggttcagagcagatcaggtgcctgaagatattaaaaaagaagatctgacagaaccacgtcaatttaaccttatgtttgaaaccaacatggcccagtcaagaatgaaaattctgctgtttattaag

SEQ ID NO: 298166 - DNA, 223 bp, Unknown
  Bacterial polypeptide expressing nucleotide sequence isolated from the Sargasso Sea
atggtctctaaaaaaaaaaatataaaaaaaacaccattaacatttcaagaaacaatatttgctcttcaaaagtattggtcaaaacaaggatgtgttataattcaaccttacgatttagaagtaggagcaggaacatttcatccagcaacaactcttagatctctaggagaaaaaccatggaagacagcttatgttcaaccatctagaagaccaaccgatggaa

SEQ ID NO: 298167 - DNA, 918 bp, Unknown
  Bacterial polypeptide expressing nucleotide sequence isolated from the Sargasso Sea
ggggagaccacttaagtctataatggcattatatggtggtaaaactttaagtttttgttttcatcatttaaaaagttcaaataaaacatttatcgaaaaagacttggagaataaatcgaaaatttttaaagattttatctcctataagaaattttttagcaaacaaaaaataattatagataataacgagagaaaaaaatatattgaagataccctcataaaattatcaaaattaaaaaattttaaaatacatataaaagatcaacttattgaggaagtaacaaatatcttggaaagccctaaaattttattatgttcatttgacaatcgatttcttgatttgccaaaggagttaataatttccacaattgaatatcatcaaaagttctttttgcttcatgatcaaaaatctaaattaacaaataagttttttgcagttgctaatcgtcaagataatgatgacataattaaaagcggttatgaaaatgtggttgatgcgagattatcagatgcagaatatttttggaaaataaacaaatctagaaatatgataaagcaggtatcaaagctacaagatattaattatttcaaagatttgggaagttacttagataaagtacaaagattaaaaaaactgagtgggctcatatctgatgaattgttaataagcaaagaaaaaattgaacttgcatcaactatatcaaaagttgatttgttaagtgaattagttaacgagtttccagagttacaaggaattttaggtggatattatgctgagttccaaggatttgataaagatgtaagtcaatcaattaaagaacaatatttgccttctggcgcggataccagagttccaaaaaataattacagtataacattatcaataagtgatagaatagattctttagtaggtttttt

SEQ ID NO: 298168 - DNA, 331 bp, Unknown
  Bacterial polypeptide expressing nucleotide sequence isolated from the Sargasso Sea
gagaacattgttaaaactcaaacctcatttatcgccaattaaagctgcagtcattcctcttaagagaaataattctgacttggtcaatacagcaaataatgtcaaatcagagttacaatcacttggtttaggaagagttatggttgaaaatacaggaaatattggaaaaaattatcgtagacatgatgagattgggacacctttgtgtgttactattgattttgaaactttagaaaatcaaacagttacggtgcgagatagagataccatgaagcaagaaaaagtatcactctctgaaatagcaaattattactctcaatattttaagtaa

SEQ ID NO: 298169 - DNA, 402 bp, Unknown
  Bacterial polypeptide expressing nucleotide sequence isolated from the Sargasso Sea
tagcaatactaaacgaagcttatcatcttgaaaaaatagaagataaagaaagagttgttttaaaattaaaaccgcatctttcccctataaaagcagctattattccattgaaaaaaaatgacaaaaaaatagttgtaaaagccaaagaaataaagaataaattacagtcgctaggcatgggaagagttctgtttgaaaacagtggcaatattggaaaaaattatcgaagacatgatgagataggaacaccaatatgtataaccatagactttgaaactttggaagaagagactgttacagttagggacagagacaccatgtctcagaaaagagtttcaattagtgatttagagaaagtgtttaaagatttatttttaaacatcaacattttcggctcttaag

SEQ ID NO: 298170 - DNA, 967 bp, Unknown
  Bacterial polypeptide expressing nucleotide sequence isolated from the Sargasso Sea
aattagcaaagataaagttgagttatcagcatcaatttgtaaaactgatttaacatctgatctagttagagaatttcctgaacttcaaggtattatgggtggatatttttctaattatcaaggttttgataaggatgtttcgttagcaatagctgagcaatatttaccgatagggctaaactctaaaataaccaaaaaaccttttagtgtagcgctgtcactcacagataaaattgatacgctagtaggtttttttggtattgatgagaaacctacaagttcaaaagatccgtttgcacttagaagaacagctcttggtattattagaacaattgtggaaaataaaaaagattttaaagttaatgatttacttaataattcatcaatactatatcaagatcaagaacacatatttattaataaagatttacaaaaagaattgtataatttcttaaaggatagatttaaatattatttaaaagaaaaacagattcgttttgacataatagacgcagtaatttcatcatttaagttaaacaagatatactcatcatttgaaaaggcaaatagtttaaataaaattatcgatagtcaaattggtcttgatattacttcaagttataaaagagcatcaaatatacttgatagtgaaatgaaaaataatgaggtagaaataacaaatacaactgatccaggtatttttaaaaatgacttcgagaagaatttatttaaaaaaattaatgaaattaaaaaatactattcggttattgataacgatgaaaattatgagcaaacactatcaattttagcgggagctaagaaagaagtttttgagttttttgataatgttaaggttaatgaagaaaatgaaaatttaagaaaaaacagattggaacttattaatatgttatgtaaaacatttcaaaattttataaattttcaattacttaaaacaaataatgaatag

SEQ ID NO: 298171 - DNA, 460 bp, Unknown
  Bacterial polypeptide expressing nucleotide sequence isolated from the Sargasso Sea
aatgcaggcgcaggattttctcgttgaactgggcaccgaagagctgccacccaaggctctgaagaaactggctgaggcctttctggccggggttgagagcggcctgaaagacgctggcctgggctacgccaaggcccgttactacgccgcgccgcgccgcttggccgtgctggtcgaggcgctggcaacccagcagcctgaccgcaccacccagcttgatggcccgccgctacaggccgcgttcgacgccgacggcaacccgaccaaggccgccgagggcttttgccgcagtgtggcgtcagcctggccgagatcgaccagagcggccccgaactgcgctttgtacagaacattccgggtcagccgggcacccgactgctgccccgcatcgtcgatgccgcactggccgcactggcgattcccagcgcatgcgctggggtgcccgcaagaccgattcgtg

SEQ ID NO: 298172 - DNA, 940 bp, Unknown
  Bacterial polypeptide expressing nucleotide sequence isolated from the Sargasso Sea
tattttcatcacctaacatcttctaactcaacttttattgataaagaatttgaggaaaataaaaagtcgttcttagaatttaaaaattataaaagtttttttaaaaaaatagatattattatagatcacaatgaaagaaaaaagttaattgaaaaaaaatttaacaatatattaaaaaataaaaattttaagatacaagataaccccaagttacttaatgaggttgtagatttgacagatcaaccaaatattcttctttgtgaatttgataaaaaatttttaaatattccaaaagaaattttaattattactatgcaatatcatcaaaaatattttcctatatttgataataaagaaaatattaccaatgaatttttagtggtttcaaacaaaaaagacaaaaaaggattaattaaattagggaatgaaagagtagttgaagcaagattaaacgatgctgaatttttttggaaaaaagataaatctcaaaatatggttaaaaaagttactgatttaaaatcaatgaattattttaaaggattaggaagttatttcgataaagctcaaagaatgagaaagttgggtggaatgatatctgatgagcttttaatcagtaaagaaaaagttgaattatcagcatcaatttgtaaagttgatttattatcagaattagtgggtgaattcccagagcttcaaggtgtgatgggaggttattttgctagcgcacagggttttgataaagatttagttttagccataagtgagcaatatttaccgacaggttctggctcaagagttccaaaaaaaccatttagtatagccctttcactggctgataagatagatactttagttggttttttcggtttaaatcaaaagccaacaagttctaaagatccatttgctttgagaagattagcattaggtataacaaggacaa

SEQ ID NO: 298173 - DNA, 727 bp, Unknown
  Bacterial polypeptide expressing nucleotide sequence isolated from the Sargasso Sea
tgggtagagtctagggttgattggtggaaagcacagggtataagcgaaaacagcctagagttgctttatgtgcctaaagaagagctttcacactactccaaggctacagttgatattatgtataagtttcctcatggcctcgaagagctagaaggaattgcaaatagaacagattttgacttaggttcacactctaaaaaccagaaagacctaaaaattacagcaaaagttaaagagaacaagtcttccaattcaaaactagctgttcaaaacagagaaactaatgaatggagtgtaccttttgtaattgaaccgtcggctggtgtagatagaggagttcttgctgtattaaatgaatcatataaagtagaaaatctagaagatggcaaagaaagaaccgttctttctcttaagccccacctttcgccaatcaaggctgctgtgattcctttaaagagaaataataaagaacttgttgatttagcctataaggtaaaaaatgacctccagaagcttaggcttggtagggttttggttgaaaactcaggaaatataggaaaaagctatagaaggcatgatgaggtcggtacgcccatatgcataaccatagactttcaaaccctagaagatggtacagttaccataagagatagagataccatggaccaagagagaaaaggtatgaatgatttgtctgggcttttaaaaactaagctgttagcgtgac

SEQ ID NO: 298174 - DNA, 861 bp, Unknown
  Bacterial polypeptide expressing nucleotide sequence isolated from the Sargasso Sea
ttagaaatttcaaaatttataaagactactttaaaaatctaggcattataatagataataatcaaagaaaagattttattgaaaatgaacttataaaaatttctaaaagaaaaaatattaaaatagaaattaataaaaaacttttgcaagaagttactgatttagtggagcagccaaccattctatcttgtaaatttgataaaaaatttttagatattcctcaagaaatattgattattacaatgcaaaatcatcaaaaatactttcatacatttgataataagggaaatattacaaatgaattttttgtagtagcaaacaacaaggataaaaaaggttatatcaaatctggaaatgagagagttatagaggcaagactaagtgatgctgcttttttctggaataagaataaaggatataatttagttaagcaaatatcaaaacttaaaacaatgaagtattttaaagggcttggatcatattttgataaaattcagagaatgagaaaacttggcggaatgatttctgatgaatttttaattagtaaagagaaaatagaattatcaagttcaatttgtaaagttgacttaacttcagacctagtaggagaatttccagaattacaaggaactatgggtggatattttgcagaagctcaaggatttgaaaaggacattgctttagcaataagtgaacattatttaccgaatggcttagaaagcaaagttccaaaaaaaccatttagcatagctttatctcttaccgataaattagatactttagttggattttttggaataaatgaaaaacctactagctcaaaggatccctttgctttaaggagagcggcgctggaataat

SEQ ID NO: 298175 - DNA, 406 bp, Unknown
  Bacterial polypeptide expressing nucleotide sequence isolated from the Sargasso Sea
aatggaagaattagtttctctttgtaaaagaagaggctttattttccaatctaatgatatttatggaggaattaaaggtctgtatgattatgggcccatgggtgttgagttgaaaaacaatctaaagcaggcttggtggaaatccatggtttatgaaagagatgatattgagggtttagatgcgtctattttaagtgccccagtagttttgcaacaatcaggacatgaagatacatttacagaccccttggttgattgtaagacttgtaagtctaggtttagagctgatcaattagaaaaaagtgaatgccctaagggaggatttttatctgattgtaagtcaaaaaatttgactgagccaagagcatttaacttaatgtttaaaacagcaatcggtcctgttgat

SEQ ID NO: 298176 - DNA, 213 bp, Unknown
  Bacterial polypeptide expressing nucleotide sequence isolated from the Sargasso Sea
tatggtttctaaaaaaaaaatcaaaaaatcaaaatttcattcatttcaggatacgattttgaatctccaaaaatattggagtaagcaaggatgtttaattctacagccttatgatttagaagtaggtgctggaacatttcatccagcaacgactcttagatcactaggggataagccatggaaaactgcatatgttcagccatcaagaagacc

SEQ ID NO: 298177 - DNA, 193 bp, Unknown
  Bacterial polypeptide expressing nucleotide sequence isolated from the Sargasso Sea
gtttttagaaaacacaggaaatataggaaaagcctaccgaagacatgatgaagttggaactccggtgtgtattactgttgattttgatagtttagacaacggaacggttacattaagagacagagatactatggagcaacggacggttgcaatttctgaactgaatcaactgtacctagattccttaaagtaa

SEQ ID NO: 298178 - DNA, 284 bp, Unknown
  Bacterial polypeptide expressing nucleotide sequence isolated from the Sargasso Sea
agtaataccccttaagaaaaacaaagaggagcttgttacgttagcaaaagagatcaaatcaacccttcaatcaatggggaaaggcagggtgtttttagaaaatacaggaaatattggaaaagcttaccgaagacatgatgaggttggaacccctgtgtgcattactgttgactttgatagtctcgagaacggaacggttacactaagagacagggacactatggagcaacgcacagtagcaatttctgacttgaaccaactgtacttagattccttaaagtaaa

SEQ ID NO: 298179 - DNA, 151 bp, Unknown
  Bacterial polypeptide expressing nucleotide sequence isolated from the Sargasso Sea
gacgcaattggcaccccaatctgtataactattgattttgacacgcttgaagataggacagttactgttagagatagagatacaatggagcaaaaaagggtacaggttgaaagtttagaagatcttttaaagagtctgttagtaaagtagt

SEQ ID NO: 298180 - DNA, 526 bp, Unknown
  Bacterial polypeptide expressing nucleotide sequence isolated from the Sargasso Sea
ctggcgcttctttcgagcagtgtttactcagtcgggacagaaagcgttggcgtgatccagcggtttggaaagtacaccggcacggttgacccaggcctccgcttcaagcttccatttggtatcgaccgggtcaccattctgccagtgaagcggcagttgaaaatggaattcggctttggcactggtggcgcaaatgacctgtaccaaatttcacgggagcaagatcgtgaagcggacatggttacgggtgatctcaatgcagcccatgttgagtgggttgtgcaatatgagatcagcgaccccgaacagtttttgtttaatctgcgcgaacctgccgcaacacttcgtgacttggctgaaagtgttatgcgtgaagttattggtgaccgcactgttgatgaagtgctgaccatcggtcgacaaggcattgaaagtgctgccatcgaaaaactgaccgatcttgttcagagccttgagatgggacttcgcgtgcagcaggtccagctcaaaaacgtgcatccaccgt

SEQ ID NO: 298181 - DNA, 355 bp, Unknown
  Bacterial polypeptide expressing nucleotide sequence isolated from the Sargasso Sea
actagatgacgacaaatccaggactgtaatggcttttaagcctcaccttgcgcccattaaagctgcaatcttgccccttaagaaaaacaatctggaaatagtcaataaagcaaaaaatttaaaggcccatctccagaaactagggtttggaaaaatcacttacgaagatacgggaaacatcggaaaaggatatcgacgccacgacgagattggcacgcccttttgctttacggtcgactttcaaacgatcgaggaagattcttcagttacggcacgaaacagggataccatggagcaagagcgagttaatattgaaaatctgcctaccttcttagcttctaagttgaactcttaa

SEQ ID NO: 298182 - DNA, 691 bp, Unknown
  Bacterial polypeptide expressing nucleotide sequence isolated from the Sargasso Sea
aacaaatattgttgaaaaaccaaatataattaaatgtaaatttgacaaaaaatttttaaagattcctaaagaaatattagtcacaactatggaagttcatcaaaagtattttccaacttttgacaataaagaaaatttaacgagtgttttctttgtagttgctgacaataacgacccaaaaggtttaattaaattaggaaatgagcgagtagtcgaagcccgtttaaatgatgctcaatttttctgggataaaaataaaacaaaaaatttagtaaaaggaatatcagatctaaaaaacgtaaattattttgaaggattaggaacttactttgataaaactcaaagattgagaaagctcggatcgctaatatctgatgaactattaattagtaaagaaaaagttgaagtagcatcttctatttgcaaagtagacttagtatctgatttagttggagaattccctgaacttcaaggtgtgatgggcggccacttcgctaaagctcaaggtttcgataacgaaatttgtttggccattagtgaacattacttaccaataggcccagagacaaaaacaccaaaaaaaccttactcagtcactttagctttaagtgataaaatagataccttagttggtttttttacaataaatttaaaaccatctagttcaaaggatccgttcgcattaagaagg

SEQ ID NO: 298183 - DNA, 881 bp, Unknown
  Bacterial polypeptide expressing nucleotide sequence isolated from the Sargasso Sea
cctccggaggtgatcagcacggtgatgcaggcccaccagcgttatgtgccgctgcaggtgcctggtctggaagcagacccgctccgactcaccgctgaggctgtgcttcggccccagttccttttggtgggcaatggcctggccccggcgtcatccttgattgttcgcggcaatgaacgcgtgcttggagctcgcctggcggatgccgaatttttcctcgatgttgaccggcgtcagtccagcgaatcccgacgtgaagccctcgaccgtgtcaccttcgccgaaggcctgggaagtcttctggaccgctccgagcgaatcgagcggctcacgggcctgctgttgaagcaactcggtctggatcagggcgtggtggatgcggcccagcgtgccgctcatttctgcaagaacgatctggtcagccagatggtgggtgagttccctgaacttcagggcctgatgggaggcaaatacctcctggaggaaagagaaccccgcgatgttgctctcgctgtggtggagcactatctgccccggggagccggtgatgctctgcccgcaacccccgcgggagccgttgtggccttggcggaacggctcgagctgctgctcagcatctttgccaagggagagcgaccaaccggatcctccgacccctatgccctgcggcgggccggcaatggtgttgtgcagattctctggggcatggcctggcgcctagacctcatggccttcctcagcaacgccgtggaggagtgggctgctctgttcccggcctttgcggttgatgccagccaactgcataacgacctctgtcagctgatgcggcagcggatcgtgtctcaactggaagacgacggctttgcgcctgatctggtgca

SEQ ID NO: 298184 - DNA, 415 bp, Unknown
  Bacterial polypeptide expressing nucleotide sequence isolated from the Sargasso Sea
ggcctcgagcgtctggccatgtacctccaggacgtggagagcatctgggatctgagctggaacgctgagcgcaactacggcgacatctggctgccttttgaaaaggggcagtgccacttcaacttcgagggctccgatcccgagcggctgaagcagctgttcgccatctatgaggccgaggcctctgacctgatcgagaagaagctgccggctccagcactggatttcgtgctcaagtgcagccacaccttcaacctgttggaagcccgcggcgtgatctcggtcaccgaacgcaccgccaccatcggtcggattcgcaccctggcccgcaaggtggcggaaacctggctggcggagcgtgaagcgctgggattcccgctgctggaggggggaacacttccgtcagcgacctgat

SEQ ID NO: 298185 - DNA, 715 bp, Unknown
  Bacterial polypeptide expressing nucleotide sequence isolated from the Sargasso Sea
tttgataaaaaatatctaagtataccgaaagaaattataacaataacaatgcaacatcatcaaagatatttcccgacatttgataaaaaagaaaaattaacaaataatttttttattgttgcagatacctttgatccaaagggatttgttaaaattggaaatgaaagagtaattgatgcaagattaagtgatgcagagtttttttggaataagaataaatctcaaaatttggtaaagcaaatatctaaattaaaaaatataaattattttaaaggtttagggaattattatgataaagttcaaagaataagaaaattaagcagtcttatttcagacgaattattaataagtaaagaaaaaatagaaattgcatcttcaatatgtaaagtagacctgctatcagatctagttggagaatttccagaattacaaggaatattaggcggttattttgctgaggcccaaggctttgaaaaagaagtttgtactgctattagtgaacattatttaccaacaggaccggaaagtacaattccaaaaaaatcctatagcatagcactatcattgagtgacaaactggattcccttgtaggcttctttggcttaggcctaaaacctacaagttcaaaagatccatatgccttaaggagatcagcaattggtttattaaaaatgattttagaaaataaaaaagaactaaagttaagagatttaa

SEQ ID NO: 298186 - DNA, 694 bp, Unknown
  Bacterial polypeptide expressing nucleotide sequence isolated from the Sargasso Sea
gagtttcctgagcttcaagggataatgggtggttatttttctgaggcactttgttttgataaggatgtagcactatcaataagcgaacaatatttaccttcagggtctgggtctaaggttcctaaaaaaccttttagtattgcactagctctatctgacaaaatagatacgcttgtaggcttttttggaattaaccaaaagccatcaagctctaaagacccgtttgctcttagaagattaactttaggagtaattagaataattgttgaaaataaaaatcatattaaaataagagatttgattaaatattcaacttcactttatatagatcaaggcttcaaatttgaaaataaacttcttcaaaaagaactttctgaatttctaatggaccgactaaaattctatatgaaggaagaaaatattcgaaatgatattattcaagcatctatcaattcacataatttagatcaacttgtagtaatttatgaaaaggcaaaacatttagacaaaataatttctaaatcaaatggacacgaaataatatcaagttacaaaagagcctctaatatcttggaaagtgagttgaaaggacagaattttgatcattcaaatacaaccgaccctggtatttttaagacagattttgaaaaaaatttgttcaaaaaaataaatgatttaagaaaatatttttctt

SEQ ID NO: 298187 - DNA, 832 bp, Unknown
  Bacterial polypeptide expressing nucleotide sequence isolated from the Sargasso Sea
caaaaaaatttcagatttgaaattaatgaattatttcaaaggtcttggaaattattttgataaagctcaaagaatgagaagacttggagctataatttctgatgagttattaattagtaaagaaaaagtagaattatcggcgtcgataagcaaagtagacttgttatctgaattggttggtgaatttccagaactccaagggattatgggaggttattttgcaaatgtgcaagggtttgataaagaattatcacttgctgtaagtgagcaatatttacccgttggatctggaacaaaaatcccaaaaaaaccttatagcattgctttatccttagctgataagattgatactttagttggattttttggtgtaaaccaaaaaccaacaagttccaaggatccttttgccttaagaagattagcattaggaattgttagaattatgattgaaaataaaaaagattttaaaattagagatttaataaattattcttcaagtttgtatcaggatcaaggatttgaatttgagaataaatctttacaaaaagaattactagattttctattagagagattgaaatattatatgaaggaggaaaatatccgaaacgatataatacaagcttcaataacttcctttaacttagatcaatctgtaattatttttcataaagcaaaaaatttaaataaaataatcaataaacaaaacggaatagatataattgcaagctataaaagagcatcaaatattctagaaagagagttaaaaaaagataaaattgaattatctaatacaaccgaccctggtatttttaaaactgaacttgaaaaa

SEQ ID NO: 298188 - DNA, 730 bp, Unknown
  Bacterial polypeptide expressing nucleotide sequence isolated from the Sargasso Sea
tactttagttggtttttttggaattaatgaaattccaacaggttcaaaagatccatttgcacttcgaagagttgcgctaggcgtcattagaacagttattgaaaacaagaaagattttaaaattcatgatttattaaattattcttcaagtttatatcaagaacaaggatacaatttcttaagcaatgatttaaataaaaaattgataaattttttaaaagatagatttaaattttatttaaaacaaaaagaaattcgtcatgatataattgatgctacgattagctcttttaaactaaataaattatcctcatcttttgaaaaagcaaaaagcttaaataaaattattaataatcaagtaggaatagatataacttcttgttataaaagagcttcaaatattcttgagagtgaaatgaaaaataaagttgttgaaataactaattcaactgactctggtttatttaaaaatgattttgaaaaaaaccttttttttaagataaatgagataaaaaaatattatttaaatattgatcacgatgaggattatgaacactctctaacacttctagcaggagctaagaaagaagtttttgatttttttgataatgtcaaagtgagtgaagaaaatgaaaatttgagaaaaaaccgattggaacttttaaatatgttatgtaaaacatttcaaaattttataaattttcaattattaaaaacaaataatgagtaa

SEQ ID NO: 298189 - DNA, 700 bp, Unknown
  Bacterial polypeptide expressing nucleotide sequence isolated from the Sargasso Sea
aaaccaaaaaccctcaagttcaaaagatccatttgcattaagaagagcagcattaggtgttattcgactaatacttgaaaataggaaaaacattagaattaaagatttaataaatcattctttacttttatatcaagaacaaaattataattttgataatgcgtctgtacaaaatgatttgtctgaatttctattagaaagattaaaatactacatgaaagataaggcaattagatctgacataattaatgctagttttaataataaaagtattaataatataaatgaaatttttagaaaatctttcgctttaaataaaattataaataaagaaagtgggatggatattatttcaagttataaacgagcatcgaacattattgaaaatgaactaaaagataataaactggaactagcagatactgctgatcctggaatatttaaaaacgattttgaaaaaaatttatttaagaaaataaaagaattaaaaaaatatttcataaatatagataacgatgagaattatgaaacaactcttgataatcttaagactgcaaaacctataatttttgctttttttgataatataattgttaatgacaatgatgaaataattagaaaaaatcgattggaactccttcaaatgttttgtagaacatttgaaaattatattaatttttcaaaaatcgaaagcgtctaa

SEQ ID NO: 298190 - DNA, 178 bp, Unknown
  Bacterial polypeptide expressing nucleotide sequence isolated from the Sargasso Sea
tatggtttctaaaaaaagaaaaaaaacaataaataaatttcaaacatttcaagatactatcttgaacctacaaaaatattggagcaaacatggatgtgttatactccaaccttacgacatggaagttggagcggggacttttcatcctgctactacactaaggtccctaggatctaag

SEQ ID NO: 298191 - DNA, 265 bp, Unknown
  Bacterial polypeptide expressing nucleotide sequence isolated from the Sargasso Sea
taataaggatcttgttgatactgctaagaaaataaaagatagtcttcagaaaatgggtttgggtagaataattcttgaaaatacaggcaatataggaaaaagctatagaaaacatgatgaaataggaacgcctttatgcataactgtggattttgatactcttgatgataattcagtaaccttaagagacagggactcaatggatcaatcaaggcttcaagttagtgacttagctagttatataaaagatttggttaagaaataa

SEQ ID NO: 298192 - DNA, 523 bp, Unknown
  Bacterial polypeptide expressing nucleotide sequence isolated from the Sargasso Sea
ttgaaaaacacttacaaattaaaaaacttagaaaatttagtttcattagcaaaaagaagaggaattatatttccatccagtgaaatatacggaggacttgcttctgtatgggattatggcccaattggagttgaaataaaaaggaatgtaaaaaatctttggtggaaatcatttgttacagagagagatgatatttttggtatagacgcatcaatattgatgcaccctgatgtatggaaggcttctggccacctagaatcattctctgatccactagttgaatgttctgaaacaggtaaaagatatagagaagatcatatttttatactagaaatagaaacaaaaaaagaaaataaaattatagctatagaagctagtgataaagatgaagctgaaaaattagtaaaagataaaataatttcaattattcctttggctgaatctgaaaataaagataatccttccccagatggaggtatattatcagaacctagaaatttcaatctaatttcaaaacttttat

SEQ ID NO: 298193 - DNA, 208 bp, Unknown
  Bacterial polypeptide expressing nucleotide sequence isolated from the Sargasso Sea
aatgccaaaaaaaataaaaaaaaaaaataaacctttatttcaatcttttcaagatacaattttgaacttacaaaaatattggagcaaacaaggttgtgttattgtgcaaccttatgacatggaggtaggagctggaacatttcatcctgcaactaccttaagatctttaggaccaaaacctggaaagttgcgtatgtgcaaccatcaa

SEQ ID NO: 298194 - DNA, 320 bp, Unknown
  Bacterial polypeptide expressing nucleotide sequence isolated from the Sargasso Sea
ttatgatataatatttgatagatcgggaataaaatataaagacatttttttagaaaatgaaaaacaaatgtctttttttaatttcgaatatgctccaaaagattttttgtatgaatctttcagtcattttgaaaaaaattcaaagatccttattgaaaaaagattaccaattcctgcttacgaacaatgcataaaagccagtcattcattcaatttacttgattctaggggccttgtttctgtttcagaaagacaatcatatattctgagaataagatcattggttcaggaatgttgtaaaatggtaatagaaaaatgac

SEQ ID NO: 298195 - DNA, 404 bp, Unknown
  Bacterial polypeptide expressing nucleotide sequence isolated from the Sargasso Sea
gttgatagaggattttttagctattctcaacgaagcatataaggttgagagccttgaaaataataaagaaagaacggttttatctctaaaaccacatcttgcacctataaaaattgctgttattcctctaaaaagaaatgaaaattcgatagtaatgacatcagtagatctaaaaaatgacttacagcgaacaatagaagggcgagttcttctagaaaacactggtaacatcggcaaaaactacagaaaacatgacgaaattggtacacctgcttgtatcaccgtcgattttcaaactcttgaagacaatacggtaactataagagatagagatacaatggatcaaaaaagattgaaaatagacgaagttagaacctttttagtccaaaattataagatttaga

SEQ ID NO: 298196 - DNA, 505 bp, Unknown
  Bacterial polypeptide expressing nucleotide sequence isolated from the Sargasso Sea
attgggaaagtccactttaggcgcagcaggtcttgcttgggaagtttggtgtgatggaatggaaataactcaatttacatatttccaacaaatggctggttttgaatgtaaacctgtttcagtagaaattacttatggcttagaaagaatttgtatgttcacacaacaaaaaaataatgtttatgatttaatttggaataacgaaaatgttgaatacagagaagtttttcatcaagcggagaaagaattttcggcttataactttgaacatgctaatacctcgaatctgtttaaaatatttgatatgttcgaaagtgaggctaaatcattaatagataaaaaaatatcactcccagcttatgatcaatgcttaaaagcaagtcatgtatttaatatacttgatgcaagaggagctatcagtgttgcccagagagcagaatatattggacgtataagagaaattacaaaatctgttgcttcaatttggattgatacacaaatataa

SEQ ID NO: 298197 - DNA, 204 bp, Unknown
  Bacterial polypeptide expressing nucleotide sequence isolated from the Sargasso Sea
tatggtttctaaagcaaaaaaggaaaaaaaaaaaattcaaacattccaagaaacaattttaaatcttcagaaattttggagtaaaaagggatgcattattcttcagccctacgatatggaggttggtgctggaacttttcatccagcaacaacattaagatcacttggaattaaaccatggaaagcagcttatgtgcaaccatc

SEQ ID NO: 298198 - DNA, 160 bp, Unknown
  Bacterial polypeptide expressing nucleotide sequence isolated from the Sargasso Sea
aattatcgcagacatgacgaagtcggaacaccagtttgcattactgttgattttgagtcgcttgataaccacactgttactgttcgagatcgtgatagcatgaaacaagaaagagtttctttagacaaggtttctgagcatcttaaaaagataatttaaa

SEQ ID NO: 298199 - DNA, 840 bp, Unknown
  Bacterial polypeptide expressing nucleotide sequence isolated from the Sargasso Sea
agacaaaaaataatattaaaaagatttagctcagtttctaaatcaaaaaactataaggaacaatataatcagcgtcttttagaggaagtggtgaatattgtcgaagacccaaatgtgatattagttaattttgataaaaactatttaaaaatccctgaagaaataattatttctactcttgaaaaacatcaaagatactttcccatctttgataaccgagaaagattaactaattatttttttgtagtggctaacaagaaagatgagaaaaaacttatcactgaaggaaataaaagagttgtagaagcgagactttcagatgctaaatttttttgggaaaaagatagatctaagaatcttataaaacaaatagctaatcttaaaaatattactttctatgaaaaaattggaacaatttatgacaagactcaaagaattagaaatctagcaggcttactttctgatgaattaaatattaataaagaaaaagttcaggtggctgcatctatttcaaaatcagatttatgttcagatttggtttctgaatatccagaattacaaggtgtgatgggaaaatattttgcattagctcaaggtttcgatgaggatgttgcaaattctgtaagtgaacattatcttcctataggtttaacttctcaagtgccaaagaaaccctttagttattcaatttctattgtagataaagtagatactttagttggttttttccttataaatgaaaaacctactagttcaaaagatcctttcgcacttagaagatcagcaataggtttattaagaattattattgaaaataaattatctataaaactaagagaa

SEQ ID NO: 298200 - DNA, 214 bp, Unknown
  Bacterial polypeptide expressing nucleotide sequence isolated from the Sargasso Sea
tatggtttctaaaaaaaagaaaacaaaaaaacctagtttccaatcttttcaagatgcaatcttgaatttacaaaagtattggagtaagcaaggatgtgttataattcagccttatgatatggaggttggtgctggcacattccatcccgcaactaccttaagatctttaggaccaaaaccgtggaaagttgcatatgtacaaccatcaagaaga

SEQ ID NO: 298201 - DNA, 282 bp, Unknown
  Bacterial polypeptide expressing nucleotide sequence isolated from the Sargasso Sea
taatacctcttaaaaaaaataatgaaaaaatcgtcgcattatcacagcaaataaaaatcagtcttcaaaaaattggattgggtagagtaatgcttgaaaattcaggtaatattggaaaaaattataggcgacatgatgaaataggaacaccaatatgtgtaaccgttgattttgaatctttagatgataacacggttacagttagagatcgagatactatgaatcaaaaaagaatcagtcttgatcaattaatagattattacaaaaattactttaattaaa

SEQ ID NO: 298202 - DNA, 511 bp, Unknown
  Bacterial polypeptide expressing nucleotide sequence isolated from the Sargasso Sea
atggaaaaagttatttctctttctaagcaaagaggttttgtatttcaaagtagtgaaatatatggagggcttaaatcggcttatgattatggtccattaggtgttgagctaaaaagaaatatcatgaatgaatggtggagatccatggtacatgaaagagaagatgttattggtattgatgcatcaattattatgcatacaaatgtatggcatgcttcagggcaccttgccggattttctgatcctttagttgattgtttaattagtaaagaaaggtttagggctgataaagctccaagaccagtttctggagatgaattacctattgaatgtgccgataaaggtcaggcaaaatcttatttagaagcgataaaaaaaagatataatattgaattaaaaagaaatggaaaagtattattagggatgagggtcatagatgaaaataatatgggattttttgaaaatgacaatgaaaaaccatctgctacatttccatatagaggatatgtaa

SEQ ID NO: 298203 - DNA, 793 bp, Unknown
  Bacterial polypeptide expressing nucleotide sequence isolated from the Sargasso Sea
ttgtctaaatatttacttgaaataggaaccgaagagttgcccgcaaatttttctcattctgttctagagcaatttaaatctctaatagaatttgaattggataaaaagttaatcaaattcaataatattgttgttacctctactccaaggaggatagttctacttcttgaaggtttagtagattatgccgaagataagacgataataagaaaaggacctaaagcaagttcagcttttttaaatggatctcccactaatgctgctttaggatttgctaatagtttaggtatagatgtaattgagttagaaataaaaaatacagaaaagggtgactttgtttttggaaagaaaattgagaagggacaatcaacaagaatttcattgtcttcaattattcctaaagtagtgaagagtcttcaaggtcctcgttttatgaaatggggagctggggaaataaaattttcaagacctattaggtggattacctctatttataatgatgatattcttgatttcgcatttgatgaatgtgatccaaatattcaaataagtaacaaatccaaaagtcatagactaattaatgaagtttttgaagttaagaatcctgataattttttcgaattattgaaacaaaatagagtattagttaatcgacatgaaagaaaagaaagaattgaaagtctaataaatgaggcttctgatttactaaatctgaaacctgacctttctaaaggattgcttaatgaactaactgatttagttgaatggccagacttaattattggtaaattta

SEQ ID NO: 298204 - DNA, 181 bp, Unknown
  Bacterial polypeptide expressing nucleotide sequence isolated from the Sargasso Sea
tatttaggttctctgcaggcccttggtattgatacacaaatccatgatatccgttttgtagaagacaactggggaatcaccaacgctaggcgcttggggtctgggttgggaagtctggttaaacggcatggaagtgactcagtttacttacttccaacaggtcggcggcttagagtgtagc

SEQ ID NO: 298205 - DNA, 400 bp, Unknown
  Bacterial polypeptide expressing nucleotide sequence isolated from the Sargasso Sea
gataaaaagacgacattagaaagccgccttgaaagcttagaaaccgtgttgttccaaaaacagcttggtacgctaaaagaaaagtctgagcgtatatctgccctatcggcgtttatcgcgtcgcaaatagatgcgaatgaatcacaagctgcacgagcaggtcttctagctaaaaccgacttgatgtcgaacatggttatggagttcccagacgttcaaggtgttatgggtaaatactatgcgctaaacgacgatgaagatgcgcctgttgcagaagcactgtatgaacaatacatgccgcgttttgctggtgacgcacttcctagttcaggcgttagcgcgtcggtcgcgcttgctgacaaactagatactcttgtgggtatttttggtattggccagt

SEQ ID NO: 298206 - DNA, 931 bp, Unknown
  Bacterial polypeptide expressing nucleotide sequence isolated from the Sargasso Sea
ttggtgagccagatggtgggtgagttccctgaactgcaggggttgatgggaggcaagtatctcctggctgaaggtgaacctcctgccgtcgctctggccgtgcagcagcactaccaacctcgcggcgctgatgatgatctgcctagctctgatgctggtgcactggttgccctggctgaacggttggagctgttactgagcatcttcgccaaaggtgagcgaccgacgggttcctccgacccctatgccctgcggcgagcaggcaacgggatccttcaaattctctgggaacggagctggcgactggatcttcacgagctactgcagcaggccagtcgccaatgggctgcgttgctgcccaatttcgcgattgatgtggtgcaacttcaagccgacctcgaggagttcctgcgccagcgcttgatcagtcagcttgaagaacagggtgaggcgattgatcttgttcaggctgtcaccgctgagtccgccaaccagcgcttgcttcaggatcccttggatgccatggatcggttgcggctgcttcagcagctgcgtttagccggtgagcttgccgccgttcaagccgttgttcaacgggctgtgcgactagctgaaaagggagatctggatgccgatgtgctgagtagctctggtgttgtcgatgccgcactttttgagcagcccagcgaagacgccatgcttgctgttgttgatcagctcagtggcatcgttagccagcatgggcccgatcggtattcccagctctgcgaagcattagccgccagcgcatccaccctgtccgccttctttgatggtgagtccagcgtcatggtgatggccgatgacttggctgttcgacgtaaccgcttgaatttgttggccgtattgggcaaccaggcggcgatcttggccgatttcgccgcgatttagc

SEQ ID NO: 298207 - DNA, 811 bp, Unknown
  Bacterial polypeptide expressing nucleotide sequence isolated from the Sargasso Sea
gatattaagtgggcaagaccattgaggaatattttagttttgttagataacaaattaattaatgggaaaatattaataggaaaaaatgagaaaatattgttttctgatactacctatgggcacagattttgtgaaaaaaaagtaaaaataaaggatatacaatcatataaaaataaaatgagaaatcattttgtttacgtagatagaaaagagagaaaaaaaataattttagaacaaataaaatctattttgtataaaaataatttaaaattgtatcaagatttagaattacttgatgaggtaaatgggttggttgaatttcctaatgcaatactatgtaaaatagaaaagcaatttatgaaacttccctttgatgttttatctacaagtatgaaagtgcatcagaaatatttttctttgttaaataaatcaaataaaactgcaccatactttattgttattactaatactccaaatttaaataagaaaaataaaactattttatcaggtaatgaaaaagtattaaaagctagactttcagacgctttattcttttgggaggctgatataaaaatcccgttcgagcaatggcttgaagatcttgaaaatgtaacattttttgaaaatttaggtaatttaaaacaaagaagtcaaaggatttctgacttagcaattaatttaaaaaagtattttaaatataaaaatctttctcaagtcaaaaatgcaggcttattttctaaagttgatcttttatcaaatatggttggcgaatttccagaattgcaaggtattatgggaggatattattctg

SEQ ID NO: 298208 - DNA, 844 bp, Unknown
  Bacterial polypeptide expressing nucleotide sequence isolated from the Sargasso Sea
gcggatcgttttctccagctcccgccggaggtgatcagcaccgtgatgcaggcccatcagcgctatgtccccctggatgtgccatccgtggagccggatccgctcaggctcagggccgatgcggtgctgcgccctgagttcctgttggtgggcaatggactgtcgacatccgctgatcagatcacccgaggaaatgaacgcgtgctgggggcccgtctggcggatgcagaattctttctggcggtggatcggcgtcagcccagtcaggaacgtcgtgaagcactggcgcgggtcaccttcgccgaaggccttggcagcttgcgggacagaagtgaacggattgaaaggctcgccgagcaactcctgaacacgctgaatctccctgaggaatccgctgctgctgcgttgcgtgccgcacatctgtgcaagcacgatctggtcagtcagatggtgggtgaattccctgagctgcagggattgatgggcggtaaatatcttctggaggagggggaatcccgtgcggtgtccctggcggttgtggagcactatctgcccagaggggcgggtgatgccctccccggtacggacgcgggcgccgtggtggctctcgcggagcgcctggaattgctgctgagcatctatgccaaaggagaacgacccagtggttcttccgacccctatgccctgcgtcgcgccggcaacggtgtgctgctgatcctctgggagagaggctggcgactggatcttctggccttgttgcaacaggccgccgccagctggtctgagcttttcccggcctttgacgtcaaccccgatgcgctgcgaaaagatctgtccctgctgc

SEQ ID NO: 298209 - DNA, 826 bp, Unknown
  Bacterial polypeptide expressing nucleotide sequence isolated from the Sargasso Sea
tcttttttaaaaagtaataaaattttattagatcatgtagaaagaaaaacaaagatattaaagagatttgaagctatttgcaggtcaaaaaattataaagaaaattttaatactaaacttttagaagaggtgacaaatattgttgagaatccaaatgttttattggtcgattttaataaagaatacttaaagatacctagtgagattgttatatctactcttcaaggacatcaaagatattttcctctttttgacaaaaaagacaagctaaccaattattttttagtggtggccaataaagttgatagtaaaaattttattaaagaaggtaacaaaagagttgttgaagcaagattgtctgatgctaaattcttttgggataaagataagtctaaaaacttgattaaacaaataggaaaattaaaaaccattacattttatgataaacttggtacgatttatgacaaaactcaaagattgagaaaactagcttctttaatatcagaccaactaaatattaataaagaaaaaatagaaattgcagcctctatttctaaatctgatttatgttctgatctagttggagaatatcctgagcttcagggaattatgggaaaatattttgctttgtctcaaggcttcgaagaagatgttgccaattcaataagtgatcactattttccgacaggtttggcttcatctgtaccaaagaaaacgataagttattcaatttcaatagttgataaactagatagcttggtaggattctttttaattgatgaaaaaccaactagttcaaaagatccttttgctcttagacgttcag

SEQ ID NO: 298210 - DNA, 886 bp, Unknown
  Bacterial polypeptide expressing nucleotide sequence isolated from the Sargasso Sea
atttttcataaagtcagatttataatcagtagctcttcacgtattaataagttgaaagatgtaacttttgctgaaggattaggttctttatatgagcgcgtaaatcgaattgaatggcttgttaaattattaacactaaaacttgaatttgatccagaggatattcaaaaatctgtaaaagttgcacatttttctaaacatgatttagttagcaatatggttgacgaatttcctgagttgcaaggaatcattggatctaaatacttacttcacgagggagaatcaagagatgtatgccttggcgttttggaacactataaacctaaaggaacttctgacgcgcttccttcaaataaacttggtaaagcagtttcattagcggaacgttttgaattgcttatcagcatttatgccaagggcgaaaggccttctggctcatctgatccatatgctttgagaagggctgctaatggaatattattgattttatggaataaagattggcaattagatatcaacaaaatactaaatgattccctgatttattggcagcaacttttcccttctctctctcttgatataagtaatcttttgactgagttaaaggaattctttcgtcaaagaattattagtttattagaagagaaagatgttgactttgatattattcaggcagtttcaggagataccacttcaacatcaaaattattagatgatccaaccgacgtatattttcgaacttcattattgatggaaatgagaaaaaataatacacttaatttgttgcaagctgtagtgactagagcctctaagttggcagctaaaagttctatctccaaagatattattgatcctttagattttgttgataagtctctattgaaaa

SEQ ID NO: 298211 - DNA, 339 bp, Unknown
  Bacterial polypeptide expressing nucleotide sequence isolated from the Sargasso Sea
aatgttttttcaggatataattaaaaatttaaataatttttggtcagaagaaggttgtttgattatgcagccatacgataccgaaaaaggtgctgggacaatgaatccgcatacttttttaagggctattggaccagagccttggtgtgtagcatatgcagagccatgtagaagacctacagatggacgttttggcgacaatcccaatagggcacaacattactttcaatatcaagtaataattaaaccttcaccggaaggaatccaggaaaaatatttaacatctctagaatctcttggaattaatcctagaaatcatgacataagatttgttgaaga

SEQ ID NO: 298212 - DNA, 550 bp, Unknown
  Bacterial polypeptide expressing nucleotide sequence isolated from the Sargasso Sea
ctggcagccattgttattgcagggctagcactcgcttcgagcagtgtttattcagtcggtacagaaagcgttggtgtcatccaacggtttggaaagtacaccggcacggtcgaccctggccttcgcttcaaacttccttttggaattgaccgagtcaccatcctgccagtgaagcggcagttgaaaatggaattcggctttggcactggtggggcgaatgatctctatcaggtttcacgggaacaagatcgtgaagcggacatggttacgggtgatctcaatgcggcccatgttgagtgggttgtgcaatatgaaatcagcgatccggagcagttcctttttaatctgcgcgaacctgccgccacacttcgtgacctggctgaaagtgtcatgcgtgaagtcattggtgaccgcactgttgatgaagtgctgaccatcggtcgacaaggcatcgaaagcgccgccatcacaaaactgactgatcttgtccaaagccttgaaatgggacttcgcgtacagcaagtccagctaaaaaatgtgcatccgccgt

SEQ ID NO: 298213 - DNA, 765 bp, Unknown
  Bacterial polypeptide expressing nucleotide sequence isolated from the Sargasso Sea
ttgaatattttgttgagcctgatcaagatgaaaagcaacatgaatactggctcaagcagagactagattggtgggaggcacaaggtgtgccaaaagacaaattagaattatacgaagttccaaaaaaagaattatcacattattccaaaagaacagtggatataatgtataacttccctcatggtcttgaagagcttgagggtgttgcaaatagaacagatttcgatcttggatctcattccaaaaatcaaaacgagctaaatatatcctcaaaagtacgagataataaagattctaactctaaactggcaattaaagagccgcatatggacaactgggttgtcccttttgtaattgagccgtctgctggggttgatagggctgtattggcaataatgaatgaagcctatagagaagaaaaattagaagacagctcgaggatagttttatctttgaggcctcatctatctccaatcaaagcagctgtaattcctttgaaaaagaataatgatgagatggttgagttagccaagaaaattaaatcacaattgcaggaacttggtttaggaagggtgattttagagaatactggcaatattggaaagagttacaggaggcatgatgaaattggcaccccactctgtgtaacggttgattttgaaagcctagaaaactcagatattactgtaagggatagagatactatgaaacaagaaagaatagaaattaaagatctgaatgcatattttttgaagtatttttaaa

SEQ ID NO: 298214 - DNA, 853 bp, Unknown
  Bacterial polypeptide expressing nucleotide sequence isolated from the Sargasso Sea
gtaagaggatataaagactatatagattgtttaaaaaaattatttatcacgattgatcaaaatcagcgtaaatcaataattaaaaaagaacttattaaaaattcaaaaaaaaataacattgatgttgaaattaatgaaaagcttttggcagaagtaacagatttagttgagcagccaaatattttattatgccaattcaataaacgctttctatctatgccaaaagaaattcttgtaattacaatgcaacatcatcaaaaatattttcatactttagatagaaagggaaatattaccaatcagttttttgttgttgcaaataataaagatccaaaaggctatattaaagcaggtaatgagagagtggtagaagcaagactaaatgatgctgaatttttctggaataaaaataaaaatcaaaatttatttaaacaagtttccaaactaaaaagtatgaattatttcaaaggattaggaacttattttgataaaattcaaaggatgaggaaattaggtggagcgatctcagatgaacttttaattagtaaagataaaattgaaatttcatgttctatctgcaaaactgatttgctttctgatcttgtgggagagtttccagaacttcagggtgtaatgggaggttattttgctgagtcacaaggttttgataaagatgtttctcttgcaataaaagaacattatttacctaattcacttgaaagcaaagttccaacaagaccgtttagtcttggtctttcgttgactgataagctagatacattagttggtttcttcggtgtaaatcaaaagcccacaagctcaaaagatccatttgcattaagaagagcagcat

SEQ ID NO: 298215 - DNA, 620 bp, Unknown
  Bacterial polypeptide expressing nucleotide sequence isolated from the Sargasso Sea
tataaatagagacaaactacgcttccacgagcatggtagtaatgaacttgcacattatgccaaagaagcttgggatattgagtatgaatttccatttggatggtctgaaattgaaggaattcataaccggactgattacgatctttcaaggcatgaggaattttcaggaaagaatctgtcctattttgatcaaccaaataatgacaggtatttgccttacatcattgaaacatctgcaggcttaaatagaatgcttttaacagttcttgcagatgcatattgggaggatgataaaaataaccgaactgtcatgagaatcagcccaaggcttgcaccagtaaaagctgtcatctgccctcttgtaaagaaagatgggctccctgagaaagcaagagaggttgtagagattcttaaaccacatttcaaagtactatatgatcaacaagggtcgattgggaaaagatattatagacaagatgaggctggtaccccatttggcataacagtagatcatcagtctattgaagataatacagtaacacttcgtgatcgtgattcgatgaagcaaaatcgtatctctattgaaagaattttaaatgcaatccaagatagcttttaga

SEQ ID NO: 298216 - DNA, 862 bp, Unknown
  Bacterial polypeptide expressing nucleotide sequence isolated from the Sargasso Sea
taaaactcaaagattaagaaagctcggatcgcaaatatctgatgaacttttaattagtaaagaaaaagttgaagtagcatcttctatttgcaaagtagacctagtgtctgatttagttggagaattccctgaacttcaaggtgtaatgggtggccactttgctaaggctcaaggtttcgataatgaaatttgtttggctattagcgaacattatttaccaataggcccagagacaaagacaccaaaaaaaccttactcagtcactttagctttaagtgataaaatagataccttagttggtttttttacaataaatttaaaaccatctagttcaaaggatccgttcgcattaagaaggtcagcaattggtcttataagactaataatagaaaataaattagagattaaattaaaagatttaataaattattcttgtgttttgtttgctgaacaagatttagattttgatattaagactgtccaacaagatctgtttaattttttttctgaaaggcttaaattttatatgaaagaaaaaaaaataagaccagacattatagaatgttcgttgaatagttataatgcggatcaaatttatagaatttataataaagcttttattttgaacaaattgatcgatagaaatataggccaagatgtgattttttcttacaaaagagcatcaaatattctatcggatgagataaacaaaaataagattgaattagaaaattcgactgacccaggtttattcaaaaatgattttgaaaaaaaattatataaaaaaatacaagaaataagaaaatattttacaagcctaggtagtcgtgaggactgtaaaaaaactttagaggttttagct

SEQ ID NO: 298217 - DNA, 235 bp, Unknown
  Bacterial polypeptide expressing nucleotide sequence isolated from the Sargasso Sea
atgccaaaaaaaaacaataagataaaaaaaagtaaaaaatttttatcatttcaagacatcataatgaatctacaaaaattttggggaaagtatggatgtgtaattcttcaaccatatgacatagaagttggggccgggacttttcatccagcaacaactttaagatctttaggaactaaaccatggaaagctgcttacgttcaaccgtctagaagaccagcggacggtaggtagg

SEQ ID NO: 298218 - DNA, 580 bp, Unknown
  Bacterial polypeptide expressing nucleotide sequence isolated from the Sargasso Sea
ttgcttcgtgctgttcctcaacacccgcggcgctgtccacagcgttaccccacgccgcgatccggtggtgcgtcgccgcagcatcaacatcattggccagttcgccggttgggagcggatgtggcggatccccgagttcgacagccgttcttcccgtctcagacagctcggccagttggcacgaacgggctggccaggtcgatgggggagtgggggctgactccctgggcagaatcaatccccaggcaccttcgcttcgcagtgcattttcaggacatcatctcgaccttgcagcgcttctgggcggatcagggatgcctgctgctgcagccctacgacaccgagaaaggggccggcaccatgagcccccatacggtgctgcgggcgatcggtccggaaccctgggccgtggcttatcccgagccctgccgccggcctaccgatggccgctacggcgataaccccaaccgggctcagcactacttccagttccaggtgctgatcaaaccctccccggacggcatccaggagacctacctcgcatccctggaagccctgggcatcaaggcggcggaccacg

SEQ ID NO: 298219 - DNA, 908 bp, Unknown
  Bacterial polypeptide expressing nucleotide sequence isolated from the Sargasso Sea
tctcaaatctgacttatgctcagacttagttgatgaattcccagaactccaaggagtaatgggaaaatattttgctttatctcaaggttttgacgaagatgtatcgaactctgttagcgaacactatttaccaacaggtctaacttcaaccctaccaaaaaaaccattcagctattctatttccattgttgacaaaattgatactttagttgggttttttataattgatgaaaaaccaactagctcaaaagatccatttgcattaaggcgatcagccatcggcttattgagaataattattgaaaacaaactaatttttaaattaagagatttgatagtttatgcaatccgaatttatgaggatcaaggagttaaaattgaaaatgaaaaagccgagcaagaaattcttatttttataaaagaaagaatgagaaatattttgaaacaaaaaaatataaaaattgatattattgaagcctcaataagttctcatgccggtgataattttttagacctttataaaaaaacaattttaatgaataaaaatattaataaagatattggaaaaaatgcagttaaatcatataaaagagcagctaatattttggataaagaaaacaaaaatattttagggcgtcctgatgctgttttgtttagaaaggatgaagaaaaacaattatatgaaaaaataaacgagataagaaaagcttttacagtaaaagaaagcaataaagactacgaaagcttgttaataagattgtcacatacaaaggtacctacagataatttttttgacaatgtagttgtaaatgacgaaaatcaagatattaaaaataatcgtttagagttgttaaagatgttttgtaatacatttgataactttatagatttttcgaaattagagggtc

SEQ ID NO: 298220 - DNA, 773 bp, Unknown
  Bacterial polypeptide expressing nucleotide sequence isolated from the Sargasso Sea
ccccaggcttccggccacgtcgacaagttcaccgacttcatcgtcaaggattcccaggaccagtccccgtttctggcgtgccgacaagctcctcgaagacgtcatggaaaagcgcatcgaggctaccaccgacgaggccctgaagaaagagtaccagatcgtgctcaactccgcagacggttacacgcaggaggagctcatgggtatcttcgagaaatacgacgttcgtgcgcctctagctaaccccaaggacaagggccccggccacaaactcactgatcctgttccctttaatctcatgttccccactcctatcggcccggtcggccacgaaaaagggtacctccgcccggaaaccgcccagggcatcttcctcaactacaagtactgcctggagcagaacggcagccgcatgcccttcggcatcgcccaaatcggcaaggtcttccgcaacgagatcgcgcccagggcggggctaaccagacaaagggaattccagcagatggagatcgagtggttcatcaagcccggcgagtacaagcacccgaagtggaacgaggtgaaggatatcgaaatcacgctgcactcggcggtggcgcaggaggcgggagaagggcctgttaggatgagtctggagggggctttgcgggaggggatcatcaaggacaacaacgagacgctggggtacatgatcggaagggtgtacgagtttttggtgaaggtgggactgagagagagctgcattaggtttagacaggtaagggaagtttgaa

SEQ ID NO: 298221 - DNA, 868 bp, Unknown
  Bacterial polypeptide expressing nucleotide sequence isolated from the Sargasso Sea
tctgacttagtgtcaggtcttgtaggagaatttccagaactgcaaggagtaatgggaaaatattttgctttcagccaaggatttgaagatgatgtttgttatgctattagtgagcattaccttcctattagcatctcctcatctgctcctaaaaagccaattagttgtgccctttctattatagataaactagataccttggttggattttatttgataaatgaaaaaccaactagctctaaagatccctttgctcttagaagggcagcaattggtttattgagaactataattgaaaacaacattacaattaaactaagagacttaattgataattctataaaaatttatttagaacaaggtgtgaaggagttaaacagcgaggttagtaaggatttacttgtattcttcagagaaagaatgaagaatattcttaaagaaagaaagattaggaccgatcttatcgaagcctcaattagttcacatttgaatgataattttttggaattatacaaaaaaactttgattatgaaaaaatttatttctaaagacttagggaaaaatgctgtttcaacttacaaaagagcctcaaacatcttagaacaggaaaagtctgtttctaaaaatggacctgatgcagttctttttaaacatgaagaggagaaggagctttttgaaagaatcaataatattcggaaagcttttacgttaaaagaggaaaagaaaaattatgaagaacacctgaaacttttgtctgacaccaaattatcaacagataaattttttgataatgttaaagtgaatgatgaaaataaagatcttaaaaacaatcgtctagaactcttgcaaatcttatgctctacgttta

SEQ ID NO: 298222 - DNA, 614 bp, Unknown
  Bacterial polypeptide expressing nucleotide sequence isolated from the Sargasso Sea
tctgatgtatcaatttcctcatggtatcgaagaacttgagggaatagctaatagaactgattttgatcttggttctcatagtaaaaatcaagatgacctcaatattgatgcaacaactattaataattcttcgtctaatgcaaaacttgctgttcaagatcttaaaacaaatcaacttacagtgccttatgtcatagaaccttcagcaggtgttgataggggtgttctggctatcttaaatgaagcctttaatattgaaaaactggaagatggcaaagaacgtttggtcctatctttcaaaccccatttggctcctattaaagctgcagttatacctttgaaaaaaaataatgatgaacttgtatcaactgctataaaccttaagacaaaacttcaaaaaatgcgtcttggtagagtggtagttgagaacactggaaatataggtaaaaactatagaaaacatgacgaaataggaacacctctttgcataactattgactttgatacattagaaaaaggttctgtaactattagaaacagagatacaatggctcaagaaactattgatatcgaaaatgtaccttcttattttagagattttttccaaaactaat

SEQ ID NO: 298223 - DNA, 322 bp, Unknown
  Bacterial polypeptide expressing nucleotide sequence isolated from the Sargasso Sea
atgcctgaatcttcattagataaaataatttcactctgcaaaagaagagggtttatttttcaaagttctgaaatatatggaggttttggtgcagtatatgattatggcccacttggcgttgagttaaaaaataacatttctcaattatggtggaaatgcatgactcagcatcatcagaatattcttggtcttgatagtggaatattaatgcatccaaaaatatgggaagcatcaggacacgtcgacgcattcaatgaccctttagttgattgtaaacaatgtaaagctcgctatagagctgatgaacttgttgaagattagt

SEQ ID NO: 298224 - DNA, 808 bp, Unknown
  Bacterial polypeptide expressing nucleotide sequence isolated from the Sargasso Sea
tttttaatcgttgccaataaaaaagataaaaaagggttaataaagattggaaacgaaagagttattgaagcccgattaaatgatgcagaatttttctggaaaaaagataaaacacaaaatttagtaaaaaaagtttctgacttaagatttattaatttttttaaaggtcttggtacatattttgacaaagttcaaagaatgagaaaattgggtggtattatttctgatgaactattaataagtaaagagaaagttgaactatctgcatcaatttgtaaaacagatttgacttcagatttagtgggagaatttcctgaacttcagggtataatgggtggatatttttcagcttatcaaggatttgataaagacatatctcaagctattggtgatcagtatcttccaataggtttagactctaaagtaccaaaaaaaccattaagtgtagctttatctgttacagataaaattgatactttagttgggttttttggtattaatgaaaaacctacaagctcaaaagatccattcgctttaagaagagttgcactaggtattatcagaacaattgttgaaaataaaattgatcttaagttgaacgatttgctcgtgtattctgtaaatttgttcaaaaaccaaaattttaatttaacaaatgataatttacaactagagcttaataattttttaaaagataggtttaagtattaccttaaagaaaaacaagttcgttttgatattattgattcatcaatatcatcattttcagctaataaattattttcgtctttgaaaaggcaaagagttt

SEQ ID NO: 298225 - DNA, 790 bp, Unknown
  Bacterial polypeptide expressing nucleotide sequence isolated from the Sargasso Sea
gcaatttagtgatgaatttcttgatcttccggttgaagttctctcaacagtcatgaaaagtcatcagagatacgttcctcttttattgaaaaacaaaagtttttctaaactagatttaagctctgaaaaaaatattagtacaactttttgcgttatttcaaatggtcttgaagaatcaaataataatattgccaaaggtaatgagaaagtattaagggctaggttttcagatgcaaagtttttcgtagaaagtgacaaaaaagttgcttcaatcgaaagaaatgaaaagcttaaatctgtttcatatttaaagggacttggaaatatatatcagagggtagaaaggatagaggaagttactaaaaaaattcttaaatttttaaatgataagtctttagaagaaaaaaaagtaatagaggctgctaagtactgtaaaaacgacttatgtagcgaaattgttttcgaattccctgagctgcaaggaataatgggtggtaaatatcttaaatatgagggatttagtgaggatgtttgcttggctgtcgctgaacattatttaccttctttttataaagattctttgccctcaacaaaatatggtgcaatagtttctcttgcagataaggtcgaaactttaataagtatatttatttctggtaaacgtccaagtggttcctctgatccttatgctttaagaagaaatttgaatggagtgattaaaataatttgggactatgaacttgatttacctttagataaattatttaacgaacttattgatttttggaaa

SEQ ID NO: 298226 - DNA, 841 bp, Unknown
  Bacterial polypeptide expressing nucleotide sequence isolated from the Sargasso Sea
tttcaaaaccaaggcatcattatcgatcaagataaaagaaaaaaatttataaataaagaatttttaaagatactcaataaaaaaaaactatcgattgaagataattcaaaactattgaatgaagtagtaaatttagtagataatcctaatattttactttgtagttttgataaaaaatttttgtctattccaaaggaaatattaacattgactatgcaatcacatcaaaaatattttccaacttttaatactagaaatgaattaagtaatgagtttttgatagttattaataaaaaagatcataaaggcttaattaaaattggtaatgaaagtgttgttgaagcaagattaagtgatgcagaatttttttggaataaagaaaaaacacagaatttggttaaaaaggtttcaaaattgaaatcaatgaatttttttaaaagtttaggtacgtactatgacaaggtacaacgaatgagaaaattaggaggaactatttctgatgaattgttaataagtaaagagaaagtagagttatctgcttcaatatgtaaaaccgatttaacctcagacttagttggagaatttccagaacttcaaggaataatgggtggacacttttcaaatcatcaaggatttgataaggatatttcactagcattaacagaacagtatttgccaatagggttggattctaaggtttcaaaaaaaccttttagtattgctttatcaatgacagacaaaattgatactttagttggtttttttggtataaatgaaaaacctacaagctcaaaagatccgtttgccttaagaagaatagcacttggtttaataagaacaa

SEQ ID NO: 298227 - DNA, 667 bp, Unknown
  Bacterial polypeptide expressing nucleotide sequence isolated from the Sargasso Sea
tttttcggcattgatgccaaaccaactgggatcaaaagatccgtttgctcttcgccgggcggcgttgggggttattcgtattattattgatgggaaattgaatttaccgcttgttatggtgttggaagccgctgccaagggttatggttttgcttcggttgatcctgctttgctgccatttattcatgatcggctgcggggctaccttcgccatcaacagatgcgccatgatgtcgttgcagcggcactggctaatactgatggggataatattcgcctgatggccgcccgagcgacagagttggagacgtttctggccggccctgatggcagtgggcttatggccggctggcgtcgtgttagcagtattctggcggcggaggaaaaaaaggcgagaagggtctttgctgcgtcatgtgatccaactctttttaatgacattgaacgtgcattattcacaccgttatcggcagttgctgataaccattctggcgttgacgtgcagctttccgcgctcggtgcactgcgctttcccattgatgtattttttgacaaaattgtggtgaatgatgacgatccagaaatccgtcataaccgacttggattattagcaatgatccgtgaaaaaatgctggctgttgtagattttaccaaaatagagggttag

SEQ ID NO: 298228 - DNA, 919 bp, Unknown
  Bacterial polypeptide expressing nucleotide sequence isolated from the Sargasso Sea
aagaggagggtaattcagtcttggatcgatcattggagcaccatacctaatgttgtcgaggtagattctccgactattacaccagagtcggttttggtagctagcggccatgttggcgagtttaatgacaagatgtccgagtgtcagtcctgcgagagcaccttcagaaccgatcacttgctggagggctttcacgatagcccagaaacgctcgatgcagaagaaatggataggataatttcagataataacatcaaatgtccaagttgtggtctagcttcttggaatgcagcaagaccaatgaacctgatgtttgaaacgaggataggagcaatgggggggtccagaactgcctacatgcgacctgaaaccgcacaaggtatgttcatgtcctatccagccctaaacaggcatttcagacagaggttaccatttggcgcaatacagacagggaaggggtatagaaacgaaataagcccgagacaggggatgatcaggctcagagaatttaacatggcagagttggagtactttatcgacccgaaggaccctccttctgtgaatcttgataggtggactcagaaggtaatgatggtaccagatacagaaggtcctaactcaggggagaagatggttagctttcaggaagcattcgattcaggaatagttgggcaccccacagttgcatggtttcttgcaatgacctttgagtttcttaccaaagttggaattgagtcttctaagattagattcaggcagcacgaagggaatgaaatggcccattatgcggctgattgttgggattgtgaactgaatggggagcatggttgggttgaagttgtgggcatagcaaacaggacctgtcacgatcttcaatctcacgaagagcattctggctcgaacctgcttagagggggag

SEQ ID NO: 298229 - DNA, 373 bp, Unknown
  Bacterial polypeptide expressing nucleotide sequence isolated from the Sargasso Sea
attgactgcaaaaactatggatgaattggttgcattatgcaaacgaagaggtttcatatttcaatctaatgaaatctatggtggattacagggattgtatgactacggaccgttaggtattgagctaaagaataatcttaaacaatcatggtggacatcaatggtttatgaccgtgatgatgtagaaggattagacgcatctatattaactcacccagatgttttaaaatattccggccacgaagaaacattcactgatccattagttgattgtaaaagctgtggtttaaggtttagagaagatcaaatacctgaacaatgtattggcgaggagttaactgaaccaagagattttaatttaatgtttaaaact

SEQ ID NO: 298230 - DNA, 236 bp, Unknown
  Bacterial polypeptide expressing nucleotide sequence isolated from the Sargasso Sea
tatggtttctaaaaataaaaataagaataaaaaaaaacaaaaaccaaaatttcaaacctttcaagaaactattttaaatcttcaaaaattttggagcaaacaaagatgtattattcttcatccatatgatatggaagttggagctggtacgttccatcctgctacaacccttagatcgttgggcactcaaccatggaaaactgcttatgttcgaccatcaagaagaccaacggatg

SEQ ID NO: 298231 - DNA, 202 bp, Unknown
  Bacterial polypeptide expressing nucleotide sequence isolated from the Sargasso Sea
cacttactttcagttgaaccagcattgcctttgcctgcatatgatcaatgcatgaaagcaagccatctgtttaacctgcttgatgcgcgaggtattatttctgttacggagcgtcagagttatattggcagagtaagacagcttgcaaaaggctgctgcgaggcttgggttgccaaaacagctaaaagcaattcatcatgag

SEQ ID NO: 298232 - DNA, 333 bp, Unknown
  Bacterial polypeptide expressing nucleotide sequence isolated from the Sargasso Sea
ctgccgccaacaagcgcgtgagcaacattctggccaaggtggaaggcgaactgccgactgccgtcaaaccggaactgctggtcgatgccgccgagaaggcgctggccacccaggttgcagcactgcaatccgagctgaccccgctgttcgctgccggtgactatcaggctgccctcacccgtctggccgccctgcgcgagccggtcgacaccttcttcaacgaagtcatggtgatggccgacgacgaggccctcaaggccaaccgtctggcgctgctgaacaacctgcgcaacctgttcctgcaagtggcggatatctccctgctgcagtgat

SEQ ID NO: 298233 - DNA, 454 bp, Unknown
  Bacterial polypeptide expressing nucleotide sequence isolated from the Sargasso Sea
atgagtgcacaagatttcctggtcgaactgggcaccgaagaactgccaccgaaagccctgaaaagcctcggtgaagccttccttgccggtatcgagaaaggcctcaaggccgccggcctgaactacgccgccagccgcgtatatgccgcgccgcgccgcctggccgtgctggtcgagcagcttgaagagcagcaggccgaccgcagcatgaacctcgacggcccgcccatccaggccgccttcgacgccgagggcaacccgacccaggccgccctgggctttgcccgcaagtgcggcgtgaacatcgccgagatcgaccgcagcggcgcgaaactgcgcttcgcccagcacatccccggccagccggcggtgaacctgctgccgaccatcgtgcaggactcgctgaacgacctgccgatcccgaaacgcatgcgctgggccgcgcgtcgcgacg

SEQ ID NO: 298234 - DNA, 889 bp, Unknown
  Bacterial polypeptide expressing nucleotide sequence isolated from the Sargasso Sea
cggactccctaataaagaaaatgatcgagaggttgatttgaagggccctcctctctcggttgcaaaagacgaaaataataattggactaaagcagctgaaggttttgccaagaaaaataatttttcccttaaaaatctcaaaacaaaaaaaattgaagggaaagattatatatttttacaacatcgtgaattgggacagccagtccctgaactaattcaagagaatgcaccaaaatggatttcgcagcttaattttccaaagagtatgcgctggggatcttacaggactcgatacatcaggcctattcgctgggttgtctctctatggaacagtagagtgctgccgataaaactagaaatgttagtggcaggtaaccaaacacgtggtcatcgttttttgagtactggatacagtaagataaaacatgcatcagaatatgaacagcatcttcatgatcttagagtaattgctgatttcgataaaagacgtaagtccatagtctcacaggtcaggaaactggaaaagaagcacaattgccatgtggaactagatgaaaaactacttgatgaagtcacaaatttagtagaatggcctacagttctaattggagactttgaaaatgaattcttagaactcccaaatgaagttttgataacaagcatggaagtccatcagaggtacttcccggtattcagcagcaaaaagaaaaatagttctggagacaaaaaacttcttcctaattttgtaactgtacgaaacggtgacagcaagtcactggatactgttaggcgcggcaacacaaaagttcttcgtgccaggctaaatgatgcccgttttttcttcaaagaagaccaaaaaaacatccttgatgagttcaatcataaatct

SEQ ID NO: 298235 - DNA, 441 bp, Unknown
  Bacterial polypeptide expressing nucleotide sequence isolated from the Sargasso Sea
aatggaagatcttgtatcgctgtgcaaaaggcgaggttttatatttcaatctaatgaaatctacggaggtcttcaggggttgtatgattatggacctctaggtgttgagctcaaaaataatttaaaaagggcttggtggaagtccatgatatacgatagagatgatatcgaaggtatagattcttcaattctaacaaatccgttagtcctgaaatactctggtcatgaagatacattttctgatccattgctggactgcagaagttgtaaatcaagatggcgggcagatcatgttgaagatggcaaatgtccagggtgtggttcagaagatttaactgaaccgaggccctttaatttgatgttcaaaaccaatgttggaccagtagaagatggcaattcatttgcttacctcagaccagaaacagctcaaaatatttttac

SEQ ID NO: 298236 - DNA, 523 bp, Unknown
  Bacterial polypeptide expressing nucleotide sequence isolated from the Sargasso Sea
aaacgaaagtttttctaaactagatttgagctctgaaaaaaatattagtacaactttctgcgttatttcaaatggtcttgaagaatcaaataataatattgccaaaggtaatgagaaagtattaagggcaaggttttcagatgcaaaatttttcgtagaaagtgataaaaaagttgcttcaatagaaagaaatgaaaagcttaaatctgtttcatatttaaaaggacttggaaatatatttcagagggtagaaaggatagaggaagttactaaaaaaattcttaaatttataaatgataagtctttagaagaaaaaaaaataatagaagatgctaaatactgtaaaaacgacttatgtagcgaaattgttttcgaattccctgagctgcaaggaataatgggtggtaaatatcttaaatatgagggatttaatgaggatgtttgcttggctgtcgctgaacattatttaccttctttttataaagatgctttgccctccacaaaatatggtgcaatagtttcc

SEQ ID NO: 298237 - DNA, 832 bp, Unknown
  Bacterial polypeptide expressing nucleotide sequence isolated from the Sargasso Sea
aatttacttcatgttagttttagtaaagattatcttgttatacccaaagaaattataatctccactttagagaaacatcagagatatttcccgatttttgatagtagaaatcgattaacaaattatttttttgttgtggctaataaaaaagatgaaaaaaaattaatcgcccaaggaaacaaaagagttgtcgaagctagactagcagatgccaaatttttctgggataaagatcgatctaaaaatttgattaaacaaatagctaatcttaaatctgtaactttttatgaaaaattaggaactatttatgataaaacacaaagattaagacaattagctggttcattatctgatgatttaaatatcaataaagaaaagattcaagttgcagcctctatttctaaatctgacttatgttcagacttagttggagaatatccagaacttcaaggtgtaatgggaaaatattttgcattagcacaaggatttgataaggaagtggccaattcagtaagcgatcattacttaccaattggtcttacatcggtattacccaagaagcctttcagctattctatttcaatagtagataaaatagatacgctagttggtttttttgtaattaatgaaaaacccacaagttcaaaagatccttttgctttaagaagagctgctgttggattgcttagaataattatagaaaataaattatcatttaagttaagagatttaattatttactccataagactttaccaagaacaaggtgttaaaataattaatgagaaaacagagcaagatgttctggaatttataaaggaaagaatgcgaa

SEQ ID NO: 298238 - DNA, 832 bp, Unknown
  Bacterial polypeptide expressing nucleotide sequence isolated from the Sargasso Sea
tttaagctctgaaaaaaatattagtacaactttctgcgttatttcaaatggtcttgaagaatcaaataataatattgtcaaaggtaatgagaaagtattaagggcaaggttttcagatgcgaagtttttcgtagaaagtgacaaaaaagttgcttcaatcgaaagaaatgaaaagcttaaatctgtttcatatttaaaaggacttggaaatatatttcagagggtagaaaggatagaggaagttactaaaaaaattcttaaatttttaaaagataagtctttagaagaaaaaaaaataatagaagctgctaaatactgtaaaaatgatttatgtagcgaaattgttttcgaattccctgagctgcaaggaataatgggtggtaaatatcttaaatatgagggatttagcgaggatgtttgcttggctgtcgctgaacactatttaccttctttttataaagatgctttgccctccacaaaatatggtgcaatagtttccatagcagataaggtcgaaactttaataagtatatttatttctggtaaacgtcctagtggatcatctgatccttatgctttaagaagaaatttgaatggagtgattaaaataatttgggattatgaacttgatttacctttagataaattattcaacgaacttattgatttttggaaaatcgtatttccgaatttaaacttctcaagagaaacagtatttaatgaattaaatgaatttttagttcaaagaattgttagtcatctagaagaaatatctctaagtaaagaattaataaaggccgtttgctcttctgatgaattatctcaaaaaaga

SEQ ID NO: 298239 - DNA, 925 bp, Unknown
  Bacterial polypeptide expressing nucleotide sequence isolated from the Sargasso Sea
gaaattataatatctactctagaaaagcatcaaagatattttccaatttttgataatagggataaattaataaactatttttttgttatagctaacaaaaaagatgaaaaaaaatttatttcaaatggaaataaaagagtagtagaggcaagactttcagatgccaaattcttttgggataaagataaatctaaaaatttaataaaacaaatcatcaatctcaaatcaattatattttatgaaaaacttggaacaatttatgacaaaactcaaagattaaggcagttagctggatatctttcagatgatctaaacattaacaaagaaaaagttcaagttgctgcatcaatttcaaaatctgatttatgctctgatttagttggagaataccccgagcttcaaggtataatgggaaaatattttgctttagctcaaggatttgaagaagaagttgctaattcaataagtgatcattatttacctacaggattaacttcgaggataccaaaaaaaccttttagttattcgatttcaattgtagacaaaatagatacacttgttggttttttcgttatagacgaaaagccaactagttcaaaagatccatttgctttgagaagagccgcaataggtctgttaagaattattattgaaaataaattatcgtttaagttaagagatttaattagttactctataagattatatgaggaacaaggtgtcgacattaaaaatgaaaaaacagaaaatgaagttcttgaatttatcaaggaaagaatgagaaatgttctaaaactaaaaaatattaaaactgacattatagaagcatcaattagttcacatgctggagataattttttagatttgtatgctaaaacaattttaatgaataaatacaaaaacaaaggaattggacttaatgcaa

SEQ ID NO: 298240 - DNA, 189 bp, Unknown
  Bacterial polypeptide expressing nucleotide sequence isolated from the Sargasso Sea
tggccgcaccggcgttggattgggtgctcaagtgcagccacaccttcaacctgctggaggcgcgcggggtgatctcagtgaccgagcgcactgccaccattggccgcattcgcaccctggcccgtcaggtggctgagtcgtggttggcggaacgcgaagcccttggcttccctctgctgaagggataat

SEQ ID NO: 298241 - DNA, 475 bp, Unknown
  Bacterial polypeptide expressing nucleotide sequence isolated from the Sargasso Sea
attgggctgggaagtatggtgtgatggaatggaaattactcaattcacttactttcaacaaatggctggatttgaatgtaaacctgtgtcagttgaaattacttatggtttagagagaatttgtatgttcactcaaaaagaaaaaaatgtttttgatttattgtggaatgatgaaggtgtaaaataccatgaagtttttcatcaagcagagaaagaattttcagcatataattttgaacacgcaaacgtagaaactcttttgaaaatgtttgaaatgcatgagatcgaggcaaaagctttggtagaaaaaaagatctctcttccagcgtatgatcaatgtttaaaagctagtcatgtttttaatattttagattcaagaggtgctattagtgttgctcaaagagcaggttatattgctagaataagagatattacaaaatcagtagcaagtgtttggttagatagtcaaaaataa

SEQ ID NO: 298242 - DNA, 259 bp, Unknown
  Bacterial polypeptide expressing nucleotide sequence isolated from the Sargasso Sea
atgccaactaaaaaaaaattaaaatctttatcttttcaagagataattatgaatttgcaaaagttttggggaaaatatggttgtgtaatcttgcaaccttatgatttagaagtaggagcaggaacttttcatcctgcaacaactttaagatctttaggacctaaatcttggaaagcagcttatgtgcaaccttcaagaagaccaacagatgaaaggtatggagaaaatccaaatcgattacaacattattatcagtatc

SEQ ID NO: 298243 - DNA, 820 bp, Unknown
  Bacterial polypeptide expressing nucleotide sequence isolated from the Sargasso Sea
ttgtctaaatatttacttgagataggaacagaagagttacccgcaaaattttctcattctgttctagagcaatttaaatctttaatagaatttgaattggataaaaagttaatcaaattcgaacatatagttgttacctccacaccaaggcggatagttctacttctcgaaggattagttgattatgcagaagataagataatagaaagaaaagggcctaaagcaaattcagcttatttaaatggatgtcctactaatgctgctttaggatttgctaatagcttagatatagatgtaggtgagctagaaataaaaaatacagaaaagggtgattttgtattcggaaagaaaattgagaaaggacattcaacaaaaatttctttatcttcgattattccaaaattagtaaagagtattcaaggtcctcgatttatgaaatggggggctgggaacataaaattctcaagacctattaggtggattgcctcaatttataatgatgaaattcttgattttgaatttgatgaatgtgatccaaagatcaaaataagtaataaaacaaaaagtcataggctaatcaataaagttttagaagttcagactcctgatgatttctttgaattattgaaaagaaatagagtaatagctatccgaaaagaaagaaaagagaaaattgaaaaattaataaatcaggcatctaaatctttaaatctgaaacctgacctttcagaaggattactaaatgaactaactgatttagttgaatggccagacttaattattggcaaatttagtgatgaatttcttgatcttccggttg

SEQ ID NO: 298244 - DNA, 760 bp, Unknown
  Bacterial polypeptide expressing nucleotide sequence isolated from the Sargasso Sea
atgcgcgcgcctacgccgaccacgcccgtgtcgaccgccgtcgcgctcgccgacaagctcgagacgatcgtcggcatctggggcatcggcctcgcgccgaccggcgaaaaggatccgttcgcgctgcgccgccacgcgctcggcgtgctgcgcctgctgctcgagaagcagctgccgctcgatctcgtgtcgctgctgcgcacggcccatgcacgcttcgaaggcgtgccgggcgtggccgaatcgaccgatgcgatcctcgcgttcttcatggatcgcctgcgcggcctgctgcgcgagcgcggctattcggccggcgaagtcgacgcggtgctgagcctgaacccgacgcgcgtcgacgatctcgtcgcgcgcctcgacgcggtgcgcgaattcacgcgcctcgcggaagccgaagcgctcgcggccgcgaacaagcggatctcgaacatcctgaagaagtcggaaggcggcgcgaacggcacggtgcaaccgacgctgctcgtcgaggccgccgagaaggcgctgcacgaacagctcgcggccgtgacgccgcacgtgcagtcgcagctcgaggcgcgtgcgtacacgggcgcgctgtcggcgctcgccgcgctgcgcgcaccggtcgacacgttcttcaacgacgtgatggtcaacgcggaagatccggcactgcgcgcgaaccgtctcgcgctgctgtccgcgctgcaccagcagatgaactgcgtcgccgacatctcgaagctcgccgcataag

SEQ ID NO: 298245 - DNA, 749 bp, Unknown
  Bacterial polypeptide expressing nucleotide sequence isolated from the Sargasso Sea
cgatgaagaatggcatgacaaatgggtggaattaaggcttgcttggtgggaggctcaaggagtccccaaagaaaaaataaagcttttggatgtaaaaggagaagagctggctcattattcaaaaaaaacagttgatttgatgtatgaatttccgcatggcttggaagaattagagggagttgctaatcgaactgattttgatctcggatcacatagcaaaaatcaagaagaattagaaattaaagcaaaagtagcaaaaaatagctcatctaatgcaaaactagccattcaagagctagattccaacaaatgggtagttccgtttgtaattgaaccttctgcaggagtagaaagggcgtttttggctattttaaacgaagcctacaaagaagaagagcttaatgatggtaaaacaagggttttattgtctttaaagcctcatttggcgccaataaaggctgctgtgataccgcttaagaaaaataacaaagatttagtagatttggcctatgaacttaaaaatcagttacaaagcatgaaattgggaagagttgtggtcgaaaatacaggcaatattggtaaaagttacagaaaacatgatgaaattggaactcctgtctgtattacagtagattttgacagcttggaaaaaaataaagttactttgagagaccgtgacgatatgagtcaggaaactctagacataaaggagatttcttctttttttcagcaaaagatctctagttaat

SEQ ID NO: 298246 - DNA, 762 bp, Unknown
  Bacterial polypeptide expressing nucleotide sequence isolated from the Sargasso Sea
cctgcttgaaatcggtctggaagaaatgccggcgggaatgatcttacccgctgtggaacagttaaaaaaagcggcagaaaagagcctggaatcaaaccagttgcaatcggcaacggtactaccgctttcttctccaagaagactggcgttgctcatttccgaacttcctgaaaaacaggaggatcgggttgaggaacttaaagggcctcctgcttctatcgcaagagatcaggatggtgcgtggagtaaagcggcactaggttttgccaaaaagaacggaatagagccagattcccttgaagtaagaaattttgacgggcgtgattatctttataccgcaaaaaatgttcagggggcttctctgaaagatatcctgaagcaggaagcgcctgaatggatcaaggggctgaattttccaaaaaacatgcgttggggacattataagatgcggtttgcaagacccatccggtggctggtttcactttggaatcaggaagtaatccatttttccctggaaatggtcaaagctggaaaacataccctcggacatcgttttctgtccccgaaacaaagtgaacttctccatgctcaggattatcattctcaccttcataatcattttgtggaagctgacttcaacattcgtaggaatgaaatcctttcacaaatcaaggaattggaatccaaacatgactgcaaggttgagatcgcggatgaccttcttgaggaggtgaccaatcttgtcgaatggccaaaagcgat

SEQ ID NO: 298247 - DNA, 179 bp, Unknown
  Bacterial polypeptide expressing nucleotide sequence isolated from the Sargasso Sea
tatggtctctaaaaaaaaaaaaaatacaaagcttaaatttcactcatttcaagatacaattttgaatttacaaaaatattggagtaaatatggttgtgttattttacaaccttatgatatggaagtaggagcaggaacatttcatcctgcaaccactttaaaatctttagggactaaac

SEQ ID NO: 298248 - DNA, 787 bp, Unknown
  Bacterial polypeptide expressing nucleotide sequence isolated from the Sargasso Sea
ttacaaacctaagggtgtttctgatgatttaccaaaaacaaaacttggatctttaatatcacttgttgataagatagatactgtggtaggtttcttcctgattgacaaaaaacctactggttctaaagatccattcgctctaagaagaaatgggttttcaattgctcaaatcttaattaatttgaaacttaatatgtcattacatgaggttattgaaccatctatgaaagaatatggttgttcttcacattcaataaaactaagcctgattgattttatgattgataaattaaaatttgtactttctaatctaaataatagagttgacgtaattaattcagttttaaatacaaaaattgtgaatgatatttcagtaaaagtaatttcaactagaattaaaagtataattagatttactaaaaatgatgattttaaaatctttttaacaaattataaacgtttaaataatattcttaaaaatgaaaagtttttaaataataccgcatccaaggtaaatataaaattttttaacactattgaagaagaaaatatttacaatctgactgaattattttcaaaagaaattataaaaaagggtaattgtgacaaatcgcaggatacactagttaatagcttaattaaaatgaatgtaccaatttcattattttttgataaagttattgttaatcacaatgatcgtaatgttaaaattaatagattaagtttattaaaaaacttgcatagtttgattttaaaattttcagtttttgagttaattgaaagttaa

SEQ ID NO: 298249 - DNA, 301 bp, Unknown
  Bacterial polypeptide expressing nucleotide sequence isolated from the Sargasso Sea
caatcttgcccctttagaaaaaacaatctggaaatagtcaataaagcaaaaaatttaaaggccactctccagaaactagggcttggaaaaatcacttacgaagatacgggaaacatcggaaaaggatatcgacgccacgacgaaattggcacgcccttttgctttaccgtcgactttcaaacgatcgaggaagattcatcagttacagcacgaaacagggataccatggagcaagagcgagttaatattgagaatctgcctacctacttggcttctaagttgaaacctcaggataagtgat

SEQ ID NO: 298250 - DNA, 853 bp, Unknown
  Bacterial polypeptide expressing nucleotide sequence isolated from the Sargasso Sea
caaagaaaaagtagaattatcagcatcgataagcaaagtagacttgttatctgaattggttggtgaatttccagaacttcaagggattatgggaggttattttgcaaatgtgcaaggttttgataaagaattatcacttgctgttagtgagcaatatttacccgttggatctggaacaaaaattccaaaaaaaccttatagcattgctttatctttagctgacaagattgatactttagttggtttttttggtgtaaaccaaaaaccaacaagttctaaggatccttttgccttaagaagattagcattagggattgttagaattatcattgaaaataaaaaagattttaaaattagagatttaataaattattcttcaagtttgtatcaggatcaaggatttgaatttgagaataaatctttacaaaaagaattactagattttttgttagagaggttgaaatattatatgaaggaggaaaatatccgaaaagatataatacaagcttcaataatttcttttaacttagatcaatctgtaatcatttttaataaagcaaaaaatttaaataaaataataaataaacaaaacggaatagatattattgcaagctacaaaagagcatcaaatattttagaaagtgagttaaaaaaagataaaatcgaattatctaatacaaccgaccctggtatttttaaaactgagcttgaaaaaaatttatttaaaaaaattaatgaattgaggaaatatttttcaagtattaataatgatgaaaattttgttcaaacactggacaatttagcaagtattaaaagaaaggtatttgatttttttgataatgtaattgttaat

SEQ ID NO: 298251 - DNA, 376 bp, Unknown
  Bacterial polypeptide expressing nucleotide sequence isolated from the Sargasso Sea
gtttatccaaaagtggataatgtatatgatctggattgggatggtatagaaaaaaaagagggtggaaagacctatggtgatatttttctacaacaggaaaaagagttctctgtttataattttgaaaagtcaaattcatctatcttactgcaacattttaatgacgctgaaaaagaatgtgaactattgttaaaagataaaattaatcctttgtcattaccagcttatcatcactgtattagagctagtcatatttttaatcttttggatgcaaggggagttatctctgtttcagaaaggcaagcatacatattaagggtaagaaatatgtcaaggtcttgttgtctagcttatatgggtaaattatatgagtgac

SEQ ID NO: 298252 - DNA, 733 bp, Unknown
  Bacterial polypeptide expressing nucleotide sequence isolated from the Sargasso Sea
aatgaaaaaagcaatactttttgaaattggtacagaagaattacccgcaactcaaatcaagaacataactaaatctttgtacgagtcattatcacaaaaacttgaacaaaacgaattttactttgaatcaaaaaaagttttctctacacctaggcgactcgcagttatcttttataacattaaagatacaacgacagaaaaagaactagtcaaaaaggggccaaaattatctgactcttttaagagcagtgggcaacctactaacgttggaaatggtttcgctaaatccgtcaaccaacacattgaagaattaatcacaatcggttctggacccgatgctcggctagctgctaaaactaaaattaaatctgcagtactcaaagagcaagcaccgtctattttagaatcatgcttatctcagattcaaaatgcgaagggaatgttttggggggctggaactctaaaattcgcgagacctataagatgggtgactatcataattgatgacgaagttgcagatgggcatatatttaatttaaagatctcaaactattcacgtggccaccgtgttttagggcaaaataaaataaaaattccatctgcagtacagtaccccgaactgttagaaaaaaataaagtaattgtagacagagatcgaagaaaaaaaattataatcgaacaaattcaagaaatagccaagaccgaaatgtgtcgtcctttaaaggcagagcct

SEQ ID NO: 298253 - DNA, 148 bp, Unknown
  Bacterial polypeptide expressing nucleotide sequence isolated from the Sargasso Sea
actagatgctcgtaaagccatctcagtaactgaaaggcaaaactatattcttaggattagaaaaatggcgcagaatgttgctgaattatttctcgagaaacgaaaaaatttaaactatccattactagataagccttcggaaaaatga

SEQ ID NO: 298254 - DNA, 175 bp, Unknown
  Bacterial polypeptide expressing nucleotide sequence isolated from the Sargasso Sea
tatgttcagctcttcaagaagaccgacagatggaagatatggagataatccaaatagacttcagcattattatcaatttcaagtaattataaaaccatctccgtccaatataaaaaaactatacttaaatagtttatcattaattggtattgatcataaaaatcagatatcagat

SEQ ID NO: 298255 - DNA, 175 bp, Unknown
  Bacterial polypeptide expressing nucleotide sequence isolated from the Sargasso Sea
atggtctctaaaaatagtaaaaaaaaagcaaagtttcaaacttttcaggatacaattttaaatttacaaaagttttggagcaaacaaggttgtataattttacagccttatgatatggaggttggagctggaacatttcatcccgcaacctaccctaagatctcttggacctaaa

SEQ ID NO: 298256 - DNA, 481 bp, Unknown
  Bacterial polypeptide expressing nucleotide sequence isolated from the Sargasso Sea
ttggtttcattatgcaaaagaagaggatttattttccaaagttcagaaatatacggcggactttctagtgtatgggactatgggcctgtaggatcagaattgaaaagaaatgttaagaatgcttggtggaaaaatatggtatcagaccaagaaaatattgtcgggatagatgcttcaattttgatgcacccaaatgtttggaaagcatcgggacacttagagaatttctcagatccattagtagaatgctctgtaacaggaaaaagatatcgagaggatcatattttcatcttagaactgaaatcaaataataaaaataaaatagtatctattgaagccggagatatagatgaagcaaaaaaaataactaaagaaaaaatcatatcaatcactcctctttctcaaagtaatctagaagaaaatccttctccaaatggtgggattttgtctgagccaagacaatttaatctcatgttcaaga

SEQ ID NO: 298257 - DNA, 700 bp, Unknown
  Bacterial polypeptide expressing nucleotide sequence isolated from the Sargasso Sea
acgtccaggagacgacgatgaatggcataagagctgggtaaaatctagagttcagtggtggaaagatcaaggtatttctgacaaaagtctagagctttatgatgttcctgctgatgagctcgctcactattcaaaagcgacagtggatattatgtacaaatttcctcatggtgtagaagaattagaaggcatagccaatagaactgattttgatttaggctcgcactcaaaaagccaaaaagaattaaacattaaggcaaaagttttagaaaacaatgaatctaattccaaattagctcttcaagatgaaaataataattggtttgtgccatttgttattgagccttctgctggagttgatagaggtgtgctggcaattttaaatgaagcatattttgtagaagaaattgaaggaaaagagcgtgtagttcttaaactaaaacctcatctagccccaattaaagcggccgttatgcctctaaagaaaaacgatgaaaaaattgtagctcttgcaaaaaaggtaaaagatgaattgcaaaaattaggtttaggcagaattctttttgaaaacagtggcaatatcggtaaaaattatcgcagacatgacgaagttgggacgcctgtttgtattactgttgattttgagtcgcttgacaaccaaactgttactgttcgagatcgtgacagcatgaaacaagaa

SEQ ID NO: 298258 - DNA, 888 bp, Unknown
  Bacterial polypeptide expressing nucleotide sequence isolated from the Sargasso Sea
agacgaccataataactggaccaaagctgctgaagggtttgccaggaaaaacaatgtctcccttaaaaatctggaaacgaaaataatcggaggaaaagactatctgtttgtacaaaagcgaaagttgggacagcccgtccctgaactacttcaagaaagtgtacaacaatggatttctcagctcaatttcccaaaaaatatgcgctggggatcttacaagacgcgttacatacggcctatccgctgggttgtttctctttggaacagtaaagtggtgccgataaaactggaaatgctggtctcaggtaatcaaacacggggtcatcgttttttgagtactggatacagcaagataaaacatgcatcagattatgaacagcatctacacgatctgaaagtaattgctgatttcgagaaaagacgtcagtccatagtcacacaggtcagaaaactggaaaagaagcacgattgccatattgaacttgatgaaaatctgcttaatgaagtaacaaatttagtggaatggcccacagttctaattggaaattttgaaaaggaattcctggaactcccggatgaagtgttgattaccagtatggaggttcatcagcgctactttccagtattcagcagcaaaaagaaaaaaaattcaggagaaaaaaaactgcttcctaattttgtaactgtgcgaaacggtgataaaaagtcactggatactgttagacgtggcaactcaaaggtgcttcgtgccaggcttagtgatgcccgttttttttatcaggaagaccaaaaaagtacgcttgatgagttcagtaagaaagctgaaaaagttgtgtttttccaatccaggggttcacagcatcaaagggttcatcgcataactcaact

SEQ ID NO: 298259 - DNA, 712 bp, Unknown
  Bacterial polypeptide expressing nucleotide sequence isolated from the Sargasso Sea
ttggctgataagattgacttgataacaaatttttgggcgattaacttaaaaccaaccggtagtaaagacccgtatgcgctcaggcgagcttcaattggtgtaatacgaattatattagaaagaggtttggatgtatctctcttgagccttgtaaatttgggaaatgaagatattgacttgccggaccttattaagtttttcaaagaaagggtccgtgtccactttattgagaagggaattcaaaatgatataatatcagcatgttttgcagtatcaggccaagattttaaaatcttggatctttacgagagggcgttagcaatttctgaatttgttaatactgagctaggacgagatttggtacaaacgtataaaagagccaataatatattaacactcgaagaacgaaaggatggcgttgaatattctttagacccgcagttgcaattaatgaaggaggaaccagagcggacgttattcaatcatctgatggttatagacaatgacatagaacgtgaattaaaagaaaaaaatttcaaagaagggttgcggaaactggcactgctaaaaagttcgttagacccattttttgccaacataaagataaatgcaaaaaattctataatccggcgaaatagattatgcttattaaatcgaattagggaagttatgcacaaaatagcaaatattgctcatataagtgaagattgaa

SEQ ID NO: 298260 - DNA, 139 bp, Unknown
  Bacterial polypeptide expressing nucleotide sequence isolated from the Sargasso Sea
gatgcacgacacgctatctctgttactgagcgccagcgctatattcttcgcgtaagaacgctcgctaaagcgtgtgcagaaagttattaccaagcgcgtgaagcactacgcttcccactatgtaacaaggaggcataag

SEQ ID NO: 298261 - DNA, 445 bp, Unknown
  Bacterial polypeptide expressing nucleotide sequence isolated from the Sargasso Sea
atgcctgcaacaaatattgaagatctaatatccctttgtaaaagaagaggctttatattccaatccagtgaaatatatggtggtactcagggtttatatgactatggtcctttaggtgtcgaattaaaaaataatataaaaaattcttggtggaaatcagtcgtgtatgagcgtgatgatgttgaaggacttgatgcagcaatactcacaaagcaatcagtactaatgtattctggtcatgaagaaacttttactgatccattagtggattgtaaatcctgtggtgaaagatttagagctgatcaggtccctgattattgtaaaaaagaggatttaactgaacctcgtcaatttaatttgatgtttaaaacaaatataggtccagttgacgatggtaaaacaaatgcctacctaaggcctgaaactgctcaacaaatttttataa

SEQ ID NO: 298262 - DNA, 1730 bp, Unknown
  Bacterial polypeptide expressing nucleotide sequence isolated from the Sargasso Sea
aatgtctgaatttttcttagaattatttagtgaggaaataccttcaaacttacaaaaaaatttaagagaaaatttactaaaaagttttaatgaattttttttagaaaaatctattaaatttaaaaaaaattcatcttactcaacacccaataggttgttaattttgtttgagggaattgaaaagaagatagttttaaaatctgaggaaataaaaggcccaaatacaaagtctccagatgctgcgttagagggatttgcaagatctaatggtgtttcaaaaaaagaattgtttataaaaaaaacagataaaggtgagttctatttttacaaaactagatcaaaaaaattagacacacacacactattagaagaagccatacctcaaatactgagtagaattcaatggaaaaagtcaatgaaatggtcaaattacgaactattttggggtaggccattaaaatctatcttatccatttttgataaaaaaaaacttaattttaaatttcatcattttgtttcatcaaactcgacatttgttgataaagaatttgaagaaaagaaaaaaccattttcagattttaaatcttataaaaatttttttaaaaaaatggatatagttatcgatcacaatgagagaaaagatttaattgaaaaaaaatttgatattattttaaaaaaaagaaatatatttattgatagtaatccaaatcttcttcaggaggtaattgatttaaccgatcaacccaatgtaattgtttgtgaatttgataaaaaatttttaaatatacctaaagagattttaatactaaccatgcaacatcaccaaaagtattttcctacttttgataaaaaaggaaacattacaaatcaatttttggtagtagcaaacaataaagataaaaaaggattaattaaattaggaaatgaaagagtagttgaagcaagattaagtgatgcagaatttttctggcagaaagataaagctcaaaacatggtcaaaaaaatttctgatttgaaattaatgaattatttcaaaggtcttggaaattattttgataaagctcaaagaatgagaaagcttggtgctattatttctgatgaattattaattagcaaagaaaaagtagaattatcggcatcgataagcaaagtagacttgttatctgaattggttggtgaatttccagaactacaagggattatgggaggttattttgcaaatgtgcaagggtttgataaagaattatcacttgctattagtgaacaatatttaccagttggatctggaacaaaaatcccaaaaaaaccttatagtattgctttatcattaactgataagattgatactttagttggattttttggtgtaaatcaaaaaccaacaagttccaaggatccttttgccttaagaagattggcactagcgattgttagaattattattgaaaataaaaaagatttcaaaattagagatttaataaattattcttcaagtttgtatcaggatcaaggatttgaatttgagaataaatctttacaaaaagaattactagattttcttttagagaggttgaaatattatatgaaggaggaaactatccgaaatgatataatacaagcttcaataagttccttaaacttagatcaatcagtaattattttttataaagcaaaaaatttaaataaaataatcaataaacaaaacggaatagatataattgcaagctata

SEQ ID NO: 298263 - DNA, 1315 bp, Unknown
  Bacterial polypeptide expressing nucleotide sequence isolated from the Sargasso Sea
attgaactttcttattctgatataattactttttcgtcaccgagaaggctaacaatcttgataaaaggggtccaagataaggctaaaacaattagggaagagaaacgtggaccaagggaaagtcttccagaaaaagcgctcagcggttttttaagtgcaaataatgtaaagaaaaaagatctaataattagggatattaagggaataaaatattattttttggtaaaagaaattgaggggaaagagaattctaaggttttagcagatatttctgtgcaattaattagagactttaggtggaaaaaatcaatgagatggggttccagtcgccttaggtgggttcggcctcttaaatctattttggcgcttaaatattctgataagaaagtaactgaagttgtcaattttcaaattaatggtataaaatctggaggcaaaacggtgggtcataggtttatgagcccagaaccgtttatggttaggaatttcgatgaatacatagaagccttgaaggccaattttgttgaattagatcataaaaagcgtgaagagaaaatttcaaaccaattagaaaatttggcaaaaaatgaaggcttagaggttgttaaagatgaaaagcttattgaggaagtaagtgggttagttgaatggcccgtagctcttatcggaaatatagaaaaaagttttttggatttgcctgcagaaattcttcagatggttatgaaaacacatcaaaagtacttttctgtaaaagataataagactggcaaaatagttaagtatattaccgtggcaaatattgtatcaaaggacaatggggagaaaattttagctggaaataatagagttttaaattctagattgtcagatgcaagttttttttggaaaatagacaaggaccgaattgtaaaatctggttttgaaggttttgcaaaagatttagagtttgtgactttttttaaaggattagggacacaagctagtagggttacaagactaaagaaaattgcccgccgaatgaataagaatctttacaatctatcagatagggaaatcaatttagctgcaggggtatgtaaggcagatttggtgtcgagtacagttaacgagtttccagagttacagggccttttaggaagttacttttccaaaatgtctggttatccagataatgtaagctgggcttgtaaagatcattatcgtcccatggggccgcatgatcaagtccctactaagcctttatcagttacgattgcattggcggacaaaatagatttgttggcgagcttttggtctattaataaaaaacctacag

SEQ ID NO: 298264 - DNA, 469 bp, Unknown
  Bacterial polypeptide expressing nucleotide sequence isolated from the Sargasso Sea
gaggtttggtgtgatggaatggaaataactcaatttacttactttcaaaaaatgactggtatagattgcaaaccaatttctgttgagcttacttatggcttggaaagaatttctatgtttgttcaaggtaaaaaaagtgtttacgatatagattggaacaatgaaggcgttaaatatggggacgtctatcttcaatcagaaaaagaattttcagcctataattttgatcatgccaacacagagtatttgttaaaaatttttgaaattgcagaaaaagaaagccaatctttgctagaaaaaaaacttcctcttcccgcttatgaccagtgcttaaaagcaagtcacgcattcaatttattggacgcaagaggtgtcatcggagtagctgaaagaacaggatatattaatagaatcagagatttggcaaagggagctgggtctaaatggttggaaaaccaagaacagtaaa

SEQ ID NO: 298265 - DNA, 353 bp, Unknown
  Bacterial polypeptide expressing nucleotide sequence isolated from the Sargasso Sea
ttatcatctagactgggacggattagataaaaataaaggtggaaaaacttatggagatatttttttgcaacaagaaaaagaattttcaatttataattttgaaaagtcagattcatctgttttgattcaacattttaatgatgctgaaaaagaatgttcatttttactagaagataaaattaatcctttaccacttcccgcatatgaccattgtattaaagcaagtcatatttttaatctattggacgcaaggggtgttatctctgtttcagaaagacaagcatacatattaagggtaagaaatatgtcaagatcatgttgtttagcttggatgaacaaatcaaatgtctaat

SEQ ID NO: 298266 - DNA, 453 bp, Unknown
  Bacterial polypeptide expressing nucleotide sequence isolated from the Sargasso Sea
gaattacacagtttacttatttccagcaaatggcaggaattgaatgtaaacctatttcagtagaattaacctatggactagaaagactttgcatgtttactcaaggaaaaaaaaatgtttttgatcttgaatggaataatgaaggaataaagtacagggatgtttttcatgaagctgaaaaagaattttcagcttataattttgaatttgctaacacagaaagtttgttgaaaaattttggaatagcagaatctgagtgtaaatcattgttagagaaaaaacttgctttgccagcttatgatcaatgtttaaaggcaagtcatatttttaatcttttagatgcgagaggagtcataggagttgcgcaaagaactgaatatatctctaggattagagaattagcaaagggttctgggcaaacttggttagaaaatcaaaataataatggctgaa

SEQ ID NO: 298267 - DNA, 1661 bp, Unknown
  Bacterial polypeptide expressing nucleotide sequence isolated from the Sargasso Sea
tttgaactggaaaaagtcaatgaaatggtctgatagcaatttaatatggggaagacctttaagatctatactggcaatatacaacaaaaaacttttaccctttcattatggacatttgagatctacagaaacagttataatagaacaagatataatcaacaagtataaaaaagttaaaaacttttctgagtatcaaagttttttaaaaagcaatgaaattatactagaccatgatgagagaaaaacaaaaatattaaaaagatttgaagctgtatgtaaatctaaaaattttaaagagtcttttaacaatcgccttttagaagaggttacaaatatagtagataacccaaacattctagttgaggaatttaataaagattatttgaaaattcctcaagaaataattatctcaacattggaaaatcaacaaaaatattttcctcttttcaataaaaaagatgaacttacaaataattttttaattgtagctaataaagttgataaaaaaaatttaattaaaaagggaaataaaaaagtcgtggaagctagattatcagacgctaaatttttttgggataaagataaatctaaaaatttaataaaacagatcggaaaactaaaaaccattacattttatgataggctcggaacaatttatgataaaacacaaagactaagaaaattagcctcggtagtttcagaccaactaaatattaataaagaaaaaatagaagtagcagcctcaatttctaaatctgatttatgttcagatctcgttggtgaatatcctgagttacagggaactatgggaaagcattttgctctatcacaggggtttgagttggatgtcgctaattcgataagtgagcactatcttccaattggattaacttcatccgttccaaaaaaaccaataagctattcaatatcaattgtagatagattagatactttagtaggatttttttcaatcaatgaaaagccaactagttcaaaagatccatttgctttaagaagatctgctattggtttacttagaattttagttgaaaataaattaagtcttaaacttagagatcttataaattattcagttacgttatttcgagatcaaggagtaaaaatagaaaatgaaaataccgagagagaaatattagatttttttaaggaaagaatgagaaatatattaaaagaaaaaaatattaaaaatgatataatcgaagcatctataagctcacatactggagataactatttagaccttttaaaaaaaagcgtgctaatgaacagatatattaataaggatatcggaaaaaatgcaatttactcctataaaagagcgtcaaatatacttgatagcgaaaaaaaagaaatttttggtaaaccggacgcagttctttttagaaaagatgaagaaaaaagtctttttgaaaaaattaatgaaatacgaaaggcttttactgttgaagaagatgataaaaactacgaaaatctattaattcaactatctgaaataaaaagttataccgataatttttttgataatgttgtggtaaatgacgagaatcgtgatattaaaaataatcgattagaattattaaaaatgttttgtaaaacatttaatagttttatagatttttcaaaattagaaggtgcataat

SEQ ID NO: 298268 - DNA, 2074 bp, Unknown
  Bacterial polypeptide expressing nucleotide sequence isolated from the Sargasso Sea
atggcagaattctttttagagttatttagtgaggaaatcccagcaggtcttcaaaaaaacttgcgaaataaacttttagaagaatttcaaaaattttttttagaaaaatcaattaaatcaaaaaaatgtttttcattatctacacctaatagattaataatagtttttgaaaatttagataaacaaatcaaaataccctctgaaaaaataagaggtccaaaaaccagtgctcctgaagaagcattggaaggttttataaggtcaaacaatatagaaagaaaagatctatttaaaaatgaaactgaaaaaggtgagttttatttttataaaacaaaatctaaatcattaaaaacaagtgatttattgattgggtttattcctaaattacttgaaaattaccaatggaaaaaatcaatgaaatggggagaatttgatctcaattggggaagacctttaaaatcaatattgtcagtatttgatagaaaaacacttaattttaaatttcatcatttatcatcttcaaattctacctatatagataaagatttggaggaaaaaaaaaagagttttacagactttagatcctatgaaaaatattttaaaaaacaaggatcacttgtagatcaagataaaaggaaagagttcataaaaagagaatttttaaaaatacttaataaaagaaaactaactatcaaagataacccaagattatttgatgaagtaataaatattgtagataatccaaatgttttattgtgtagctttaataaaagatttttatctattccaaaagagattttaactttaaccatgcaatcttatcaaaaatactttccaacctttgataataatggtgtgattacgaatgaatttttaattgtttcaaacaaaaaagatcaaaaaggactgataaagattggaaatgagagagttattgaggcaaggcttagtgatgcagaatttttttggaataaagacaaatctcaaaatttagtaaaaaaaatatctgaattaaaattaatgaatttttttaaaggattaggaacatattttgataaagttcaacgattgagaaaattgggtggaattatttctgatgaattgttgattagtaaagaaaaagtagagttgtcagcttcaatttgtaaaacagatttaacctctgatttagttggagaatttcctgagctccaaggaattatgggtggatattttgcattacatcaaggttttgatacagatatttcattggcaataactgaacaatatttaccaattggtttggatactcaaatttccaaaaaaccttttagtgttgctttatctgtttcagataaaatagacactttagttggtttttttggaattaatgaaaaaccaacaagttcaaaagatccatttgcattaagacgaactgcacttggtattattagaacaataattgaaaataaaaaaaattttaaagtaaatgatctattgagctattcttcaagcttatatcaagatcaagggtataatctaaataatcaaaatttacaaaaagaattacacaattttttaaaagatagatttagatattacatgaaagaaaaaaaaatccgtcttgacataattgaggctactatctcttctttttcgctaaataatttattctcatcttatgaaaaagcgaaccgactaaataatattattaataaccaacaaggaatagatattatctcaagttataaaagagcatcaaatatattagacaatgaattgaaaaatagtgaaatagaaatgaccaatacaactgatcctggtatttttaaaacagatattgagaaaaatttatataaaaagattaatgagattaaaaaatactattcaaatattaataacgatgaaaactatgaacaatcattaacgattttggcaggtgcaaagaaagatattttcgaattttttgacaatgtcaaagtaaatgaagaaaatgaaactttacgaaaaaacagattggaacttattaatatgttatgtaaaacatttcaaaattttataaactttcaattattgaaaattaataatgaataaa

SEQ ID NO: 298269 - DNA, 1573 bp, Unknown
  Bacterial polypeptide expressing nucleotide sequence isolated from the Sargasso Sea
aatgtctgagttttttttagaactatttagcgaggaaatacctgcgggtcttcaaaaaaatttaagggaaaatttattgaaatcttttaatgatttatttgaagagaaatttatttcatttaaaagaagttcttcttattcaacgccaaatagattggtaatattatttgaggggcttcaaaaacaaacaattctaaagtctgaggaaatcaaaggtcccagcacaaaagcaccagatctagctatagagggctttatacgatcaaatcaaattttaaaacaaaatctttatgaaaaagaaacagaaaaaggtaaatttttcttctttaaaacaaaatcaaaaaaactttatacccacgagttattagaagagtttgtaccaaaaatattaaataaaattcaatggaaaaaatcaatgcgctggggggattttggtttaaattggggtagaccactaaagtctattttggcaatatttaataaaaaaacactaatatttaagtttcatcatattcagtcatctaatttaacttttgtagataaagattttgaagaaaagaaaataaaattttctgattttaagaaatataaaaatttctttaaaaagaaaaaaataataattgaccctgttgaaagaaaaaaaattattgaaaaaaaatttcatttacttttaaaaaagaaaaatattgttattgatcaaaatccaaagctattggaagaagttgttgatttaatagatcagcccaatgttcttgtttgtcagtttgataaaaaatttttaaaaatacccaaagagattttaataattaccatgcaataccatcaaaaatattttcctacttttgataaaaaggggagtattacgaacgaatttttagttgtttcaaacaaaaaagatttaaaagggttaataaagctaggtaacgagagagtagtagaagcaagacttactgatgcaaaattcttttggcaaaaagacaaatctcaaaacctcgtaaaacaagtctcaaatttaaaatcgatgaattattttaaaggtttgggaagttattttgataaagttcaaagaatgagaaagcttggaggaatgctttcagatgaactattaataagtaaagaaaaagtagaattatcagcatcaatctctaaagtcgatttattatctgaacttgtgggtgagtttcctgagcttcaagggataatgggtggttatttttctgaggcacaaggttttgataaggatgtagcactatcaataagcgaacaatatttaccttcagggtctgggtctaaggttcccaaaaaaccttttagtattgcactagctctatctgacaaaatagatacgcttgtaggcttttttggaattaaccaaaagccatcaagctctaaagacccgtttgctcttagaagattaactttaggagtaattagaataattgttgaaaataaaaatcatattaaaataagagatttgattaaatattcagcttcactttatatagatcaaggcttcaaatttgaaaataaacttcttcaaaaagaactttctgaatttctaatggaccgacta

SEQ ID NO: 298270 - DNA, 1459 bp, Unknown
  Bacterial polypeptide expressing nucleotide sequence isolated from the Sargasso Sea
atgaattacgaaagtgtcatgaaacttgcattggaaagagcattttactttccaagttgtgaggtttatggagatgctcaagcaggtttttgggaatatggtccaacaggtgttagtgtaaaaaacaagtttcttgaattatggcgaagagagttagtacgaagagacagaatgcttgagattgatggttcacagataatgtcaaaatcagtatttgaggcatcaggtcatcttggaaactttgcagacccaatcataaaatgtaaaaaatgtgggttaacatttagagctgataaattaatttctgaaattgctaatgtagaaattccagaaagtgcagatttagaagactttgataaaatgattcaagaaaaaaatattgtttgtacaaagtgcaaaggagaatttgaatctgcaaaaaaatttaacatgatgtttagagtaggaattggtcctgaagatgaagaagcatatctcagaccagaaacatgtcaatcaatatttgttgatttcccaagattattcaaaactatgcgtggaaagcttcctttaggaattgcacaggtaggaaagagtttccgaaatgagatcgcacctagacaaagtcttttgagattaagagagttttatcaagcagaaatagaggttttttgtaatccaggaaaattaaatgagttagaaaagttttcagaaattgaaaatactacactacgaattcaaatttcagatgatattcaagtgatgacatgtaaagaagcagtagagaaaggagttattccaaacaagtttgttgcatattatcttggactgttaacagaattttatgaaaaaacaggaattgatatggagaaaagtagattcagaaagcttggagaaaaagaaaaagcgttctatgcggatgttgcatttgattttgaagtaaatactacaattggatggttagaacttgttgcatgtaactatagatcagattatgatttatcaagtcacgcaaagaaaagtaaagaaaaatttgaggttatggacaatgatgaaaaagttttgccacatgtatttgaaatatcaatgggcattgacagaagtctttacacaattttagaacattcactaaaagaagataaagaaaatgagagaatggttttatcaatcaagccatatttagctccaacacatgtaggagttttatcattggtgaaaaaagatggactttctgaaaaaactgatgagatttaccgtctaattagaacaaaatttgattcatttttagatcattcaggtgcaattggacgaagatacagaagattagacgagattggagcaccatttgcaataactgtagaccatcaaacaaaagaagacaatacggttaccattcgtaggagagacgacatggctcaggaacgcgtcaatatttcagaattagagtcaattcttgcaaaagaaacagcatatccataag

SEQ ID NO: 298271 - DNA, 549 bp, Unknown
  Bacterial polypeptide expressing nucleotide sequence isolated from the Sargasso Sea
ttgacttaggatcacactctaaaaaacaaaatgaactaaatataaaatctaaggtcacagttaataaggattctaatagtaagcttgccgttcaagatgacaatggagattgggttgttccttttgttattgagccttctgctggagttgaaaggggttttctagcaattttaaatgaagcatatacaaatgaaaagcttgaagatggtaaaactagaatagtcttaaaactgaaacctcatctttccccaataaaggcagctgtaattccccttaagaagaacaatgaggagcttgttagtaaagccaaaaaaataaaagaagacctacaaattattggcttaggacgaatttttctcgaaaatacaggtaatattggaaagggatacagaagacatgatgaaattggtaccccggtttgtattacagtagactttgagtcactagaagataatacagtaactattagagatagagatacaatgaatcaatctagattagatattaatgagttatcagaatatttaaaaggcaaaatacagtcataaa

SEQ ID NO: 298272 - DNA, 438 bp, Unknown
  Bacterial polypeptide expressing nucleotide sequence isolated from the Sargasso Sea
ttagccaatttacttattttcacaaaatggagggtttggaatgtaaacctgttagcctagaattgacttatggtttggagagattggcaacatatgtgcaaaatgtagatagtatttataaagtaatttgggataaatctggaatgacttatggtgaactttatttaaaaaatgaagaacaattttcaaagtataattttgagctctcatctgaaaattacttatttgaatcatttaatcattatgaaaaaaattcagaatttttattaaaaaataaattacctatcccggcttatgaattttgtatcaaagcaagtcattcatttaatttattagatgcaaaaggcttgatttcagtttcagagcgtcaagcatatatcttaagaattagatcacttgtacaaaaatgttgtgaatcagttttaattaaattatgaa

SEQ ID NO: 298273 - DNA, 375 bp, Unknown
  Bacterial polypeptide expressing nucleotide sequence isolated from the Sargasso Sea
gctgactccctgggcagaatcaacccccaggcaccttcgcttcgcagtgcattttcaggacatcatctcgaccttgcagcgcttctgggcggatcagggatgcctgctgctgcagccctacgacaccgagaaaggggccggcaccatgagcccccatacggtgctgcgggcgatcggtccggaaccatgggccgtggcctatcccgagccctgccgccggcccaccgatggtcgctacggcgataaccccaaccgggctcagcactacttccagttccaggtgctgatcaaaccctccccggacggcatccaggagacctacctcgcctcgttggaggccctgggcatcaaggcagccgaccacgacatccgctt

SEQ ID NO: 298274 - DNA, 484 bp, Unknown
  Bacterial polypeptide expressing nucleotide sequence isolated from the Sargasso Sea
agcaggtcttggctgggaagtttggtgcgatggaatggaaataactcaatttacatattttcaacagatggcaggattagaatgtaaaccagtttctgtagaacttacatatggtcttgaaagaatttgtatgtttacacaacaaaaaaaaaatgtatttgatttgttttggaatgacgaaggtgtaaaatataaaaatgtatttcatcaagctgaaaaagaattttcagcatataattttgaacatgccaatacagataatttatttaaaatatttgacatggttgaacaagaaagcaagtcactattagaaaaaaatttatcattaccagcttatgaccaatgcttaaaagctagtcatgtttttaacatactggatgcaagaggagtaattagcgtagctcaaagaacagaatatatatcaagaataagggaaattacaaaaggtgcaggcgaaatttggttaaaaagccaaacaaaataa

SEQ ID NO: 298275 - DNA, 1171 bp, Unknown
  Bacterial polypeptide expressing nucleotide sequence isolated from the Sargasso Sea
atgcaataccatcaaaaatattttcctacttttgataaaaaggggagtattacgaacgaatttttagttgtttcaaacaaaaaagatttaaaaggattaataaagctaggtaacgagagagtagtagaagcaagacttactgatgccaaattcttttggcaaaaagacaaatctcaaaacctcgtaaaacaagtctcaaatttaaaatcgatgaattattttaaaggtttgggaagttattttgataaagttcaaagaatgagaaagcttggaggaatgatttcagatgaactattaataagtaaagaaaaagtagaattatcagcatcaatctctaaagtcgatttattatctgaactggtgggtgagtttcctgaacttcaagggataatgggtggttatttttctgaggcacaaggttttgacaaggatgtagcactatcaataagtgaacaatatttaccttcagggtctgggtctgaggttcccaaaaaaccttttagtattgcactagctctatctgataaaatagatacccttgtaggcttttttggaattaaccaaaagccaacaagctctaaagatccgtttgctcttagaagattaactttaggagtaattagaataattgttgaaaataaaaatcatattaaaataagagatttgattaactattcagcttcactttatatagatcaaggcttcaaatttgaaaataaacttcttcaaaaagaactttctgaatttctaatggaccgactaaaattctatatgaaggaagaaaatattcgaaatgatattattcaagcatctatcaattcacataatttagatcaacttgtagtaatttttgaaaaggcaaaacatttagacaaaataatttctaaatcaaatggacacgaaataatatcaagctacaaaagagcctcaaacatcttagaaagtgagttgaaaggacagaattttgatcattcaaatacaaccgaccctggtatttttaagacagattttgaaaaaaatttgtttaaaaaaataaatgatttaagaaaatatttttcttcaattaataaagatgaagtttattctgaaagtctagataacttattagatgccaaaaaagtaattaacgaattttttgacaatgttatagttaatgacgttgacccaggta

SEQ ID NO: 298276 - DNA, 214 bp, Unknown
  Bacterial polypeptide expressing nucleotide sequence isolated from the Sargasso Sea
tatggtctctaaaataaaaaaaaaaactttatcttttcaggatacaatctttaacttacaaaagtactggtctaaaaaaggttgtgtaatattacaaccgtacgatctagaagtaggtgctggtacattccatccagcaaccactctaagatcgcttggcccaaaaccatggaaaactgcatatgttcaaccatcacgcagaccgactgatgga

SEQ ID NO: 298277 - DNA, 1330 bp, Unknown
  Bacterial polypeptide expressing nucleotide sequence isolated from the Sargasso Sea
tatgggccaaaaaaaagatttattaattgagattggaaccgaggaactacctccaaaatctctaaaaaatcttgcagtttcattctgtcaggaaatgtcaaaagctctgaaaaaaaatgagcttaatttcaaaaatataaattggtacgcgacaccacggagactgtcgctattaatatcagatcttgatacagctcaaaaggataaagaaaaccaacgtcgcggtccttcaatatctttagcatacgataataataaaaatccaacacaagcaacaataggttttgcaaaatcttgtggaacagaaataagtaaactggaagtgcttgaaaccgaaaatggttcttggttaatttttgacacaatattgaagggtaaaaaaacagatgcaatcatccctattttaattgaagaatgcttaatacgcttaccaatatcaaaacgtatgcgttggggtaataacgatattgaattcgtaagaccaataaaatggatatttattctttttgacaaaaaaataatagagtgcaaaattttaggaattaaatcatgttcaagtagttttggacatcgctttcatcatccggagtcaattaaaataaattcgcccaaagattattcaaggattctgaaagaaaaaggaaaagttgttgttagctatgatgagcgtctttcaataatatcatctcaagtctcctctatagcaaaagagaataatggagaggctataattgactcagaaatacttaatgaagttacatcattggtcgagtggccagttagttttattggtaattttgattcagaatttcttaaattaccaaaagaagtcctaatcgctgttatgcaagataatcaaaaatattttccagtaattgatcataaaaaaaacttaatgcctttatttgtatgtgtcgcaaatattgagagcaatagtcctgaattaataaaaaaaggaaacgagagagttataatgccgagattaagtgatgcattttttttctttgagtgggactcaaaatatgaattaaaaaaatttcgtaattctttaaaaaaagtaatctaccagaaagaattgggaactttatatgataaatctcaacgattagtgaaaactatttcatatatgacaaaaaaattacatatagagcccaagctagcaaaatctgcggctgaactctgtctttgtgacttacttacaaaaatggttttcgaatttccgaaattacaaggaataatgggtcgttactatgcagaattatgtggtgaaaaaaatgatgtagctgttgctattggagaattttatcaccctcgatatgcggggagatga

SEQ ID NO: 298278 - DNA, 506 bp, Unknown
  Bacterial polypeptide expressing nucleotide sequence isolated from the Sargasso Sea
attttatattaaagcaaaagtaaaagataataaaaattccacaacaaagttagcgattcaagatttagaaaacaaagagtggtttataccatttgttatagagccctctgctggagtcgaaaggggagtgttggcagttttaaatgaggcttacactgtagatgaggctaacaaaagaacattactcaaactgaaaccgcatttatcaccatttaaggctgcagttataccattgaaaagaaataattctgacttggtcaatacagcaaataatgtcaaatcagagctacaatcacttggtcttggcagagttatggttgaaaatacaggaaatattggaaaaaattatcgtagacatgatgagattgggacacctttgtgtgttactattgattttgaaactttagaaaatcaaacagttacggtgcgagatagagatactatgaaacaagaaaaagtatcactctctgaaatatcaaattattactctggatactttaagtaat

SEQ ID NO: 298279 - DNA, 478 bp, Unknown
  Bacterial polypeptide expressing nucleotide sequence isolated from the Sargasso Sea
aatgcctgcaacgaatattgaagatcttatagctctttgtaaaagaagaggctttatatttcaatccagtgaaatatacggcggaactcaaggtttgtatgactatggtcctttaggtgtcgaattaaaaaataacataaagaattcctggtggaagtcagtcgtgtatgagcgcgatgatgttgaaggacttgatgcagcaatactcacaaagcaatcagtattaaagtattctggccatgaagaaacttttactgatccattagtagattgtaaatcttgtggtgaaagatttagagctgatcaagttcctgattactgtaaaaaagaggatttaactgaacctcgtcaatttaatttgatgtttaaaacaaatataggtccagttgacgatggcaaaacatttgcttatttgaggcctgaaacagctcaacaaatttttacaaactttaaaaatgttgttgactcaacttctaga

SEQ ID NO: 298280 - DNA, 842 bp, Unknown
  Bacterial polypeptide expressing nucleotide sequence isolated from the Sargasso Sea
aagagaattttatcaagcagagatagaggttttttgtaatccaggaaaattaaatgaattagaaaaattttcagagatcgagaatactacaatacgaattcaaatttcagatgatattcaagttataacatgtaaagaagcagtagataaaggagtaattccaaacaaatttgttgcatactatcttggtttgttaactgaattttatgagaaaacgggtattgatatgagtaaaagtagatttagaaagcttggagaaaaagaaaaagcattctatgcagatgttgcatttgattttgaagttaacacaacaattggttggttagaactagtggcatgcaactatagaactgattatgatttatcaagtcatgcaaaaaagagtaaagaaaaattcgaagttatggataatgatgagaaagttttacctcatgtatttgaaatttcaatgggtattgatagaagtctttacacaattttagagcactcactaagagaagataaagaaaatgaaagaatggttttatcaattaaaccatatctagctccaacacacgtaggagttttatcattggtgaaaaaagatgggctttctgagaaaacagatgagatttatcgactgattagaacaaaatttgattcttttttggatcactctggtgcaattggacgtaggtatagaagattagatgagattggagcaccatttgcaataactgtagatcatcaaacaaaagaggacaatacagttacaattcgtaggagagacgacatggctcagagtcgtgtaaatatttcagaattagagtcaattcttgcaaaagagacagcatatccataag

SEQ ID NO: 298281 - DNA, 469 bp, Unknown
  Bacterial polypeptide expressing nucleotide sequence isolated from the Sargasso Sea
atgaatctattatcctcaccgtcaataaaactgccgtttggaatacattatagttggttgatcgtattcgcattatctatagttcaaatttttggcacctctattagtttttctgcgggaattatggttgcccctttgactaatgcttcattgggatttggctggaatgtggcgttggttggtgcagggataggattttactacctgactggggcgataatggctccaataactggttaccttggtgataggtttggagcaaggaaaatgctcctatgctccgctctactctattttgtaagcatgaatttattgggccaaattacggaagtttggcactttttcatagtgtttggaatgatgttggctgttactcaatctttggcaatggtacctctcatggccacggtaagcggttggtttaaacagaaattaggaatcgggattggtattttatacgcggcaggag

SEQ ID NO: 298282 - DNA, 445 bp, Unknown
  Bacterial polypeptide expressing nucleotide sequence isolated from the Sargasso Sea
catggaaataactcaatttacttattttcagcaaatgaccggcatagactgcaaacctgttccagttgaacttacatatggtttagaaagattgtgtatgtttgtgcaaggaaagaaaaatgtatttgacattgaatggaatagagagggagttaaatataaagatgtttttcatcaatcagaaaaagaattttcagcatataattttgaatatgcagatactaaaattttactatcaaattttgagcatgccgagaaagaatgtaaatctcttttagacaaaaaacttgctcttccagcatatgaccaatgtttaaaagctagtcatatttttaatttactagatgctaggggagtgataggagtagcagaaagagcaaactacattgacagaataagagaattatctaaaggatccggaaaattatggctagaaagtcagtaa

SEQ ID NO: 298283 - DNA, 2059 bp, Unknown
  Bacterial polypeptide expressing nucleotide sequence isolated from the Sargasso Sea
tatgtcagaatttatattagagctttatagtgaagagataccgcctaatttacaaattaatgcaaggaatgatttagaaacaaaatttaaaagctctttaattgaggaaaacttaaaatttggatctttaaaagctttttcatgtccaacaagactcacaatatttctcaaagatttttcggaaaaaattaaaattccctccaaagagataagaggtccaaaagtcggtgtcatggaagatgttataaataattttttaaaagcacataactcatctcgaaaagatcttatggaaaagcagaacgataaaggaaaattttattatattaaaactaaaagcaaggaagttttaacttcagaagtgttaaaaaaaatagttgtaaatagcatagcttcaataaaatggaaaaaatcaatgaggtggtctgatacagacttattatggggaagacctcttagatctattttagctgtatataatagagaaatacttgcttttagctatggtcacttaagagctagcgactgtactgtaatagaaaaagacctcgatactaaagttgttaaagtgaaaactgttaaggattatcaaaaattattattaaataataatataatacttaatcatgaagaaagagagcaaaagataatcaaaaaatttgaaagtttttataaagttaaaaattttaagaatctttatgaccttaaacttttaaaagaggtaaccaatatcgtagaagaccctcaagtactattaattgattttgacaaaaaatatttagaattaccaaaagaaattattatttccacattacaaaatcatcaaagatattttcctattatagataaaaaagacgaaatcactaacttttttttagtagtcacaaataaaaaagatacaaataatcttattaaggatggaaacaaaagagtagtagaggctagattagcagatgccaaattcttttgggataaagataaatcaaaaaatttaattaaacaaattgcaaaacttaaagatgtaaaattttatgagggacttggttctgtttatgacaaaactcagagattaagaaaattgagcggtatgttggctgatgagtttaacttaaacaaggagaaagcagagatagcagcatccatctctaaatctgatttatgttcggacttggtaaatgaatatcctgatctacaaggactcttgggaaaatattttgctttaagccaaggttttgaggaggatgtatcaaatgcagtaagtgatcattatcttccattaggaaataattctatgacttctaaaaaaccaatcagttatattgttgcgatcgcagataaaattgataccttagttggattttttctaattaatgaaaaaccaactagttcaaaagatccttttgctttaagaagatcggcaatcggattattgcgaactattattgataataaattaaatttaaaactcagaaatttaataagttacaatattaaattacttgaggaacaaggggtaagaaagactaatgaaaattctgaaaatgaaatattaaattttctcaaggaaagaatgaaaaatattttaaaagacaaaaatataaaaaacgatattattgaagcatctataagttcatactttagcgacaattattttgacctctacaaaaaaaacactttaatgaataaatacataaataaagaagctggaattaatgcaattagttcttacaaaagagcatttaatattgtggaaagcgcaaaagaaaatttattaggtagaccagatgctgttttatttagaaaggacgaagaaaaacacttatttgaaaaacttaacgaaattcgaaaatcttttacagtaaatgagcaagataaagattatgaaaaattactcttaagcttatcagaaattaagatatttaccgataaattttttgataatgttattgtaaatgacgacaatagtgatattaaaaataacaggctggagttattaaaaatgttttgtaatacttttaataattttattaatttttctaaactagagggaatatcgtga

SEQ ID NO: 298284 - DNA, 1387 bp, Unknown
  Bacterial polypeptide expressing nucleotide sequence isolated from the Sargasso Sea
gaatttagagaatattttatcaataaatctataaaatcaaaaaaaagtttttcattatcaactccaaacagagtaattatcgtatttgagggtttacaaaaaaaaattaaagttgggtctgaggaaataaaaggacccaaaactagtgctcctgtagaagcaattgagggttttttgagatcaaataaaattgacaaaaaacaacttattaaacgtgatacagaaaaaggagaattctacttttttaaaacaccctcgaaaacattgaacacttcagatttgttaaaagatttaataccaaaacttttaggtagctaccaatggaaaaaatcaatgaaatggggtgaatttaaccttaattgggcgagaccactaaagtctattttatctgtgtttgatgaaaaaataatagattttaaattttaccatctaacttcttctaataggacctttattgataaggattatgaggaaaaaacaggagtatttaaaaatttcaaatcttatgaaagatttatgaaaatacatggaacgattgttgatcaaactaaaagaaaacaaattattcaaaaggaattcacaaagatattaagtaaaaaaaaattatttattttagaaaatttaaaattatttgatgaggttgtagatttagttgaatgtccaaacgttttactatgtgattttgacaaaaaatttttgtcgattccgaaggaaatacttattttgactatgcagtcacatcaaaaatattttcctacgattgataaaaataatcaaattacaaatcaatttttactcgttgcaaataaaaaagaccaaaaagggttaatcaaacttggaaatcaaagagttgttgatgctagattgagcgatgcagaatttttttggaataaagataaaacacaaaatttagtgaaaaaagtatctgaattaaaaagaattaattttttcaagggacttggaacctattttgataaagttcagcgaatgagaaaattaggtggaatgatatctgatgaattattaattagtaaagaaaaagtagagttatcagcatctatttgtaaaacggatttaacttctgatttagttggtgagtttcctgaattacagggaattatgggaggctatttttctgcacaacaaggttttgataaagatatttgtttatcaataactgaacaatatttaccgattggattagattcaaatgtaccaaaaaaacctttcagtattgctttatcgatgacagacaaaatagataatcttgttggtttttttgggattgatgaaaaacccacaagttcaaaagatccgtttgcacttagaagagtggcgctcggcataataagaataataattgaaaataaaaaagatttaaaattaa

SEQ ID NO: 298285 - DNA, 1954 bp, Unknown
  Bacterial polypeptide expressing nucleotide sequence isolated from the Sargasso Sea
agaagacaacgtaaaatacaaagaattgtcagtttactcttcaccacaaagattaatacttcatattaaagaccttaatgaaaaaattaaattagaggctaaagaaattaaaggacctaaggtaggctcccctgataaagtgatccaaggttttctacgagccaaaaatgtttctgaaaaagacttaattgaaaaagatactagcaagggaaaattttattttatcaaaacaaaatctcaatcaatttttgttgaagatatattaatcaaagttattccaaaagccataagatcaattagttggaaaaaatcaatgaaatggtcagatcatgatttgatgtggggaagacctctcagatcaatctttgcaaagtataacaataaaaaactaccatttaaatatgaacatctagaatcaaaagacgagataattattgaacaggatttagtaactaaaacaagaaaaattaaagattttaaagattacttattatttttaaaaagcaataaaattattgttaatcacaatgaacgagaggagatcattcttaaaaagatccattcattttctcaatcaaaacaatataaagaaaccttaaatccaaaattattagaagaagtcgttaatatagtagaagatccaaatttacttcatataagttttaacaaagattatctagaaataccaaaagaaattataatctctactttagagaaacatcaaagatattttccaatatttgatagcagaaaccggttaactaattatttttttgctgtagctaataaaaaagacgaaaacaaattaattactcaagggaataaaagagttgtagaggcaagactagcagatgctaaatttttctgggataaagatagatcaaaaaatttgataaaacaaatagctaatctgaggtcagtaactttctatgaaaaattaggaactatttatgacaaaactcaaagattaagattattggctggtctattatctgatgatttaaatattaataaagaaaaagttcaagttgctgcatcaatttctaaatctgatttatgttcagacttagttggagaatatcctgagcttcaaggtgttatgggaaaatattttgctttggaacagggttttgaaaaagatgtagctaattcagtaagtgatcattatttgccaacaggacttacatcggtgctacctaagaagcctttcagctattctatttcaattgtagacaagatagatacactagttggcttttttgtcattgaagaaaaacctactagttcaaaagatccgttcgctttaagacgagccgctataggattacttagaataattattgaaaataaactatcttttaaactaagagatttaattagttatgctataagactttaccaagagcaaggagtcaaaattaaaaatgagaaaactgagcaacaactcttagaatttataaaagaaagaatgagaaacgttttaaaattaaaaaatattaaaactgatattatcgaagcatcaatcagttctcattctggagataatttcttagatctttacgcgaaaactattttaattaataaatataaaaataaagacgtcggaattaatgcaattagctcttataaaagagcttcaagtattttagataaagctggaaagggatacactggtagacccgatgctatattatttagaaaagaagaagaaaaaatacttcatgaaaaaataaatgagattcgtaaagctttcacagttaaagatgataataaaaactatgaaaacttgttaataaagctttccgacactaaagagtcaacagataatttttttgacaatgtagtagtaaatgatgaaaatcaaaatattaaaaacaatcgattagagttgctaaaaatgttctgtaatacttttgatagctttattgatttttcaaaattagagggtctttga

SEQ ID NO: 298286 - DNA, 673 bp, Unknown
  Bacterial polypeptide expressing nucleotide sequence isolated from the Sargasso Sea
atgcatcaacaaaaaggtaaaaaaattttaatttatttttttctatttctaatagtgggatcaattaataatactgtattaaccaacattagatttgatacaaataaaattattcaaatctcagggttaaatcaaaatcaaaatacaaatattttagaaagtattaaagagctaaatttaaaaaatattttttttcttaatggaaacgaaatttctaaaattataagttctaataatttagttgaaaattatgaaatatttaaaaaatatcccaatgccttagatataaaaattgaaaaaactgactttttagcaaaaataaataataatggaaaaatatttcttataggaacaaatggaaagttatctgatttaaaattttcagataaagagctaccatttatatttggtaaaccaaggatagatgaatttattaaattaactaatataattgaccaatccaagctgtcatttaatcaagttaaaaatctatatttttttccatcaaaaagatgggatttagaacttaagaataatgtaattttaaaattatcaaaagatcatactaaactttcattggatcaagcttttgaaattttaaatgataacaattttaatgatataaaagttgttgatgcaagaattaaaaatcaaattgttttaaatgattgaa

SEQ ID NO: 298287 - DNA, 1006 bp, Unknown
  Bacterial polypeptide expressing nucleotide sequence isolated from the Sargasso Sea
aatgactcaaccccatcaagctaccctgctcgtcgagctgctgaccgaagaactgccgccgaaagcgctcgcgcgcctcggcgacgcgttcgccgaaggcattgcgcagcgcctcgcggcgcgcgacctgatcgaaggcgaactgtcgttcgaacgttacgccacgccgcgccgtctcgccgtcaccatcaagaacgtacgtgcggtcgcgccggaaaaacacgtgcgcgaaaaagtgctgccggtttcggtcgcgctcgataaagacggccagcccaccgcgccgctcgccaagaaactggctgcgctcggcttccccgacttctcggtgaacgacctggaacgcgcgcaggacggcaaggccgaagccttcttcctgcgctacgccgcgccgggcgccacgctcgtcgaaggcctgcaaagcgcgctcaacgaaacgctcgccaagctgccgatcccgaaggtgatgacgtatcagcgcccggacggcaccaacgtgcagttcgtgcgtccggtgcatcgcctgaccaccctgcacggcgaccaggtcgtgccggtcacggcgctcggtatcgacgccgacgacaccacactcggccaccgcttcctgtccgaaggcctcgtgcagatccagcacgcggattcgtacgccgacacgctgttgcacaagggccgcgtggtcgcgaatttcgccgaccgcaaggaaaccatccgcacgcatctgctcgcgcaagccgacggcgaccaggtcgtgatgcccgaatcgctgctggatgaagtgaattcgctggtcgaatggccggtggtctacgcctgccgtttcgaggacgagttcctgcaagtgccgcaggaatgcctgatcctgaccatgcagacgaaccagaaatacttcgcgttgacggatgcgaacggcaagctgcgctcgcgcttcctgatcgtgtcgaacatcgaaacgaagacgccgggcgatatcgtcgaaggtaacgaacgcgtggtgcgtccgcgt

SEQ ID NO: 298288 - DNA, 770 bp, Unknown
  Bacterial polypeptide expressing nucleotide sequence isolated from the Sargasso Sea
gccgcgtttctccggcgatgcattgcccgccacggcaaccggcaccgtcgtcgcgcttgccgacaagcttgaaacgctggtcggcatctggggcatcggcctgcaaccgaccggcgagaaagacccgttcgcgctgcgccgtcatgcgctgggcgtactgcggattctggtcgagaagcaattgccggtcgatctgatcgaactgctgcgcaccgcttacgcgcaatttgccgccgtgccgggtgtcgccgattcgacgcaggcaatttacgaattcagcatggaccgcctgcgcggtctgctgcgcgaacgcggctacgcgccgggcgaaatcgacgcggtgctggcactgaaccccacgcgcctcgacgacatcgtcgcgcgtctggatgcggtgcgcgagttcgctgcgctgccggaagcggcctcgctcgcggcggctaacaagcgcatttcgaacatcctgaagaagtcggaaggctcggtcaccggcggcgtgcaggtcaccctgctgatcgaagcggcggaaaaagccttgcatgcgcaactggagcaggtcgcaccgcgcgtgcaatcgcaactcgccgcgcgcgactatacgggcgcgctgaccgcgctcgccgcgttgcgcgaacctgtcgatacgttcttcaacgacgtgatggtcaacgccgaagacccggcgttgcgcgccaaccgtctggctttgctcggcgcgctgcatcagcagatgaattgcgtcgccgacatttcccgactcgccgcctgag

SEQ ID NO: 298289 - DNA, 171 bp, Unknown
  Bacterial polypeptide expressing nucleotide sequence isolated from the Sargasso Sea
ttggtaaaagttatagaaggcacgacgaagtcggtacgccaatttgtattacagtggactttgaaactcttgagaatcaaactgtaaccgtacgagatcgtgatacgatggagcagaaaagacttggacctgaagaattaataaattactacggacaatattttgagtaat

SEQ ID NO: 298290 - DNA, 358 bp, Unknown
  Bacterial polypeptide expressing nucleotide sequence isolated from the Sargasso Sea
aaagttgagaagctagaaaatgttaaagagagaactgttttatcgctaaaatcccacttatcgcctataaaggctgcggttattcctttaaaaagaaataatcaagatttagttaacaaagcagtagaattgaaaaagcaattgcagttaatcggattaggaagagtagtgcttgataatgctggcaatattggtaaaagctatagaagacatgatgaagttggaacaccaatgtgcataacaattgactttgaaacattagatgataattctgttacagtaagagatagagatactatggagcaaaaaagaattaaattagatgaaatttctgatttttttgtcaaaaatctctaat

SEQ ID NO: 298291 - DNA, 1518 bp, Unknown
  Bacterial polypeptide expressing nucleotide sequence isolated from the Sargasso Sea
aaaaaacaagtaaatttttgagttttaaaacttacaaggaatttttcaaaagcaaaggcattatattggatcataataaaagagaggaatttattgaaaatcaattattaaaaaaaactaaattagataggttaaagttaaccccaaacaaaaaattactaagtgaagtaacaaatattgttgaaaaacctaatataattaaatgtaagtttgacaaaaaatttttaaaaattcctaaagaaatattagttacaactatggaagttcatcaaaagtatttcccaacctttgacaataaagaaaatttaacgaatgttttttttgttgttgcagacaataacgacccaaaaggtttaattaaattaggaaatgagcgagtagtcgaagcccgtttaaatgatgctcaatttttctgggataaaaataaaacaaaaaatttagttaaaggaatatcagatctaaaaaacgtaaattattttgaaggattaggaacttacttcgataaaactcaaagattaagaaagctcggatcgctaatatctgatgaacttttaattagtaaagaaaaagttgaagtagcatcttctatttgcaaagtagacctagtgtctgatttagttggagaattccctgaacttcaaggtgtaatgggtggccactttgctaaagcacaaggtttcgataacgaaatttgtttggccattagtgaacattacttaccaataggcccagagacaaagacaccaaaaaaaccttactcagtcaccttagctttaagtgataaaatagataccttagttggcttttttataataaatttaaaaccatctagttcaaaggatccgttcgcattaagaaggtcagcaattggtcttataagactaataatagaaaataaattagagattaaattaaaagatttaataaattattcttgtgttttgtttgctgaacaagatttagattttgatattaagactgtacaacaagatttgtttaattttttttctgaaaggcttaaattttatatgaaagaaaaaaaagtaagatcggatattatagaatgctcaataaatagttatagcgcagatcaaatttataaaatttataataaggcatttattttaaataaattaatcgataaaaatattggtcaagatgtaattttttcttacaaaagagcatccaatattctatcaaacgaaatatctaaaaataagattgaattagaaaattcgaccgatccaggtttattcaaaaatgattttgaaaaaaaactatacaaaaaaatacaagaaataagaaaatattttacaagcttaggtagtcacgaggattgtaaaaaaactttagaggttttagctgatgcaaaaactgatgtttctaacttctttgataatgtgatagtcaacgatgaagatgaagctatcaaaaaaaatcgtttggaacttatgcaattgttatgtaaaacgttcaataattatttaaatttttctaatattgaaagtgcaaaatgaa

SEQ ID NO: 298292 - DNA, 934 bp, Unknown
  Bacterial polypeptide expressing nucleotide sequence isolated from the Sargasso Sea
atgaataaaccactctggcagccgtctaaaaaattaaaagataactctttattaagagatttttgtaaatttataaattttaaatcatcaaataattttaaagaaatttggcagtggtcgattgataacccggatgaattttggtcaaagttttgggattattcaaaaatcatcggagataagggatctgaaataattaaaaaagataaagtttttaataaagcaaaattttttcccgactcaaaattaaactattcagaaaatatcctaaaaaaaaaatctgatgaaatagcaataaactttctatctgaaaaaggttttgaagaaaatataacctggaatgagttatatgaaaaagtttgtaaattttcatcatatctcaaaaaactaaatcttcaaaagggggatagggttgcagcttatgtgccaaataagatagagaccattatttgttttctagcttgtgcaaaaaatggaattatatggtcttcttgctcacctgattttggagctcaaggtgttgtggacagatttaaacaaattgaaccaaaagttttaattacttgtgactactattactacaatggaaaaaagattaatatactagataaagttgatcaaattctaaaagaaatatcatcaatcaagaatgtgattgcatataactataacaaaaaagaaaaagaagatttaaaaaatttcattaattttgaggagactttgaatagtaacttaaatgaaaattttgaaaaatttgaatttgatcatcctatttatattcttttctcaagtggcacgactggaaaaccaaaatgcatcacacacggaacaggaaatgtattaatcgagcataacaaagaatttatgcttcattgtgatattagagataaagaaaagctattttactacaccacaacaggctggatgatgtgga

SEQ ID NO: 298293 - DNA, 212 bp, Unknown
  Bacterial polypeptide expressing nucleotide sequence isolated from the Sargasso Sea
aatgtcccgggatttactgattgaattgggcaccgaagagctgcccccgaaagcgctggcctcactgagtgccgcgctcactgatgaatttgtccgccaactggatgaagctggcctgaaccacggtgctgtagaacgttttgccgcccctcgccgtctggctttgctggtgcgggatctggatgagaaacaggccgaccgcgatatcgagc

SEQ ID NO: 298294 - DNA, 564 bp, Unknown
  Bacterial polypeptide expressing nucleotide sequence isolated from the Sargasso Sea
aatgagtataaaacatttagataaaattgtttctctttgtaaacgtaaaggctttgtatttccaaactctgagatttatggaggattaaaagcgtcttacgactatgggccacttggtgtagaattaaaaaaagctatttctgaaaaatggtggcaagctatgacgaataattcaaacattgttgggcttgatagttctatcatggttcacccagatgtatgggaagcaagtggacatattgccaactttaatgatcctttgacggataataaggactccaaaaaacgttatagaattgatgatttattatcccaacaaaaaagtaaagttattgatgccctatgtgaaatattgtctattgaaaataaaaatgataacaacactcttgataaaatcagtcatactttacttcaagaatcagataaatatagtaatgctttagaatcagcaggagtcattgatccattttcaggaaatataggaaagtggaccccagctactcagtttaacctaatgtttcagacaaattcaggtccatcagaaaaatctggaaaaagtattta

SEQ ID NO: 298295 - DNA, 198 bp, Unknown
  Bacterial polypeptide expressing nucleotide sequence isolated from the Sargasso Sea
aaaaatctataccttttggtatgcccaaaattggtaaagcttttagaaatgaaattactccgagaaactttatttttagagtgagagagtttgaacagatgaaattagagttctttgttaaaaaaggtgaagatgaggattggcacaaatactggattgaagaaagaataaattggtgggtcccagcagggagttaat

SEQ ID NO: 298296 - DNA, 1078 bp, Unknown
  Bacterial polypeptide expressing nucleotide sequence isolated from the Sargasso Sea
cagagatacgttcctcttttattgaaaaacaaaagtttttctaaactagatttaagctctgaaaaaaatattagtacaactttctgcattatttcaaatggtcttgaagaatcaaataataatattgttaaaggtaatgagaaagtattaagggcaaggttttcagatgcaaagttttttgtggaaagtgacaaaaaagttgcttcaatcaaaagaaatcaaaaacttaaatctgtttcctatttgaaaggatttggaaatatatttcagagggtagaaaggatagaagaagttactaaaaaaattcttaaatttttagatgataagtctttagaagaaaaaaaaataatagaagctgctaaatactgtaaaaacgacttatgtagcgaaattgttttcgaattccctgagctgcaaggaataatgggtggtaaatatcttaaatatgagggatttagtgaggatgtttgcttggctgtcgctgaacattatttgccttctttttataaagatgctttgccctccacaaaatatggtgcaatagtttccatagcagataaggtcgaaactttaataagtatatttatttctggtaaacgtcccagtggatcatctgatccttatgctttaagaagaaatttgaatggagtcattaaaataatctgggattatgaatttgatttacctttagataaattattcaacgaacttattgatttttggaaaatcgtatttcctaatttaaacttctcaagagaaacaatatttaatgatttaaatgaatttttagttcaaagaattgttagtcatctagaagaaatatcactaagtaaagatttaataaaggccgtttgctcttctgatgaattatctcaaaaaagagtcttgaatattgttgatcttaaaaataggattaaatctattattaattttaacgaaaaggataattttgttgaaatccagaaggtaattacaagggtaagcaaattagcaaataaaagtgatatttcaagagaggttctctcaacaagagattatgtaaacacaaaactttttgaaaaagattgtgaattcaaag

SEQ ID NO: 298297 - DNA, 1297 bp, Unknown
  Bacterial polypeptide expressing nucleotide sequence isolated from the Sargasso Sea
caattttgataaggagtatttaaaattcccccaagaaataattatttctacacttgaaaagcatcaaagatactttcctatatttgatagccgagaaagattaacaaattatttttttgttgttgctaacaagaaagatgagaaaaaacttatcacagaaggaaacaaaagagttgtagatgcacgactttctgatgctaaattcttttgggaaaaagatagatctaagaaccttataaaacaaacagctaatcttaaagcaattactttttatgaaaaaattggaaccatttatgacaagactcaaagaattagaaacttggctggcttactttcagatgaattaaatataaataaagaaaaagttcaggtggctgcatctatttcaaaatcagatttatgttcagatttagtgggagagtatccagaattacaaggtgtgatgggaaaacatttcgcactagcccaaggttttgaagaggatgttgcaaactctataaacgaacattatcttcctataggtttaacttcagcaataccaaagaaaccttttagttactcaatcgctattgtagataagatagatagtttagtaggtttttttcttataaatgaaaaaccaaccagctcaaaagatccttttgctcttagacgagcagcaattggtttactaagaattattattgagaacaaattgtcaattagattaagggatcttattaattatgcaatccgactttatgatgaacaaggagttgaagttaaaaatgaaaagacagaaatggaagtgcttgattttttaaaagaaagaatgagaaatattttaaaattaaaaaatataaagattgatattattgaagcttcaatcagttctcatactggcgataatttcttagatctttataaaaaaaatcttttgatgaacaaatatattaataaagatgtaggaataaatgctatcagttcttacaaaagagcctctaatattactgataaggcggagaaaggaatcgtcggtaggccagatgcagtactttttagaacagaagaggaaaaaatactatttgagaagattaatgaaatacgaaaagcttttacggtaaaagaaagcaataaagattatgaaaatttattaattaggctatcagaaacaaaacaatttacagataatttttttgacaatgtggttgtaaatgatgagaataaagatattaagaataatagattagaattattaaaaatgttttgtaatacatttaataattttattaatttttctaaattagaaggtatttga

SEQ ID NO: 298298 - DNA, 1363 bp, Unknown
  Bacterial polypeptide expressing nucleotide sequence isolated from the Sargasso Sea
cttttaaatgaagtgacagatattgttgaaaagccaaaaataattttatgtagttttgataaaaaatatctagatattccacaagaaataataattattacaatgcaacagcaccaaagatattttccaacatatgataacaagggcaaactgacaaataatttttatattgtcgcaaattctgtagataataaaggctatattaaaataggaaatgaaagagtggtagaagcaagactaaatgatgctgaatttttttggaaaaaaaataaatctcaaaatttagtaaaacaagtatctcagcttaaaaatgtaaactatttcaaaggtcttggaagttattttgataaagttcaaagaataaaaaaattggcaggtttagtttctgatgaattattaatcagtaaagaaaaagttgaaatagcctcatctatttgcaaagtagacttgttgtcagacctcgtgggtgagtttccagaattgcagggtgttctaggtggttactttgctcaatcacaaggttttgataaggatgtttgtcttgctataaaagaacattatcttccgcatggaaatgatagtaatattccaaagaaatcatatagtattgcattatcattgagtgataaattagatactttaataggtttttttgcaattggcttaaaacctacgagctccaaggatccatatgcacttagaagattagctattggtttaattaaattaatattagaaaataaagtaaaattaaaactaaaagatttaattaattattcctgccaactatatataaaccaaaatgttggtttagatttaaaaaatgttcaaagagatatagcttctttttttcacgacagatttaaaaattatatgaaagagaatggaataagacaggatataattgaaagtgcaactttgtcttataacttagatagtattttaaaaatttatacaaaggcaaatattttaaacaaattaatatctaaagaaattggaacagatgttatgtttagttataaacgtgcatttaatatattaataaatgaaagtaaaaatatagatcttgaattatctggaaatgttgatccaggattgtttaggaatgatttagaaaaaatattatataaaaaaatctatgatataagaaaagattttacaaatgttagtaaagaggatgattacaaagggcttttatcaaatttagcatcagtaaaaaaagaagtaatagatttttttgataatgtaatagtcaatgatgatgatcaaaatatcaaaaaaaatagactggaacttctaaaaatgttatgcaaaacttttgataattatttaaatttttctaaaattgaaaacttaacatgaa

SEQ ID NO: 298299 - DNA, 262 bp, Unknown
  Bacterial polypeptide expressing nucleotide sequence isolated from the Sargasso Sea
tatggtttctaaaaaaaaaattaaaaaacctaaatatcaatcatttcaagatacaatcttgaatttacaaaaatattggagcaatcatggatgtataattttacaaccatatgatttagaagttggggcagggacatttcatcctgctacaacacttagatctttaggaagtaagccatggagaacggcctacgttcagccttcaagaagacctaaggacggtagatatggagaaaatccaaatagacttcaacactattat

SEQ ID NO: 298300 - DNA, 232 bp, Unknown
  Bacterial polypeptide expressing nucleotide sequence isolated from the Sargasso Sea
atggtctctaaaataaaaaaaaaaactttatcttttcaagatacaatctttaacttacaaaagtactggtctaaaaaaggttgtgtaatattacaaccttacgacctagaggtcggtgctgggacattccatccagcaaccactttaagatcgcttggctcaaaaccatggaaaactgcatatgttcaaccatcacgccgcccgactgatggaagatatggtgacaacccta

SEQ ID NO: 298301 - DNA, 730 bp, Unknown
  Bacterial polypeptide expressing nucleotide sequence isolated from the Sargasso Sea
tatgataaataaacaagaccatttcaaagatacaatatcacatgctaaagaatatggatttatttttcagtctagtgaaatttatgatggcttaagtgcagtatatgattatggccaaaatggaataattttaaaaaataatattagagagtattggtggaaatcaatggtccaactaaatcaaaatattgttggattagattcagcaattttgatgcatccaacaacatggaaagcttctggacatgttgatgctttcaacgacccattaattgacaataaggattcaaaaaaaaggtatagagcggatgttttagttgaggattatgtttcaaaaattgaattaaaaattcataaagaaattaaaaaggcttcaaaaagatttggtgaaaaatttaatcaagatgagtttattaatactaactcaagagtaaaagggtatatcgaaagaaaagaccaaattttaaggcgattgaataattccctcgaaaatgatttatcagatgtaaaagctttgattgaagaattagaaattgcatgtcctgaatctggttcaagaagatggactgatgtaaaacaatttaatttaatgtttggaacaaaattaggtgcctctacagaatcagcctcagatttatatttaagacctgaaaccgcacaaggtatatttgttaattttttaaatgttcaaaagtcaagcagattgaaactaccttttggaattgcccaa

SEQ ID NO: 298302 - DNA, 614 bp, Unknown
  Bacterial polypeptide expressing nucleotide sequence isolated from the Sargasso Sea
tgtggatttgatgtatatgtttcctcacggattagaagaattagaaggtattgctaacagaacagattttgatttagcctcacattctaaaaaacaagatgaacttaatataacatccaatgttgaaaaaaataaacattccaatagcaagatggcagttcaagataaaaaaggtgattggatcgtaccatatgtcatagaaccatcagctggtgttgaaagaggtattttagctatattaaacgaagcatttgttgaagaagatcttggtgatggtaaaacaagagttgttttaaagttaaaacctcatttatcgccaataaaagcagcaattttaccgttaaagaaaaataatgaagaaatagtaaccttgtctaaagaggttaaaaatagtttacaaaaattaggcttaggtagggttatcctcgaaaacacaggtaatattggtaaaggctacagaagacatgatgaaataggtactcctgtatgtataactgttgattttgaatcaattgaagatagcactgttactataagggatagggactccatggatcaggtaagggttcagatttcagaactagctgaaatttataaaaataagattaaataag

SEQ ID NO: 298303 - DNA, 613 bp, Unknown
  Bacterial polypeptide expressing nucleotide sequence isolated from the Sargasso Sea
ttcagttataattaagccttcaccatctaatataaaaaaactttatctgaatagtttgtctgcgatcggtattaaccataaaaatcatgatattagatttattgaagatgattgggaaagtccaacgttaggtgctgcaggattaggctgggaagtttggtgtaatggtatggagataactcaatttacatattttcaacaaatggctggctttgagtgtaagccagtttctgttgaattaacatatggtttagaaagaatttgcatgtttactcaacagaaacaaaatgtttacgatttaatttggaataatgaaaatgtagaataccgagaagttttccatcaatctgaaaaagaattttcggcttataattttgagtatgcaaatacaaataacctttttaaaatgtttgatatgtttgaaagtgaggcaaaagttttagctgaaaaaaaaatatcattaccagcatatgatcagtgcttaaaagcgagtcatgtttttaatatacttgactcacggggtgtaattagtgttgctcaaagagcagaatatataggtcggatcagagagataaccaagtcagctgctactgtttggatagatagtcaataa

SEQ ID NO: 298304 - DNA, 580 bp, Unknown
  Bacterial polypeptide expressing nucleotide sequence isolated from the Sargasso Sea
catggcacaacatacatttctggtagagatcggtactgctgagctgccgcccaaagccctgcgctccctggccgaagcctttgccgacaacctcaagagcgaactgaccaaggccgatctggccttcggcgacgtcgagtggtttgcctccccgcgccgtctggcgctgaaagtgagcgagctggccggcgaacagccgagcaagagcgtcgagaagcgcggtccggccgtagctcaggcgttcgatgctgaaggcaagccgaccaaggctgccgaaggctgggcccgtggcaacggcatcaccgttgagcaggccgagcgtctggtcaccgacaagggtgagtggctggttcacaccgccaaggtcgaaggccgtccggccaaagatctgctgggcgaactggttagccaagcgctggccaaactgccgatcccgaagatgatgcgctggggcgacaagaccatccagttcgtgcgtccggtcttcaccgtgaccctgctgctggatggggatctggtgcccgctcacattctgggtatcgactctgccccgcacatccgcggccaccgctttatgggc

SEQ ID NO: 298305 - DNA, 496 bp, Unknown
  Bacterial polypeptide expressing nucleotide sequence isolated from the Sargasso Sea
aacaaagaagaatgatgagtcaactatgaggctggctgttcaagacatggaggccaaaaaatggtacgtcccatatgtaatagagccctctgctggagtagataggggggttttagcagtattaaacgaggcatatactgttgaagaattaggcgaaggaaaagaacgggttgtattaaggctaaagtcgcacctctcgccgattaaagctgcagtaataccccttaagaaaaacaaagaggagcttgttacgttagcaaaagacatcaaatcaaaccttcaatcaacgggaaaaggcagggtgtttttagaaaacaaaggaaatattggaaaagcctaccgaagacatgatgaggttggtactccggtttgtattacggttgattttgatagtttagataacggaacggttacattaagagacagagatactatggagcaacggacggttgcaatttctgaacttaatcaactgtacctagattccctaaagtaa

SEQ ID NO: 298306 - DNA, 472 bp, Unknown
  Bacterial polypeptide expressing nucleotide sequence isolated from the Sargasso Sea
ggatgggaagtctggtgtaatggcatggaaataacacaattcacttattttcaacaaatggctggaatagaatgtaatcccatttcagttgaaattacttatggattagaaagactatgtatgttcatacaaaataaaaaaaatgtttttgatttagtgtggaatgatgatggaattttatacagagatgtgttttatcagtcagaaaaggaattttcagaatacaactttgattatgcaaatacagaaaatttgtttaaaatatttgatatgctagagagtgaagctaaatctttaatagaaaaaaaaatttcacttccggcatatgatcaatgtttaaaatcaagccacgtatttaatttattagatgcgagaggagttattagtgtagctcaaagagctgagtatataggaaggataagagatttaactaaagaaattggaaaaatttggatagaaagccaaaaataaa

SEQ ID NO: 298307 - DNA, 691 bp, Unknown
  Bacterial polypeptide expressing nucleotide sequence isolated from the Sargasso Sea
tacgaaaaatggaaaaaaaatagaatggaatggcatttatcaattggaataaataaaaataattatagatttcatgatcacgataaacttgcacactatgctgatgctgcttgtgatatcgagtttaatttcccgtttggatttaaagaattagagggtattcactcacgaacagattttgacttggcaaatcacgaaaagttttcctcaaaacaaattaaatattttgatcctgaggatgaatctaaatacatcccttatgttgtagaaacttcaattggtttagatcgaatgtttcttgccgtcttttctaattccctttctttcgaatcgttagaagacggttctcaaagaactgtattaaaaatcccaaaaatattagctccaaatcaatgcgcgatcctaccactggtaaagaaagatggacttgctgattttgcaaaagagttaaaaaatcaactgaaagtaaaatttaagttaatttatgatgaaaaagatgctataggtagaagatataggaggcaagatgctttaggaactcctttttgtataacagttgaccatcagacccttgacgataaaaccattacgattagagatagggactcaatgaaacaaaaaagaattaaagtggatgaattagaaaattttttatctaaatcttttgaaatttctaattggcttaggtaaa

SEQ ID NO: 298308 - DNA, 160 bp, Unknown
  Bacterial polypeptide expressing nucleotide sequence isolated from the Sargasso Sea
ttatagacggcacgatgaaataggaactcctatttgcattactgttgattttgaaacacttgatgaaaattcagtaactgttagagatcgtgactcaatgaatcaagaaagagtagcttcaaaagatcttaatcaattttatcaaaaatattttcattaa

SEQ ID NO: 298309 - DNA, 598 bp, Unknown
  Bacterial polypeptide expressing nucleotide sequence isolated from the Sargasso Sea
atgtctgatgaaatttttaaaaaaatcatatctcatgcgaaggaatatggttttgtttttcaatcaagtgaaatatatgacggcttaagtgctgtttatgattatgctcaaaatggtgttcttttaaaaaataatatcaaagactattggtggaaatcaatggttcaattaaatgataatattgttggtatagattcttctattttttctcatcccacaacatggaaagctagcggacacgttgatgcttttaatgatccaatgattgacaataaagattccaaaaaaagatatagagctgataatttaattgaagattacattcaaaaaattgaagcaaaaattaataaggaaaaaaagaagcagtataaaagattcggagaaaattttgatgaaaaaacttttctatcaactaatccaaaggtattaaaatatcaaaatgaaattgatttagttaataaaagattttctgaagctttaaatcaagacaatcttgacgagctaaaaaatattattgaagattgtggaatagtttgcccaatttctggaacaaaaaactggactgatgtaaaacaattcaacctgatgttaaaacgca

SEQ ID NO: 298310 - DNA, 413 bp, Unknown
  Bacterial polypeptide expressing nucleotide sequence isolated from the Sargasso Sea
gccttcagctggtgttgatagaggtgttctcgctttactaaatgaagcttataaggaagaaaatactgataaagataataaaagaattcttttatctctaaaaccccatctttcgccgattaaagctgctgttattcctcttaaaaagaataatgacgaattagttaatttatctaaagaaattaaatcaaatttacaaaaacttggattagggagagtggtattagaaaattcaggaaatattggaaaaaattatagaagacatgatgaaattggaactcctatttgtattactgtagattttgaaacattagaagataagtcagtgaccgtaagagatagagatacaatggaacaaaaaagaattaacttagatggtttagaaaattattatagagattattttaattaac

SEQ ID NO: 298311 - DNA, 562 bp, Unknown
  Bacterial polypeptide expressing nucleotide sequence isolated from the Sargasso Sea
aggacggattttgatctaggatcccatactaaaggccaaaaggaccttaatatagatgcaactgttgcagaaaatactcaatcaaatacaaaacttgctatacaagatctagaaactaaacaatgggtggttccatatgtaattgagccttctgctggggttgatagaggatttttagctattctcaacgaagcatataaggttgagagccttgaaaataacaaagaaagaacggttttatctctaaaaccacatcttgcacctataaaaattgctgttattcctctaaaaagaaatgaaaattcgatagtaatgacatcagtagatctaaaaaatgacttacagcgaacaattgaaggacgagttcttctagaaaacactggtaacatcggcaaaaactacagaaaacacgacgaaattggtacacctgcttgtattaccgtcgattttcaaactctagaagacaatacggtaactataagagatagagatacaatggatcaaacaagattgaaaatagacgaagttagaaactttttagcacaaaattataatatttaga

SEQ ID NO: 298312 - DNA, 454 bp, Unknown
  Bacterial polypeptide expressing nucleotide sequence isolated from the Sargasso Sea
cttggtattcaagatgaaaatggcgaatggtttgtaccttatgtaattgagccgtcagctggaattgaaagagcatttttagctattcttaacgaagcgtatactgaagaaagtttagagaatggtaaaaacagaatagttcttaaattaaaaccacatctagccccaataaaagctgcagttattccattgaaaaaaaatgacatggggttagtgaaaatggcaacagaacttaaaaacaaacttcaaaaagatattgatcaaagaattgttcttgagaatacaggtaatattggtaagagttatagaaaacatgatgagatagggacaccatactgtattactatagattttgattctctcgcagagggtactgttactataagagatagagatacaatgaaacaaaatactataaaggtagaatcaataagtaaacatatgtcattttaaa

SEQ ID NO: 298313 - DNA, 469 bp, Unknown
  Bacterial polypeptide expressing nucleotide sequence isolated from the Sargasso Sea
atgggaagtgtggtgtgatggaatggaaataacacagtttacatattttcaacaaatggcaggctttcaatgcaaacctgtttcagttgaaataacttatggacttgaaagaatttgcatgtttacgcaacagaaaaaaaatgtttatgatttagtttggaacaataatggggtagattatagggaggtttttcaccaagctgaaaaagaattttctgcatataatttcgatcatgctaatacagaaaatcttttaaaaatttttgacatgattgaacacgaagcaaaatcattagttgaaaaaaaaatatctttaccagcatatgatcaatgtttaaaagcaagccatgtatttaatttattagatgcaagaggtgtaattagtgttacacagagagctgaatacattagtagaattagagaaattacgaaactagtagcagaaacttggattgatacacaaaagtag

SEQ ID NO: 298314 - DNA, 852 bp, Unknown
  Bacterial polypeptide expressing nucleotide sequence isolated from the Sargasso Sea
ttagtagaaaatttccatccaaatcccgatattctttcaccggtagagttggatgatttattggtcaaacatgagattccctgtccaacttgtggtagtgtagattggagcaaagcgcgtccgatgaatctcatgtttagcaccagaataggggcaatgaagggtggaagaagtgcctacatgcgaccggaaacggcccagggtatgttcatgctctatcccgcattataccgccacttccgtaacaggttaccatttggtgcaatacaaactggcaagggatatcgcaatgaaatcagcccaaggcaagggatgatacgacttcgtgaattcaacatggcagaattggaatatttcattgatcctgatgttccaatcgaacacgacttttcgacctggaataagactgaatttaatttagtccctgatccggaacacggtgacccagtcaaaatgacaccttaccaagcagctcaacagaatatcatccgccatccgagtgtggcatggttcatggccaaaacttgggatttccttgtgagtgtaggtatcgaccctgaaaaaattcgatttaggcagcacgagggtactgaaatggctcattatgcgagcgattgttgggatgctgaaatctacggatcatatggttggattgaatgtgttggcattgcccacaggggctgctatgatttacaggctcatgaaaccgcaactggtgacaagaatttgcgagcatggaggccgtacgatgttccgaaatcagtggataagactgtgctttcaggtgttggttcagtcattggacctgcattcagggcgaaagcaggtgctgtgcacgaagcgctggggaaa

SEQ ID NO: 298315 - DNA, 505 bp, Unknown
  Bacterial polypeptide expressing nucleotide sequence isolated from the Sargasso Sea
ggattaggttgggaaatttggtgcgatggtatggaaataagtcaatttacatattttcaacaagttggaggaatagaagtaaaacccgttgctagtgaaattacatatggtttagaaagattagcaatgtttattcaaaaagttgaaaatgtctatcatttagactgggatggattagataaagataaaggtggaaaaacttatggggatatttttttacaacaagaaaaagaattttcaatttataattttgaaaagtcaaattcatctgttttaatacaacatttcaacgatgcggaaaaagaatgttcatttttactagaggataaaattaaccctttacctcttcctgcctatgagcagtgtattaaagcaagccatatttttaatttattggacgcaagaggtgttatctctgtttcagaaaggcaagcttatattttaagggtaagaaatatgtcaagatcatgttgtttagcttggatggacaaatcaaatgtctaag

SEQ ID NO: 298316 - DNA, 706 bp, Unknown
  Bacterial polypeptide expressing nucleotide sequence isolated from the Sargasso Sea
ttgaaaaagattcgagggtttttcttgaccgcaaaaaacatggaagaattagtctctctctgtaaaaggaggggttttgtatttcagtcaggagaggtatatggcggccttcagggtgtttatgattatgggcctttgggcgttgagttaaaaaacaacctaaaaaactcttggtggagttcaatggtttatgaaagagatgacatagaaggacttgatgcatccatattatccaagcaagagcttttcaagtattcagggcatgaagagactttttcagacccattggtggattgcaggtcctgtaaatctaggtggagagaagatttacttaaagatggaaaatgtctgtcttgcggatcaacagacctaacagaggcaagagcttttaatttgatgtttagaacacctatgggccctgttgaaaacgaagagagctttgcatatcttaggcctgagacagctcaacatatttttacaagctttaaaaacgttcaagactcgacatctagacagataccttttggtattgctcaaattggtaaagcattcagaaatgaaatcaatccgagaaattttattttcaggctgagagagtttgagcaaatggagttggaatattttgtaaggcctggcgaagatgaagccgctctagattactggagagatcaaagattaaggtggtgggaagacctaaggtattgag

SEQ ID NO: 298317 - DNA, 787 bp, Unknown
  Bacterial polypeptide expressing nucleotide sequence isolated from the Sargasso Sea
tggaagaattgaaaagaaaaaacaaaaagaaatattaaaagcaaagaaaaggtttaaagaagattttgatgagaaaaagttttgtgaaacttcacctagagttttaaaatatattgaagaaatagaaaaaatttcaacccaattgaatgattgccttaaatcaaataatctaaatggtttaaaagatttaattattagtttaggaataactgatccaatttctggaactaaaaattggacggatgttcgccaatttaatttgatgttttctactgatatgggttctgttgattctaataaaaatttaatttatttaagacctgaaaccgctcaaggaatttttcttaattttctaaatgtaattaattctagtagaattagaataccatttggaattgctcaaataggtaaagcttttagaaatgaaatcatagccagacaatttatttttagaatgagagagtttgagcaaatggaaatgcagttttttgttagtccaaaatctgaaatggagtggtataaaaaatggaaaaatactagaattaaatggcatcacatattaaacttaggtaaggatagatataggtttcatgatcataaaaatttagcacattatgcaaatgcagcgtgtgatattgagtttaattttcctatgggatataaagaattagaaggaattcattctagaacagattttgaccttaaagctcatcaaaaattatctggtaaaaaactaacttattttgatcaaaaaaacaataaggcttttttaccatatgtaatagaa

SEQ ID NO: 298318 - DNA, 217 bp, Unknown
  Bacterial polypeptide expressing nucleotide sequence isolated from the Sargasso Sea
tatggtttctaaagcaaaaaaagaaaaaaaaaaaattcagacatttcaagatacaattttaaatcttcagaaattttggagtaaaaagggatgcattattcttcagccttacgatatggaggttggtgcaggaacttttcatccagctactaccctaagatcactaggaactaaaccatggaaagtagcttacgtacaaccatcaagaagacctaca

SEQ ID NO: 298319 - DNA, 573 bp, Unknown
  Bacterial polypeptide expressing nucleotide sequence isolated from the Sargasso Sea
aatggataaagtcgttaacttatgtaagcgacgcggtattattttccaatcagctgatatatacgggggctttcgatcaacttatgactatgggcctatagggtcgttaatgcttcgaaatgtcaaagatgcatggtggaaaaccatggtccagctccgccacgacattgttggcttagacgcctcgatactgtcaccgccagcggtctgggaagcctcaggacaccttgagaatttcacagacccgctcgttgactgcaaagaatgcaatgggcgattccgtgaagaccaacttgaagatccttcaacttgtccagcatgcggggcacaaaatagtttcacagaggcgcgagcatttaacctcatgttcaaaacccatgctggcccagtcgaaggagctggtcacgcagtttatctgcgtccagaaacagcacaaggaatgttcactaacttcaagctcgttctagaaacttcaagaaaaaaacctccattcgggattgctcaagtaggcaaaagctttcgaaatgagatcaccccaggtaatttcgttttccgtacacgagaattcgaaca

SEQ ID NO: 298320 - DNA, 774 bp, Unknown
  Bacterial polypeptide expressing nucleotide sequence isolated from the Sargasso Sea
tagaattttttgtggaaaagggctcagatgaaaaatggcatgatttttgggttaaatctagggttgattggtggaaagaccaaggtgtcagcgaaagcagcctagaattgctccacgttccaaaagaggagctatcccattactctaaagcaactgtcgatataatgtataagtttcctcatgggcttgaagagcttgagggggttgcaaatagaacggatttcgatcttggttcacactcaaagaatcagaaagacttaaaaatcactgcaaaagtacgagaaaataaaacatctaattcaaaactagcagttcaaaacagagaaacaaatgaatgggctgtaccttttgttatagagccttcggctggagtggataggggtgtattagcagttcttaatgaggcatataacgtcgaggatcttggggaagacaaacaaagaacggttctttctcttaaaccacacctttcaccgattaaagctgccgttatacctttaaagaaaaataatgaagaattggttaatttagcttataaaattaaaaatcaactccaagggctcagactaggaagggttctagttgaaaattctggaaatataggaaaaagctatagaagacatgatgaagtaggtacgccaatatgtataactgtcgattttcaaactttagaagacggaacggtgaccataagagatagagatactatggagcaagaaaggaaagatatagcagacttagctcaacttttaaaagaaaagctgctagcgtgac

SEQ ID NO: 298321 - DNA, 863 bp, Unknown
  Bacterial polypeptide expressing nucleotide sequence isolated from the Sargasso Sea
aatcaaaataagtaataaaacaaaaagtcataggctaatcaatgaagttttagaagttcagaatcctgataatttttttgaattattgaaacgaaatagagttatagctattcgaaaagaaagaaaggaaaaaattgaaagtttaataaatcaggcatctaactctttaaatctgaaatctgacctttcagaaggattactaaatgaactaactgatttagttgaatggccagacttaattattggaaaatttagtaatgaatttcttgatcttccggttgaagttctctcaacagtcatgaaaaatcatcagagatacgttcctcttttatttaaaaacgaaagtttttctaaactagatttaagctctgaaaaaaatattagtacaactttctgcgttatttcaaatggtcttgaagaatcaaataataatattgccaaaggtaatgagaaagtattaagggcaaggttttcagatgcaaagtttttcgtagaaagtgacaaaaaagttgcttcaatcgaaagaaatgaaaagcttaaatctgtttcatatttgaaaggacttggaaatatatttcagagggtagaaaggatagaggaagttactaaaaaaatccttaaatttttaaatgataagtctttagaagaaaaaaaaataatagaagctgctaaatactgtaaaaacgacttatgtagcgaaattgttttcgaattccctgaactgcaaggaataatgggtggtaaatatcttaaatatgagggttttagtgaggatgtttgcttagctgtcgctgaacattatttaccttctttttataaagatgctttgcccctcacaaaatatggtgcaatagtttccatag

SEQ ID NO: 298322 - DNA, 118 bp, Unknown
  Bacterial polypeptide expressing nucleotide sequence isolated from the Sargasso Sea
agattttgaaagtttagaagataaatcagtaactattagggatagggactctatggagcagtcaaggatgagtattcaagaaatttcttcgtttgtaataaaaaaattgaaatcttaa

SEQ ID NO: 298323 - DNA, 475 bp, Unknown
  Bacterial polypeptide expressing nucleotide sequence isolated from the Sargasso Sea
tggtttaggctgggaagtttggtgcgatggaatggaaataactcaatttacctattttcaacaaatgaccggcatagattgcaagcctgtaccagtagagcttacttatgggttagaaagattgtgtatgttcgttcaaggaaaaaaaaatatctttgatatagaatggaatagtgaaggagttaagtataaagatgtttttcatcaatcagaaaaagaattttcagcgtataattttgaacacgcagatacaaaaattttattatcaagctttgagtgtgctgaaaaagagtgtaaatctctcttaaataaaaaacttgcacttcctgcttacgatcagtgtttaaaagcaagccatatatttaatttacttgatgcaagaggagttataggggttgctgaaagagcaaattatattgaccgcattagggatttagcaaaaggttccggcaaactgtggctagaaaatcaataa

SEQ ID NO: 298324 - DNA, 846 bp, Unknown
  Bacterial polypeptide expressing nucleotide sequence isolated from the Sargasso Sea
ttatcaaaaattaatttttttgataaattgggatccttgggagataaaagtaaaaggttacagaaattggttccaacgatttgtgaatttattggtttagataacgttaatggggccgtgaaagcggcttggttagcaaaagcagacttatctacaatgatggtaaatgaattcccagaattacagggggtcatgggtggatactatgcaagtgccgatggagagccaccagaggtatgtcgtgctataagcggccattatgctcccttaggcccgacggatgcatgcccaagtgagcctcttaccatcactatttcaattgcagataagatagatacccttgttgggttctttgctattaatgaaaagccaacaggttcaaaggacccatttgcgctaaggcgcgcggcattaggcatcattaggacaatacttgagaacgagctccgaattccattaaagcaattaatatcaaaatcattagacgagtatcctcaccttaccgatagcaatgaactattagactttattaatgagcggctgaaagtttatctaagggctagtggtgtacagcccgatctaatagctgctaattttgcgggtggaaatgaagatgatctttacaggcttatcttgcgagttaaagctcttgaggaactgctagccactgatgatggcgctaatttactaatcgcaaataggcgtgcggctaacattgtttctattgaagcaaagaaagataaatcggactttaccggtatacctgatccgaagatgtttgagttggaagaagaaagggcgctgttttccgtgctggccgagcttgaaaagcaagttggagatttg

SEQ ID NO: 298325 - DNA, 916 bp, Unknown
  Bacterial polypeptide expressing nucleotide sequence isolated from the Sargasso Sea
tgggaaacaagtggtcacattcaaaatttttcagatcctttaattgaatgtaaagaatgtaatgcaagattcagagaagatgaattgatagtaacaaatggtgcatgtcctaattcaaaatgtactacaactgattttgaagacccaagagaatttaacatgatgtttaaaacaaatattggtccaattgtgtctgatagtagtgaaatatatttaagacctgaaacagctcaaggaatatttgtaaattttgaaaatatcataaatacatcaagaaaaaaaattccttttggagtagctcaaataggaaaagcatttcgaaatgaaataacaacaggtaatttcattttcagaacaagagaatttgaaatgatggaaatagaatattttgttaaacctgatgatagtgaaaaattctatgaggagtggatcaaaaatagcatgaactttttactagaattaaatattaatgattcaaacctaagaattagagaacacgaacaaaaagatctttctcattattcaaaaggaacaagtgatattgaatatgactttccatggggatgggcagaattacaaggaatagcaaatagaggaagctttgacctggatgcacattcagaatcatcctcaaaaaacttcagtatatttgaagaagctagtaaatcaagatataccccacatgtaattgaaccttctataggagtagatagattattgcttgtaacattattagatgcttatacggaagaaaaagtagaaggaaaagatgaaatcagaactgtattaaaattatctcctaaaatagcaccaataaaaattgcaatccttcctttaagtaaggaccaaaagttatccgaattatctaaaaaaatccaaagagatttattatctaagggaagtttgggcaagatga

SEQ ID NO: 298326 - DNA, 721 bp, Unknown
  Bacterial polypeptide expressing nucleotide sequence isolated from the Sargasso Sea
tgaactaactgatttagttgaatggccagacttgattattggtgaatttagtgaagaatttcttgatcttcctgttgaagtcctttcaacggtcatgaaaagtcaccagaaatatgttcctctcttaacgaaaaataatactttttctaaattagatttaagctctgaaaaaaatataagtacaaattttattgttatttcaaatggtcttgaagaatcaaataaaaatattgctaaaggtaacgaaaaagtactgaaggcgaggttttcagatgcaaagttttttgtagaaagtgataaaaaagttgcctcaatacaaagaaatgaaaaacttaaatctgtttcttatttgaaaggatttggaaatgtttttcaaagagttgagagaatagaggaagttactaaaaaaattctcatatttttaaacgataagtctttaaatgatgaaaaattaatagaagctgcaagatattgtaaaaacgacttgtgtagcgaaattgtttttgaattccctgagttgcaaggaataatgggtggaaaatatcttaaaaatgaaggatttagtaaggatgtttgtttggcggtagctgaacattatttaccttctttttataaggatgctttaccctctacaaaatatggcgcaatagtttctatcgcagataagattgaaactttaataagtatttttatatcaggaaagcgtccaagtggatcatct

SEQ ID NO: 298327 - DNA, 228 bp, Unknown
  Bacterial polypeptide expressing nucleotide sequence isolated from the Sargasso Sea
catgacgacgaaacacgacgtaaaaacatttcagggtttcattctaaccctacaggaatattgggcgcagcaaggctgtgcaatcgttcaacctctagatatggaagtcggtgcgggtacattccacccacaaactttcctacgctctttagggcctgagccaatgagcagtgcctatgtgcagccatcgcgccgccctaccgacggccgttacggtgaaaacccaaa

SEQ ID NO: 298328 - DNA, 319 bp, Unknown
  Bacterial polypeptide expressing nucleotide sequence isolated from the Sargasso Sea
atggtttctaagaaaaaaaaaacaaaaaaacctaaatttcagacatttcaagatactatattaaatcttcaaaaatattggagcggtcaaggatgtgttattttacagccgtatgatgttgaagtaggtgcaggaacatttcaccctgctacaacattaagatctttaggaccaaaatcctggaaaactgcttatgttcagccatcaagaagaccaacagatggaagatatggaaaaaacccaaatcgtttacaacactattatcaatttcaagttttaatcaaaccctccccaaaaaatattaaaaaactttattaaa

SEQ ID NO: 298329 - DNA, 307 bp, Unknown
  Bacterial polypeptide expressing nucleotide sequence isolated from the Sargasso Sea
atgagtgaaaattattcctttcaaaaaattattactaacctccaaacattttggatcgataaaggttgtgttttattacaaccatatgacttagaagttggagcaggtacattccaccctgctacagtactgcgggttttaggtccagatccaatttggaaagcggcatatgttcaaccgtgtcgcagaccaaccgatggaagatatggtgaaaaccctaatagacttcagcactattatcaatttcaggttattatacaaccatctcctgaagatatacaaaatctatatctggagagtttaaatt

SEQ ID NO: 298330 - DNA, 366 bp, Unknown
  Bacterial polypeptide expressing nucleotide sequence isolated from the Sargasso Sea
atgcttatgacgaagaggacttggaaggcgaaaagagatctttgctaagatttaaaccaattatttctcctattcaagtagccgttcttcctcttagtaaaaatgaaaaactctctgaggttagcgatgagatatataaaaaattgcaaaaaatatatagatgtcaatttgataacactcaaagtataggaaaaagatatagaagacaggatgaaataggtacacctatttgtttaaccatagattttgatactgttgaaaaagatcagtgcgtaacattgaggcatagagatacaatggatcagattagaattaaaatagaagatattgaaaaagaaatagaaaaattattcacaactttctaat

SEQ ID NO: 298331 - DNA, 515 bp, Unknown
  Bacterial polypeptide expressing nucleotide sequence isolated from the Sargasso Sea
agaagatgattgggaaagcccaacactaggtgccgcaggattaggctgggaagtttggtgtgacggtatggagataacacaatttacttattttcaacagatgacaggattagaatgcaaacctattccagttgaaatgacctatggcttggaaagattatgtatgtttgttcaaggaaaaaaaaatgtatttgatcttgattggaacaatgaaggagtaaaatacaaagatgtattttttcaagcagaaaaagaattttctgcatacaattttgaatttgctaataccgaaactttattaaaaaattttgaatcaacagaaattgaatgtaaatctttattagataaaaaactttctttacctgcatacgatcaatgcttaaaagcaagtcatatatttaatttacttgatgctagaggagtaattggtgttgcagaaagaactggatacattaacagaataagagaactcgctaaaggatgcggagcactttggctaagtacacaaatttaat

SEQ ID NO: 298332 - DNA, 923 bp, Unknown
  Bacterial polypeptide expressing nucleotide sequence isolated from the Sargasso Sea
ttacttttagagcttttttcggaagaaattccagcacggtttcagaaagaagcggaaaataaccttaaaggtttgcttgctgatgcaatgaacaaaagaaatatgattttcgacactattgcagtttttagtacacctagacgattagttgcagtagttacagatctaccccaaactacagcggcgcaggttgaagaaaaaaggggaccacgtattggctcggcagataaggcaatagagggcttcattaaatcaatgaaaataactagagatcaacttttcatcaaaagtgaaaaaagaggagagttcttctttgcgcgaattgacaaaaagagtgagcccattgctccaattatttccgaggtagtattaaaattaataatagactttccttggtctaattcgatgagatgggggtcggaaagtattaaatggatcaggcctcttcattcaatcttatgtatactccatgatgaaaatggttgtgaaattgtgccgctgcggatagccggcatgaaagcctgtaataccagttgtggtcaccgctttcattccaacaataaatttaccgtgaagtcttttgaagattatgaaaagaaacttaaaaaagcacgagtaattttggatcgaaattcgagaaaagaaaagatttggaatgaagccaccacactcgcattcatccataatatggaggtagtagaggataagaggcttttagaagaaattacaggattagttgaatggccagtagttctctggggagaaatagatagtgtgttctttgagttaccctcagaagtactacagacatcaatgcgtgagcatcaaaaatttttttctgttactagaaaaaactcaaaaaagatacaatcatatatttcagtagcaaacattgaaacagttgataatgggcacgccatttc

SEQ ID NO: 298333 - DNA, 544 bp, Unknown
  Bacterial polypeptide expressing nucleotide sequence isolated from the Sargasso Sea
agcaaaactactttcggcgataagctgactcaagccagcgtatctgatgaagtactggactttatgcttggccgtttccgcgcctgttacgaaggcgaaggttttggtgttgacgtcatccaggctgtattagcccgtcgtccaaccaatccggctgacttcgaccgtcgtgttaaagctgtagctgaattccgcaaactggatgccgctttagctttagctgccgccaataagcgggtagccaatattctggccaaagtcacagaagctattcctgccagtatcaacagcgcgctgctaagcgaagaagccgaacaagctctgtataaggccatagtggccgagcagggctatcaggcgactgtaagcagctacgctgagggtttaagccacctggccgccatgcgtgatgtagtagaccagttcttcgacaaagtcatggtcaacgccgacgatgcagctgtacgcttaaaccgtcaggccttgttacagcaattacgtgaattattcctgcgcgtagcggatatttctgtactgcagtgat

SEQ ID NO: 298334 - DNA, 505 bp, Unknown
  Bacterial polypeptide expressing nucleotide sequence isolated from the Sargasso Sea
tgggaaagcccaaccctcggagccgcagggcgtggctgggaagtatggtgcgacggtatggaaattactcaatttacttattttcaacaaatggcagggatggaatgtaacccagtttcagttgagctcacctatggattggaaagaatatgcatgtttacacaaggaaaaaataatgtgtttgaactcgtttggaataatgaaggaataaaatatagagatatttttcaccaggcagaaaaggaatattcagcttataattttgaatttgccaatactgaatatttgctaaaaaattttgaaattgccgagtctgaatgcaaagcgttactagaaaaaaaacttccgctaccagcttatgaccaatgtttgaaagctagtcatatttttaatcttttagatgcgcgaggagttataggagttgcccaaagaactgaatatatttctagaataagagagttagctaagggttcagggcaaagttggttggaaagtcaaaaataaa

SEQ ID NO: 298335 - DNA, 220 bp, Unknown
  Bacterial polypeptide expressing nucleotide sequence isolated from the Sargasso Sea
aatgacgacgaaacacgacgtaaaaacatttcagggtttcattctaaccctacaggaatattgggcgcagcaaggctgtgcaatcgttcaacctttagatatggaagtcggtgcgggtacattccacccacaaactttcctacgctctctagggcctgagccaatgagcagtgcttatgtgcagccatcgcgccgcccctaccgacggccgttacggtga

SEQ ID NO: 298336 - DNA, 805 bp, Unknown
  Bacterial polypeptide expressing nucleotide sequence isolated from the Sargasso Sea
atgcacgaatccactaaagaagctaacaaccagtacctgcttgaaatcggtctggaagaaatgcccgcgggaatgatcttacccgctgtggaacagttaaaaaaagctgcagaaaagagcctagaatcaaaccggttgcaatcggcaaaagttcaaccgttttcttctccaagaagactgacattgctcatttccgagctgcctgaaaaacaggaggaccggattgaggaactgaaagggcctcctgcttctatcgcaagagatgaggatggttcgtggagtaaagcggcactaggttttgcaaaaaagaatggaattgagccagattcccttgaagttagaaattttgacgggcgtgattatctttataccgcaatcaatgttcaggggccttctctgaaagatatcctgaagcaggaagcacctgaatggattaaggggctaaatttcccaaaaaacatgcgttggggacattataagatgcgttttgcaagacccgtccggtggctggtttcaatttggaacgaggaagttctccatttttccctggaaatggttgaagctggaaaacaaaccatgggacatcgttttctgtccccaaaaccaaatgaacttctccatgctcaggattatcattctcacctacacaatcatttcgtggaagctgacttcaacaatcggaggaatgaaatcctttcacaaatcagggaattggaatccaaacatgactgcagggttaagatcgcggatgaccttcttgaggaggtgaccaatcttgttgaatggcccccaagcgatgatggga

SEQ ID NO: 298337 - DNA, 349 bp, Unknown
  Bacterial polypeptide expressing nucleotide sequence isolated from the Sargasso Sea
catggggggtaatactcatcatcccagtgactttcagtccctaataattaagcttcagcaattctgggcagactatggttgcgtgttgctgcaaccttatgatgttgaaatgggagcgggaacatttcaccctgctactgcgctcggggcattagggaaaacagaacgaaatatcgcttatgtccagccatgtcgtcgacctaccgatggccgttacggtgaaaacccaaatagattgcagcattattatcagttccaggtaatgctaaaaccatccccttcaaatacacaggaactttatctcaatagtctttatgagttgggtatagaaaaagatctgcatgacata

SEQ ID NO: 298338 - DNA, 498 bp, Unknown
  Bacterial polypeptide expressing nucleotide sequence isolated from the Sargasso Sea
gtccaacattaggagccgcaggtcttggatgggaagtttggtgtgatggtatggaagtcacgcagtttacctattttcaacaaatggctggattagaatgcaatccaatttcagttgaaattacttatggacttgaaagattatgcatgtttatacaaaataaaaagaacgttttcgacttagcatggaatgatgaaggaattctatatagagatgttttttatcaatcagaaaaagagttttctgcatacaactttgattatgctaacacagaaaatttattcaaaatttttgatatgatggagagtgaagcgaaatctttaattgaaaaaaaaatttcacttcctgcatatgatcagtgcttgaaatcaagccatgtatttaatttattagatgcgagaggagtaataagtgttgcccaaagagcagaatatatagcaaggattagagatcttacaaaggaaattggtaaactttggattgaaagtcaaagttgaa

SEQ ID NO: 298339 - DNA, 847 bp, Unknown
  Bacterial polypeptide expressing nucleotide sequence isolated from the Sargasso Sea
catgcgctggggacattataagatgcggtttgcaagacccgtccggtggctggtttcactttggaatcaggaagtaatccatttttccctggaaatggtcgaagctggaaaacataccctcggacatcgttttctgtccccgaaacgaagtgaacttctccatgctcaggattatcattctcaccttcacaatcatttcgtggacgctgacttcaacaatcggagggatcaaatcctttcacaaattaaggaattggaatccaaacatgactgcaaggttgagatcgaggatgaccttcttgaggaggtggccaatcttgttgaatggccacaagcgatgatgggtagttatgatgaaaattacctcggattgcctgaatccgttctggttacaagcatggcagtccatcaacgttacttcccggtttattcgaatcaaacagactcaggagagaacaaactattgcctcaattcattgccatccgcaacggcaatgagcaacaccttgaaacggtttgccagggcaacgaaagagtcttaagggcccggctcagtgacgcacgctttttttttgaggaagaccagaaaaaatcgcttcaacattttcaggaactgcttgaacgtgtggtttttttccagaaaagaggaagccagcatgaacgggtgcagaggattcaagacctgagtttgaaacttggagaacttcttaaattcaacgaagaagaactgcaaaaggtcagaaggattgcagaactctgcaaattcgacctgcagacccagatggtttatgaatttcctgaactgcagggaatgatggggagaggtatactcttcgctgaaaggtga

SEQ ID NO: 298340 - DNA, 361 bp, Unknown
  Bacterial polypeptide expressing nucleotide sequence isolated from the Sargasso Sea
aaaaaaattgaaaatgtttatgatctagactgggatggtatcgaaaaaaataagggtggaaaaacttatggtgatatttttttacagcaagaaaaagaattctctagatataattttgaaaaatctgaaatatcctttttatttaagcagtttaatgatgctgaaactgagtgcaaaaatttattagttgataagaaaaacgcattagcgctccctgcatatcatcaatgtattaaagcaagtaatatttttaatctattagatgcaagaggcgttatttctgtctctgagagacaatcgtatattttaagagttagaaatatggctagatcttcttgtcttgcttggatgggtaaataaa

SEQ ID NO: 298341 - DNA, 607 bp, Unknown
  Bacterial polypeptide expressing nucleotide sequence isolated from the Sargasso Sea
acaatggaagagttagtttctctttgtaaaagaagaggttttctatttcaatcaaatgacatctatggtggtattaaggggttatatgattatggaccaatgggagtcgagttcaaaaataatcttaaacaagcttggtggaaatcaatggtatatgaaagagatgataccgaaggtttggatgcttcaattttaagttctccagtagttttaaaacattcaggtcatgaagatacttttaccgatcctttagttgattgtcgcgcatgtaaatcaaggtggagagcagatcaattattagaaaataataaatgcccaaattgtaaatcagaagatcttactgagccaaggccttttaatttaatgtttaaaactgcaattggaccagtagatgatggttcgtcatttgcatatttaagaccagaaacgtgtcagcaaatttttactaattttaaaaatatattacattcaacatctagaactgttccgtttggtatcgcacaaatgggaaaagcatttagaaatgaaataacacctcgtaattttatctttagagttagagagtttgaacagatggaattagagttttttgttaaaccaggtacta

SEQ ID NO: 298342 - DNA, 312 bp, Unknown
  Bacterial polypeptide expressing nucleotide sequence isolated from the Sargasso Sea
tatggtctctaaaataaaaaaaactttatcttttcaagatacaatctttaacttacaaaagttctggtctaaaaaaggttgtgtaatattacaaccgtacgatttagaggtaggagccgggacattccatcccgcaaccactttaaggtcgcttggacctaagccatggaaaactgcatatgttcaaccatcacgccgacctactgatggaagatatggtgataaccccaatagattgcaacattactatcaatttcaagttttaattaaaccttcaccaaaagaaataaaaaagatgtatttaaatagttt

SEQ ID NO: 298343 - DNA, 787 bp, Unknown
  Bacterial polypeptide expressing nucleotide sequence isolated from the Sargasso Sea
ttgaaggatgacccgggccttctaaccgaggtcacagggttggtggaatggcccgtcgtttacatgggaaccattgatgacgccttcatggatgtgccagccgaagtgctgatcacgtccatgaagaagcaccagaagtatttttcctgcctcgacccggacggcaatctcgccaaccgcttcatcctggtcgctaacacggaaacgacggacggcggcacggcggtggtggctggaaacgaacgcgtgctgcgcgcgcgtctgtcggacgccaagtttttctggaacaccgattgccagacaccgctggaggataaggctctagcgctaaagaaccgggtgtttcacgcaaagttgggttcggtagcggaaaaggtcgcgcgtatggaagcgctggccgttgacctcgctcaatacgttccgggagcggatgtcgatttggctaggcgtgcggcgcagttggcgaaggccgatttgtccagcggcatggtcgccgaatttgccaacctccaaggcatcatgggccgctattacgcgctaaacgatggtgaacccgaggctgtcgctgaagccattgcagagcactacgcgccgcaaggaccgaatgacacctgcccgacggcgcctgtcagcgtctgcgtcgcactggcggacaagattgacagcttggtcgggtttttcgccattgatgagaagcccacgggatccaaggatccgttcgcactgcgccgcgcggccctgggcgtaatccgtttgatcctagagaacgagataagattgccgctga

SEQ ID NO: 298344 - DNA, 721 bp, Unknown
  Bacterial polypeptide expressing nucleotide sequence isolated from the Sargasso Sea
ctgaaacctgacctttcagaaggattactaaatgaactaactgatttagttgaatggccagacttaattattggcaaatttagtgatgaatttcttgctcttccggttgaagttctctcaacagtcatgaaaagtcatcagagatacgttcctcttttattgaaaaacaaaagtttttctaaactagatttaagctctgaaaaaaatattagtacaactttctgcgttatctcaaatggtcttgaagaatcaagtaataatattgccaaaggtaatgagaaagtattgagggcaaggttttcagatgcaaagtttttcgtagaaagtgacaaaaaagttgcttcaatcgaaagaaatgaaaagcttaaatctgtttcctatttgaaaggacttggaaatatatttcagagggtagaaaggatagaggaagttactagaaaaattcttaaatttttaaatgataagtctttagaagaaaaaaaaataatagaagctgctaaatactgtaaaaacgacttatgtagcgaaattgttttcgaattcccagagttgcaaggaataatgggtggtaaatatctcaaaaatgaaggatttagtgatgatgtttgtttggctgtagcggaacattatttaccctctttttataaagatgctttgccctctacaaaatatggtgcaatagtttctatatcagataagattgaaactttaataagtatat

SEQ ID NO: 298345 - DNA, 364 bp, Unknown
  Bacterial polypeptide expressing nucleotide sequence isolated from the Sargasso Sea
atgcctaaaaagaataaaaacgacaattctaaaggacagacatttcaggaaataataatgagtctgcaaaaattttggagtaaatatggttgtgtattacttcagccttatgatttagaagttggcgcaggaacttttcatcctgcaactacattgagatctttgggacccaaaccatggaaagccgcttatgttcaaccatctagaagacctacagatgggcgttacggagaaaatcctaacagattacaacattattttcaatttcaagttattattaaaccttcaccaaaaaatattaaaaatgtttatttgaaaagtttgtcagcgattgggatagacgtcaaaaagcatgacgtaagat

SEQ ID NO: 298346 - DNA, 814 bp, Unknown
  Bacterial polypeptide expressing nucleotide sequence isolated from the Sargasso Sea
acattacaatttcaccagaggtactttactttaattgaccacaaagatcgaatgatcaatgaatttgttattgtagttaataatcaagataaaaaaaaaattataaaacttggaaacgaaagagtagttgaagcaaggttatcagatgctagctttttttgggaaaaagacaaatctctaaatcttataaaacagataaataaattaaaacaagttacgttttacgaaaaacttggttctatttatgaaaaaacacaaagattaagaaaaatggcttattttatttctgatcaattagatttaaacaaagaaaaagttgaaatagccgcatcagtttccaaatcagaccttgtatccggacttgttggtgaattccccgagctacaaggaattatgggaaaacactttgccttgaaccagggtttcgaagaggatgtttcaagcgcgataagcgaacattatttacctacaaatattaatgctcctgtttcaaaaaaaccaattagttgtgcactttccattatagacaaattagatactttagttggattttatttaataaatgaaaaacccacaagctcaaaagatccattcgcattaagaagggccactattggtttgctaagaactattatagaaaataatcttattgttaaactcagagatttgattgattactctactaaaatttatctagaccaaggtgttaaccaacaaaacaatagtgtgagtaaagacctgcttgtattttttagggagagaatgaaaaacatacttagagagaagaaaattagagcagacgttatcgaggcct

SEQ ID NO: 298347 - DNA, 319 bp, Unknown
  Bacterial polypeptide expressing nucleotide sequence isolated from the Sargasso Sea
atgccaaaaaaaattaaaaagataaaaaaaaaaaataaaaaaccaaagtttaaatctttccaagatactattctaaatcttcaacaatattggagcaaaaatggatgtgtaattttacagccttatgatacagaggtaggtgccggaacatttcatcctgcgactaccttgagatccctaggtccaaagtcatggaaagcagcatatgttcagccttcaagaagaccaacagatggaagatatggaaaaaatcctaatagacttcagcactactatcagtttcaagtaattattaagccttcaccaaaagattattaaa

SEQ ID NO: 298348 - DNA, 852 bp, Unknown
  Bacterial polypeptide expressing nucleotide sequence isolated from the Sargasso Sea
ggtcattaggtctactcttcaaactcaccaaaggtattttactttggttgatcatagagacaggataagcaacaattttattgtagttgcaaataaaaaggatgagaaaaaagtgatcaaagtaggaaatgaaagggtagtcgacgcaagactttctgatgctagtttcttttgggagaaagacaaatctttaaatttaatcaaacagattaataaactaaaagaaattacattttatgaaaatttaggatcactttatgataaaacacaaagattaagaaagatggcgtactttatttcagatcaacttgacattaaaaaagaaaaaattgagatagcagcatctatttgtaaatctgatttagtttcaggtttagtcggagaatttccagaattacaaggaattatgggaaaatattttgctgccaatcagggatttgaagaagaagtatctcgagctgttagtgaacattatttaccaattagtatttcctcaatggtgccaaaaaaaccaatcagttatggtctatcgataatagataaattagatacacttgttggtttctttttaataaatgaaaaaccgacaagttcaaaagatccttttgccttaagaaggtcagctataggattattaagaactattattgaaaataatctgaccgttggtcttagagacttgatagattacttaataagattttacactgagcaaggtgttaaagatgtaaataagaatacacatttagaattaattaattttttcagagatcgtatgaaaaatatatttaaagaaaaaagggtgagacctgatataattgaagcctcattaagttcacatactaatgataa

SEQ ID NO: 298349 - DNA, 733 bp, Unknown
  Bacterial polypeptide expressing nucleotide sequence isolated from the Sargasso Sea
atgatttatgggtacaaaaaaaggcttgaatggtggagtaaacagggtgtacccacggaaaaaatcgaaatttataatgtgccaaaagaagagcttgcgcattattcaaagaaaacaattgatttaatgtataaatttcctcatgggctagaagaacttgagggaatagcaaatagaactgattttgatttaggctctcattcaaaacaacaagatgaaattaacataagttcatctgtaaaagttaacaaaaattcaaatagtaaaatggcagttcaaaatgaatctggtggttggtttgtgccatatgtaattgaaccctcagctggagtagaacgggggttcctagccattcttaatgaggcatattcaattgaaacgcttgatgatggtaaagataggcttgttcttaatcttaagccacatcttgcgccagttaaggcagcagttatccctttaaaaaagaataacaaggaattagtaaccttagctaaagatattaaaaatgatcttcagaagctaaaattaggtagagtaatttttgaaaatacaggtaatattggaaaaagctatagaaaacatgacgaaataggtacacctatatgtattacggttgattttgatagtcttgatgataaaacagttacattaagaaatagagatacaatgaaacaggaaagaatgcataaagataaattatcagaataccttaaaaatttagtaaataattaat

SEQ ID NO: 298350 - DNA, 316 bp, Unknown
  Bacterial polypeptide expressing nucleotide sequence isolated from the Sargasso Sea
atggtctctaaaaaaaataaaaaaactcaaaagtttcaaacttttcaagatacaatttttaatttacaaaaattttggagtaaacaaggttgtgtaattttacaaccttatgatattgaagttggagcaggaacatttcatccggcaactacattaagatctcttggatccaaaccatggaaagctgcttatgttcaaccatcgagaagacccactgatgggagatatggggacaatcctaatagacttcaacattattatcaatttcaagttatagtaaaaccttctccttcgaatataaaaaaactttatctaa

SEQ ID NO: 298351 - DNA, 502 bp, Unknown
  Bacterial polypeptide expressing nucleotide sequence isolated from the Sargasso Sea
aaagttgataaaaatagcgattctaacgccaaacttgctgttcaggaccctgaaactaaagagtggttggttccttatgttatagagccttctgccggtgtagaaagaggctttttggctatattaaatgaagcatttagggttgaggggctagaagatggtaaagaaagaacagttttgtccttaaaaccccacctttctcctataaaagctgcagtgataccacttaaacgaaataatgaagatttagtaaaaacagcaagaaatttaaaaaatactctccaaaaccaaggcctaggcagggttttgcttgaaaactctggcaatataggcaaaagctataggcgtcacgatgaaataggaacccccgtctgtataaccatagattttgaatcattagaagatggaactgccaccatcagggacagggatactatggagcaaaaaagattggatatagaatctataccagaatatttcaaggaaactatagacagttaaa

SEQ ID NO: 298352 - DNA, 550 bp, Unknown
  Bacterial polypeptide expressing nucleotide sequence isolated from the Sargasso Sea
aatggcaaacaagaagaagaaagctgaacagcctgaaaacaagttattccaaacaattattggacatgcaaaggaatatggctttgtgttccaatcttctgaaatctacgatggtttacaagctgtatatgactatggttcaaacggagtagagcttaaaaataacctcaagcagttttggtggaaaagcatgacccaaatgcatgagaacatagtgggtattgactcttctatcttcatgcatcctaccatctggaaagcatctgggcacgtagatagtttcaacgacccaatgattgacaacaaagactctaagaaaagatacagagcagatgtgttgattgaagaaaaagctgctttatacgaaaaagaaggagataaggagaaagcagatgccttgttgaagaaaatgggggctttgttagaagcagaagatcttgcaggcgtaaagcaattaattgaagacgaagagattgcctgcccactttctggaacagtaaactggacagatgtaagacagttcaacttgatgttcagcacagaaatgggc

SEQ ID NO: 298353 - DNA, 290 bp, Unknown
  Bacterial polypeptide expressing nucleotide sequence isolated from the Sargasso Sea
aatgccaaaaaaaacaaaaaataaaaaaaaagatccggtaacttttcaaaatttaatttttaatttgcaaaaattttggggcaaatatggttgtgtgattttacaaccgtatgatctagaagttggtgcaggaacatttcatccggcaactacacttcgatcattaggacctaaaccatggaaagcggcttatgttcagccttcaagaagaccaactgacggaagatatggaaagaatccaaatcgattacaacactattatcaatatcaggtgattgttaaaccgtctc

SEQ ID NO: 298354 - DNA, 892 bp, Unknown
  Bacterial polypeptide expressing nucleotide sequence isolated from the Sargasso Sea
aatgatgcgctgatactcaaaggaaatgagcgtgttttacgcgcacgtctatctgatgcgttgtttttctggaaagcagataaagcaacacatttaagagaatatcgcaaaaagcttggagatatcaccttttataaaggccttggccaagtaagccaaaaagttgatcgaatggaagcgctggcagcctcaatcgcccgctatattccagaatgtagcgaggctgatgcatttcaggcggcaggcttatctaaatctgatttggttactggtatggttggcgaattcccagaattacaaggggtaatgggtagctattatgcatctgcatatgatgtggcaacatcgcaggtggttgcgatacgtgaccattattgtcctcaaggtgccgatgataaactgccagaaactgcagaaggaattgcattgtcgatggctgataaaatagatacacttgttggcttttttgggataaatgttaaaccaaccggatccaaggatccgtttgcgcttcgcagagcagctcttggtattttaagaatgatagatgagcgttcgatttccctgccattagatgaggttttaagtaaggctgctcatttatatggttttgattcatttgaggatgatcttgccttatttataacagaaagattaaaagtcagattaagggatcaaggtatctctcatgatgttgtatctgctgcaattattgatgccgatattcataatcttcaaatccaaattgaaaaagtaaaagcaattgacaagatgctggatacgcctgctggcataaagctattagagggatggagaagagcatcaaacatccttgctgcagaggcaaaaaagggtaacaataacgcagatttaacccaaacctcgatagagg

SEQ ID NO: 298355 - DNA, 538 bp, Unknown
  Bacterial polypeptide expressing nucleotide sequence isolated from the Sargasso Sea
gaggtttggctgaacggaatgaaagtcactcaattcacctatttccagcaagttggtgggcttgagtgctatcccgtgacaggtgagctgacatatggtcttgagcgcattgcgatgtatctgcaaaacgtcgagtcaatgtttgacttggtttggactaagacagccgaagatgccgtcacgtacggggatgtatttctgcaaaatgagcaagaaatgagcgcatataatttcgaacacgcgaataccgattggctgttaagtgcgtttcatgaggcagaagtaacttgtcagcgattattggagtctgcgcttccattgcccgcatatgaacaagttcttaaggctagtcatacatttaacctactcgatgcgcggcatgcgattagcgtgacggagagacagcgctatattttgaaagtaagaaacttggcccgccaggttgctgagagttattttgagtcaagaaaaaacgccgggttccctttagctgacgaaaaattgagagcggaagtattagaaggagccaagggatgac

SEQ ID NO: 298356 - DNA, 658 bp, Unknown
  Bacterial polypeptide expressing nucleotide sequence isolated from the Sargasso Sea
tctgttaaaaaagacgaactttctcattattctaaatctactgttgatatactttatgattttccacacggaaaagaagaattagagggtattgcaaatagatctgattttgatttaggttcgcatactaaaaatcaaaaagattttaatatttctacaaaagttatggaaaataaaaagtcaacaacaaaacttggagttcaggagttagaaaataaaagttggtttataccctttgttattgagccatctgctggtcttgataggggtgtactagcagtgcttaacgatgcatataaagaggaaaaaattgacaataataattccagaatagttcttgcattaaagccacatctgtcaccaataaaggctgctgttatacctttaaaaagaaataatgatcaattagttgaaagagcaaagagtattaaaaaaatcttacaacaaattggagttggtagaattatcttagaaaatactggtaatataggtaaaaattatcgaagacatgatgaaattggaacaccattatgtataacagttgactttgaaacattagaaagcaattcagtaacaattagagatagagatagtatgcaacaaaaaagattatctactgaggaattaaaagaatattttaaaaattattttgattaaa

SEQ ID NO: 298357 - DNA, 276 bp, Unknown
  Bacterial polypeptide expressing nucleotide sequence isolated from the Sargasso Sea
tcaaaaaaaataattctgagattgtaaagcttgcacacaaaataaaagattctatccaatccttaagaattggacgtattgttattgaaaatacaggaaatattggtaagagttatagaaaacatgacgaaattggtacgccaatctgtattactgtagattttgattctctagaaaatgaagatgtaactattcgagacagagatactatggaacaaataagacaaccaatttctaaagtatcagaatttgtaaaacagcagataaataagtgaa

SEQ ID NO: 298358 - DNA, 421 bp, Unknown
  Bacterial polypeptide expressing nucleotide sequence isolated from the Sargasso Sea
tggtgtagatagaatgtttttagctattttctcttcttctttaaaatttgaaaaactagatgacggaactgaaagaaccgtattaaaaacaccatatattttatcaccatataaagttgctttcttgccattattaaagaaagatggacttcccgaatattgcagaaaaataaaagataaattaaagcttaagtttagtactgtttacgatgaaaaagatgctataggtagaagatatagaagacaagatgctattggaacacctttctgtgtaacaatagatcatcaaactatagatgatgacactgttacaattcgagatagagattgtatgaaacaagatagaattcatgtgaatgaaatccataatttcttagattcatcactagatattaataattggttattaaatagtgattaa

SEQ ID NO: 298359 - DNA, 478 bp, Unknown
  Bacterial polypeptide expressing nucleotide sequence isolated from the Sargasso Sea
tttgggttgggaggtttggtgtgacggaatggaggtgagccagtttacttattttcagcaggttggcggtattgattgtgatttagtaccggtagaattaacttacgggctagagaggttagctatgtacgtacaaggcgttgataatgtttatgagctagattggaatgggcgtggagaaaaatacggagatatatttttgcgaagcgagaaggaatttagttcgtttaattttgaagtagcagatacgggtatgctcactaaccacttcagcgatagtgaaactgaatgttcgattctattggcacagggacttactttaccggcctatgaccattgcataaaggcctctcatatttttaatgtcttagacgcccgaggtgtaattagtgtagctgagcggcaagcctatattgcccgtgttagaagcatggttaaaggctgctgtgagttatttttagaaaaagaagcaaaataa

SEQ ID NO: 298360 - DNA, 505 bp, Unknown
  Bacterial polypeptide expressing nucleotide sequence isolated from the Sargasso Sea
ttgggaaagtccaaccttaggtgccgctggtcttggatgggaagtatggtgtgatggtatggaagttactcaatttacttattttcaacaaatggcaggtatggaatgcaatccaatatctgttgaaattacttatggtttagagagattatgcatgtttattcaaagtaaaaaaaatgtttttgatttaatttggaatgatgagggagttttatacaaagatgtttttcatcaagctgaaaaagaattttcagcctataattttgagtatgcaaacacagataaattatttaaaatttttgatatgttcgaagaagaagcaaaatcattaattgaaaagaaaatttctcttccagcatatgatcaatgtttaaaatcaagtcatgttttcaatattttagattctagaggagttataagtgttgctcaaagagcagaatatattgcaaggatcagagatctgacaagagaaattggaaaaatctgggtagaaacacaaaattaa

SEQ ID NO: 298361 - DNA, 844 bp, Unknown
  Bacterial polypeptide expressing nucleotide sequence isolated from the Sargasso Sea
cgaacaggtctcacgcgctgctcaccttgcaaaagcagacctagttagtgagatggtttgcgaatttcccgaattgcagggagtcatgggccaatattacgccagaaatgatggagagaatgaagcggttgctgcggcgatcgcggaacactattccccgttagggccgtctgatgcgtgcccctccggtcctgtgagtgtcgctgttgccctggcggacaagattgataccttggttggcttttgggccatcgaggaaaagccaaccgggtctaaagatccgtttgccttgcgccgggcagcgttgggcgtgatccggctgattacggaaaacggcgcccggttgagacttatgcccgtatttaaccacgcgcatgaattgttaattaggggcaggagcccgagtgacccggcggtccaggccacgtttactttcggccccgatctgctctctttcttcgccgaccgtttgaaggtccatttgcgtgaacaaggcgcgcgacacgatctcatcacggccatctttgcgctcgacggagaagatgacctggtccgcttactggcccgcgtagaggccttggcgtcgtttctagagacgatagatggcgccaatttgctgacagcatataagcgcgccgcaaatattctgcgaatcgaagaaaaaaaagatggtcgccgatatgaccatgcggatggcatagaagataagtatctacgggaaaacgcagaatccagcttgtatcagaagttgatggaaattgggccggcggttacaagcgctcttgagagcgaacggttttcggatggtatgggagtgttggcatcgatacgtctattcgtcgat

SEQ ID NO: 298362 - DNA, 508 bp, Unknown
  Bacterial polypeptide expressing nucleotide sequence isolated from the Sargasso Sea
atgattgggaagtccaacttaggggcagcaggattaggttgggaggtttggtgtgatggaatggagattactcaatttacttatttccaacaaatgacaggtatagaatgtaaacctgttccagttgaaattacctatggtcttgagaggctgtgtatgtttgttcaagaaaaaaataatgttttcgatttggattggaataataatggtgtgaaatataaagaagttttctttcaagctgaaaaagaattttctgcttataattttgagtttgcaaatactgactctttacttaaaagttttgagaatactgaaaatgaatgtaaatctttacttgaaaacaaactttcattaccagcttatgaccaatgtctaaaagctagtcatatctttaatttattagatgctcgcggtgtaatcggtgttgcagaaagaactggttatattacaaggattagagagctcgcaaaaggttgtggggccttatggctaagctcacaaagttgaa

SEQ ID NO: 298363 - DNA, 127 bp, Unknown
  Bacterial polypeptide expressing nucleotide sequence isolated from the Sargasso Sea
caaacatatttgaaaagtttatcagctgttggaattgatataaaaaatcacgacattcgttttgttgaagatgattgggaagtccaacttaggggcagcaggattaggttgggaggtttggtgtgat

SEQ ID NO: 298364 - DNA, 544 bp, Unknown
  Bacterial polypeptide expressing nucleotide sequence isolated from the Sargasso Sea
agagttgccaccaaagtcgttgcgtaaacttgccgaggcatttgctgcaaatttaactcaagagttagaatcgctagaattagcacatcaaggcgtaagctggtatgcatcgcctcgtcgtttaggtttacaagtaaaagcacttgaagctaaacaacaggacaaagaagttgaaaagcgcgggccagcaactaaagcagcattcgatagtgaaggtaaccctacaaaagcagcaatgggttgggcacgcggttgtggtattgatgtaagtgaagcacaaacacttgaaacggataaaggcgcatggttattgcacattgctaaagtagcagggcaagaaactaaaacgctaatggcagatgctatcgcaaaagcgttaagtaaattaccaataccaaagccaatgcgctggggtgcgaataaaacacaatttattcgcccagttcataccgtcactattttatttggtagcgaattgctagaaggtgagatccttggtaagcaagtaagtaaccaacttcaaggtcaccgttttcatcaccca

SEQ ID NO: 298365 - DNA, 850 bp, Unknown
  Bacterial polypeptide expressing nucleotide sequence isolated from the Sargasso Sea
aggtcgctttgaactggatcatgctgataattacgcctctgccctagagcaacaatatgtgctggcagattttgaggcgcgtaaagataaagtgcgtcagcagcttgaagacgcagcgcaaagcttgtcgcttaagccagactataatgaagacttacttgaagagattgcgtcacttgtagagtggcctgttgtgcttcaagctggttttgataaggctttcttagcggtaccgaaagaagcccttatttataccatgaaagacgaccagaaatatgtgccactactagatagcaacggtgctctttcaaacactttcttgttcgtaacgaacatcgaaagtcgcgatgcgtctcaagtaatttctggtaacgaaaaggttatccgccctcgtctggcagacgccgagtttttctttaacagcgataaaaagacaacattagaaagccgccttgaaagcttagaaaccgtgttgtttcaaaaacagcttggtacgctaaaagaaaagtctgagcgtatatctgccctatcggcgtttatcgcttcgcaaatagatgcgaatgaatcacaagctgcacgagcaggtcttctagctaaaaccgatttaatgtcgaacatggttatggagttcccagacgttcaaggtgttatgggtaaatactatgcactaaacgacggtgaagatgcgcctgttgctgaagcgctttatgaacagtatatgccgcgttttgctggtgacgcacttcctagttcaggcgttagcgcatcggtcgcgcttgctgacaaactagataccctagtgggtatttttggtattggccagttacctaagggtgataaagacccgttt

SEQ ID NO: 298366 - DNA, 287 bp, Unknown
  Bacterial polypeptide expressing nucleotide sequence isolated from the Sargasso Sea
aatggataaaaataaatcatttcaaaacattattatgaaactgcagtcttactggatggatcaaggatgtgttttaattcaaccttatgatactcaagttggtgcaggaacatttcatcctgccacagttttaagagttttgggtccagatcctatttggaaagcagcttatcttcaaccatgccgtagaccaacagatggaaggtatggagaaaacccaaatagactgcaacattattatcaatttcaagttattattcaaccatccccagataacatacaaaacc

SEQ ID NO: 298367 - DNA, 311 bp, Unknown
  Bacterial polypeptide expressing nucleotide sequence isolated from the Sargasso Sea
tcacctctcaccaatcaaagctgctgttataccaataaaaaagaatgattcgacaattgttgacttttcaaagcaaattaaggataagttgcaaaaactagcccttggtagagttgttttggaaaatacaggaaatattggtaaaagttatcgaaaacacgacgaaattggtactccgatctgcataactattgattttgacacccttgaagatggcacagttactgtcagagatagggattcaatggagcaaaagagagtaaaaattgataatttagatgatcttttaaaaaatctgttactaaagtagt

SEQ ID NO: 298368 - DNA, 940 bp, Unknown
  Bacterial polypeptide expressing nucleotide sequence isolated from the Sargasso Sea
aatttcatgctctatctgcaaactgatttgctctcagatattggtgggagaatttccagaacttcaaggtgtaatgggtggttactttgctgagtcgcaaggttttgataaagatgtttctctcgcgataaaagaacattatttacctaattcactcgaaagtaaagttccaacaaaaccttttagtcttggtctttcattaaccgataaattggatacattagttggtttctttggtgtaaatcaaaaacctacaagttcaaaagatccttttgctttaagaagagcagcattaggtgtaatccgactaatacttgaaaataagaaacatataagaattaaagatctaataaattattctttacttttgtaccaagaacaaaattataaatttgataatgagtctgtacaaaatggtttatctgaatttctattagaaagattaaaatactacatgaaagacaaagcaattagatctgacataattaatgccagctttaataataaaaatattaataacataaatgaaatttttagaaaatcttttgctttaaacaaaattataaataaagaaagtggaatagatattatttcaagttataaacgagcatcgaacattatcgagaatgaattaaaagataataaactagaactagcagatactgctgatcctggaatatttaagaatgattttgaaaaaaatttatttaagaaaataaaagaattaaaaaaatattttacaaatatagataacgatgagaattatgaaacgactcttgataaccttaaaaccgcaaaacccataatttttgacttttttgataatataattgttaatgaccatgacgaaaatattagaaaaaatcgattggaactccccttcaatgtttgtagaacatttgaaaattatattaatttttctaaaatcgaaagtgcctaa

SEQ ID NO: 298369 - DNA, 252 bp, Unknown
  Bacterial polypeptide expressing nucleotide sequence isolated from the Sargasso Sea
tatggtttctaaaataaaaaaaccaaaacaaaaaaaacaaacatttcaagaaacaattttaaatcttcaaaaattttggagtaaaaaaggatgtatacttttgcagccttatgacatggaagtgggtgcaggtacatttcatccagcaacaactcttagatctcttgggccaaaaccatggaaagcagcttatgttcaaccttcgagaagaccaacagatggaagatatggagataatccgaatagattaca

SEQ ID NO: 298370 - DNA, 897 bp, Unknown
  Bacterial polypeptide expressing nucleotide sequence isolated from the Sargasso Sea
agaatgggacagccagttcctgaactgcttcaggaaagtgccttaaaatggatttctcagcttaattttccaaaaaatatgcgctggggatcttacaagacccgttatattcgtcctatccgctgggttgtctctctatggaacactaaagtggtgccgataaaactagaaatgctggtggctggaaatcaaacacggggtcatcgatttttgagttctggagacatcacgataaaacatgcatcagattatgagcagcttctaaatgatcttaaagtaattgctgatttcgagaaaagacgttactccattgtctctcagatcagaaaaattgaaaataagcacaattgttatgtagagcttgatgaaaatctacttaatgaagttacaaatttagtagaatggcccacagttctgattggaaactttgaagaggagtttttagaactaccagatgaagttttgataacaagcatggaggtccatcagcgttactttccggtattcaatcgcaaaaagaaaaacagtcctggagacaataaattgctacctaattttataactgttagaaacggtaatagtaagtcacttaatactgtaaggcgtggcaacgaaaaagtacttcgtgcaagactaagtgattcccgttttttctaccaagaagatcaaaaaagcatgtttgatgagtacaataaaaaagctgagaaagttgtgtttttccaatcaaggggttctcaacttcaaagggttcatcgcataactcagatcagcacattcatctcgtttaaactaaatttttctccagtacagcaaaagcatgtcaagcgaattgctgaactcagcaaatttgatttaggaaccagaatggtcaatgagtttccaagaactcccaaggag

SEQ ID NO: 298371 - DNA, 943 bp, Unknown
  Bacterial polypeptide expressing nucleotide sequence isolated from the Sargasso Sea
gtattcaggccatgaagacacattctcagaccctatggttgattgcaaatcttgtcagaaaaggtttagagcagaccaagtgccacctgaatgtaaagaagaggatcttactgagcctagacaatttaacctaatgtttaaaacaaatgtgggcccaatagacgatggtgataactttgcatatttaaggccagaaacagcacaacaaatttttactaattttaaaaacataatagattctacatccaaaacactgccatttggtatagctcaaactggcaaagcttttaggaatgaaataacgccaagaaattttattttcagagtgcgtgagtttgaacaaatggagctagaatattttgttaccccaggagatgatgaagaagcgcattcttcatgggtacaaaaaaggctggattggtgggtaaatcaaggtgtacccatgaaaagcattcaattatatgatgtacccaaggatgagcttgctcattattctaaaaaaacgattgatataatgtacgaatttccacatggtgttgaagagttggaaggtatagcaaacagaactgattttgatcttggatcacattcaaaaaaacaatcagagttaaatataaatgcttctgtaacaaaaaataaagattcaaatagtaaactagcaattaaagatgaaaatggaggttgggttgttccatttgttattgagccatccgctggagttgaaaggggttttttagcaattttaaatgaatcattcactgtagaaaaactttcagatggcaaagaaagaatagtccttaaattaaaaccacatcttgcacctatcaaaatagctgttattcctttgaagaaaaataatgccgaaatggtagcttatgctaagaaaataataaaaaaattacaagctttaaaaataggcagagtggtacttaaaatacaggaa

SEQ ID NO: 298372 - DNA, 718 bp, Unknown
  Bacterial polypeptide expressing nucleotide sequence isolated from the Sargasso Sea
gatgaaaattacctaaaattacctaaagagatcatcaaatcaactttgcaatctcatcaaagatatttcactttaattgatcaaaaagatagaatgcgaaatgaatttcttatagttaccaataataaggatgataaaaaattaattaaaataggcaatgaaagagttgtagaggctaggctttctgatgcaagatttttttgggaaaaagataggtctttaaatctaataaaacaaattaacaaattaaaaaaggtaaatttttatgaaaatttaggatcaatttttgataaaactcaaaggttaagaaagatggcatattttatttccgatcaactaaatttgaataaagaaaaagtagaaatagcagcatcagtttctaaatctgatcttgtttcaggattagtgggtgagtttccagaacttcaaggtgtgatgggaaaatattttgctattagccaaggtttcgaagaagaagtatctcgtgctataagtgaccattatttaccaactaatatttcatcacctgtttcaaaaaaaccagtcagttatgctctttcaattattgataagctagatactttggttggttttttcttaataaatcagaaaccaacaagttcaaaagatccattcgcactaagaagagcagcaatcgggttgttaagaactataattgaaaataatcttgtggttaaattatcagacttaattgagt

SEQ ID NO: 298373 - DNA, 450 bp, Unknown
  Bacterial polypeptide expressing nucleotide sequence isolated from the Sargasso Sea
agaagaaaacacttcatttattccatacgtttattgacccttcagctggagttgatagaggagtattggctgtactaaatgaagcctttactaatgaagaaatttcgaatggtaactctagaattgtgctaaaattaaaacctcatttatctcctattaaagctgcggtaattcctcttaaaaaaaataatgatcaaattgttgaaaaagctaaaaatattaagaatcaattacagagccttgggttgggaagggtgatgctcgagaattcgggaaatattggtaaaaattatagacgccatgatgaaattggaacaccaatttgtattactgtagattttgagactttagaagatgactctgtgactatcagagatcgtgactctatgaaccaagagagagttttgataaaagatttaaatcaattttatcaaaaatattttcattaaa

SEQ ID NO: 298374 - DNA, 904 bp, Unknown
  Bacterial polypeptide expressing nucleotide sequence isolated from the Sargasso Sea
gaatccaaacatgactgcatggttgagatcgcggatgaccttcttgaggaggtgaccaatcttgttgaatggccccaagcgatgatgggaagttatgatggaaatttcctcggactgcctgaatccgttctggttacgagcatggcagtccatcaacgttacttcccggtttattcgaatcaaacagactcaggagggaataaactactccctcaattcattgccatccgcaacggcaatgagcaacaccttgaaacggtttgccagggcaacgaaagagtcttaagagcccggctcagtgacgcacgctttttttatgatgaagaccagaaaaaaccgcttcaatattttcaggaactgcttgaacgggtggtgtttttccagaaaagaggaagccaacatgaacgggtgcagaggattcaaactctgagtttgaaacttggagaacttcttcaattcaacgaagaagaacagcaaaaggtcagaaggattgctgaactctgcaaattcgacctgcagacccagatggtttatgaatttccggaactgcagggaatgatgggagaagtttactctgtgttgaaaggtgaggattcacagatgtccaggggaattcgagaacattatttcccgcgaacttcgggggacggcctcccttccgatcagttgactttacctgttgctcttgctgatcgcatggacatgctcagcgttgcgttttccctgaagatgatccccagtggatccgcagatccctacgctttaagaagaatggcgcagggtgtggttcaaattgttctaggcaagcaactccccttggggtgggaagagctttcctcactttcggttcaaatcctcagggaccagcaggatttcaccaatgaaaccgacatcctcgaaaagc

SEQ ID NO: 298375 - DNA, 322 bp, Unknown
  Bacterial polypeptide expressing nucleotide sequence isolated from the Sargasso Sea
gctaaaattaaaacctcatttatctcctattaaagctgcggtcattcctcttaaaaaaaataatgatcaaatagttgaaaaagctaaaaaaattaagactcaattacaaaaccttgggttgggaagggtgatgctggagaattctggaaatattggtaaaaattatagacggcatgatgaaattggaacaccaatatgtgttactgtagattttgagactctagaagatgactctgtgactattcgagatcgtgactccatgaaccaagagagagttttgataaaagatttgagtcaattttatcaaaaatattttcattaa

SEQ ID NO: 298376 - DNA, 331 bp, Unknown
  Bacterial polypeptide expressing nucleotide sequence isolated from the Sargasso Sea
attgaagtttttatcttttcaagaaataataatgaatttacaaaaattctggggaaaatatggatgcgtaatcctacaaccatatgacttagaagttggcgctggcacattccacccagcgacaactttaagatctttggggtctaaaccatggaaagcagcttatgttcaaccttcaagaagaccaacagatggaagatatgggaaaaatccaaatcgattacaacattattaccagtatcaagttattataaaaccatcacctgacaatattaaacaaacttatttaaaaagcttatctgcgattggtatcaatgttaagaatcatgat

SEQ ID NO: 298377 - DNA, 229 bp, Unknown
  Bacterial polypeptide expressing nucleotide sequence isolated from the Sargasso Sea
atggtctctaaaaaaaaaaataaaaaacctaattttcattcgtttcaagataccatattaaatttacaaaagtactggagtaaacatggttgcgttattttacagccctatgatatggaagtaggagccggaacctttcatcccgccacaactttgagatcattaggctctaggccttggaaagcagcatatgttcagccttcaaggagacctacagatggaagatagg

SEQ ID NO: 298378 - DNA, 592 bp, Unknown
  Bacterial polypeptide expressing nucleotide sequence isolated from the Sargasso Sea
gacggggtaaaccctgaaatagcggggcgcgctgcgcggctcgccaaggcggatcttgttactggtctggttagtgaattcccggaattacaaggcattattggtggctattacgcagccgccagtggcgaggttactgccgttagtagttctataaccagccattatcgcccgcaaggcccgaccgataatttaccagtaacaccaacagcgatggtcgtcgcacttgcggacaaagttgatacccttgttgggttttttggcattgatgccaaaccaaccggatcaaaagatccgtttgctcttcgtcgggcggcgttgggggttattcgcattattgttgacgggaaattgaatttgccgctcgctatagtgttgcaagccgctgccaagggctatggttttgcttcggtcgatcctgatttactgccatttgtccatgatcggctgcggggctatcttcgcgatcagaagatgcgtcatgatgttgttgcagcggcactggctaatactgatgtggacaatattctccagatggcggcccgagcgacagcgttgacggtgtttttggccggtcctgatggcagtggac

SEQ ID NO: 298379 - DNA, 835 bp, Unknown
  Bacterial polypeptide expressing nucleotide sequence isolated from the Sargasso Sea
aatattttccatgccaagctcggcgccatggcgcagaaggtggaccgcatcaccgctctggctggcgaacttgccccgttcatccccgattgcgacccagacaaggccatacgcgccgcgcaccttgccaaggccgacctggtcactgaaatggtctacgaatttcccgaactgcaggggaccatgggccggtattacgccctaaatgacggcgaggattcaggtgtcgcggacgccattgctgatcactattccccggccgggccgggggacgactgtccagcggcgccgatatcggttgctgtggcactggccgacaagctggacatgctggtcggtttcttcgccatcgacgaaaaaccgacgggttcgcgcgacccttatgcgcttcgccgggcggcgctcgggattatccggctggtgctggaaaacaaactgcgtctgccgctgcgcgaggcattccgaaaggcatattggggctacaacgaaacagtccccgatttcgaagccgtaattgatggcggccacaagccgaaggttctggagcaggacctgctagatttctttgccgaccggctgaaggtccatctgcgcggacgtggggtccgtcacgatcatgtagaagctgtcttttccctgggcggggaagacgatctggtgcggcttcttgcccgtgtcgatgccctctccgacttccttggcacagacgatggcgagaacctgcttgccgcctacaaacgcgcctccaacatcgtggcgattgaggaaaagaaagacgggatttcctttgatggcgacgtatcccgagaaaagcttgcgcaggacgaggagcgcg

SEQ ID NO: 298380 - DNA, 526 bp, Unknown
  Bacterial polypeptide expressing nucleotide sequence isolated from the Sargasso Sea
aatcaaaatgattttgatatttctgctaatgttaaaaagaatcagcattcaactacaaaattaggagtgcaaaatttagaagaaaaaacttcatttattccatatgtaatagaaccctctgcaggagttgacagaggtgtgctggctatactgaatgaagctttcaataatgaaaaaattgaaaatggcaactctagagtagtgctaaaattaaaacctcatctggctcccattaaagcagcagtaattcctcttaaaaaaaataatgaacaaatagttaaaaaagctaaaacaattaagaatcaattgcaaaaccttggacttggaagagttatgcttgagaatacaggaaatattggaaaaaattatagacgtcatgatgaaattggtacaccaatttgcattactgtagattttgagactttagaagatgattctgtaaccatcagagatcgcgactccatgaaacaacaaagagtttttatcaaagatataaatcaattttatcaaaaatatttttattaga

SEQ ID NO: 298381 - DNA, 616 bp, Unknown
  Bacterial polypeptide expressing nucleotide sequence isolated from the Sargasso Sea
aaaatgtccagcatgtgggtctagcgatctaacagaacctcggccatttaatcttatgtttaaaaccacggttggtcctgtagatgatggtagtaattatgcctacctaagaccagaaaccgcacagcaaattttcacaaattttaaaaatatattggactcaacaagtaaaactattccttttggaatcgcgcagataggtaaagcgtttagaaatgaagtcactccaggcaaatttatattcagagttagagagtttgaacaaatggaattagaattttttgttgaaccaggtaaagatgatgagtggcataaatattgggtagacaagaggtattcatggtggattgatcaaggcatatctgaaaaaagattaaaaaagctagatgttgaagatgctgacctatctcactattcaaaagccactgtagatcttatgtacgaatttccacatggacttgaagagttagaaggtatagcaaacagaactgattttgatcttggttctcacactaaaaatcaaaatgactttaaaatatctgcagatgtaatgaaaaataaccaatcaacaacgaaattgagtattcaaaatttagagagtaaagaatggtatatt

SEQ ID NO: 298382 - DNA, 829 bp, Unknown
  Bacterial polypeptide expressing nucleotide sequence isolated from the Sargasso Sea
aatgaagttttagaagttcagaatcctgatgatttttttgatttattgaaacgtaatagggtaatagctattcgaaaagaaagaaaagaaacaattgaaagtttaataaatcaagcatctaaatctttaaatctgaaacctgacctttcagaaggattactaaatgaactaactgatttagttgaatggccagacttaattattggcaaatttagtgatgaatttcttgatcttccggttgaagttctctcaacagttatgaaaagtcatcagagatacgttcctcttttattgaaaaacaaaagtttttctaaactagatttaagctctgaaaaaaatattagtacaactttctgcgttatttcaaatggtcttgaagaatcaaataataatattgttaaaggtaatgagaaagtattaagggcaaggttttcagatgcaaagttttttgtggaaagtgacaaaaaagttgcttcaatcaaaagaaatcaaaagcttaaatctgtttcctatttgaaaggatttggaaatatatttcagagggttgaaaggatagaggaagtcactaaaaaaattcttaaatttttgaatgataagtctttagaagaaaaaaaaataatagaagctgccaaatactgtaaaaacgacttatgtagcgaaattgttttcgaattccctgagctgcaaggaataatgggcggtaaatatcttaaatatgagggatttagtgaggatgtttgcttggctgtcgctgaacattatttaccatctttttataaagatgctttgccctccactaaaatatggtgcaatagtttccatagcagat

SEQ ID NO: 298383 - DNA, 742 bp, Unknown
  Bacterial polypeptide expressing nucleotide sequence isolated from the Sargasso Sea
ggccaagccacgtttgagctagaccatgccgacaactatttagctgcactaaaagagcaaggaaaagtactggctgacttccatttacgtaaatcaataatcaaagcagatgcagaagccgcagcggctaagattggtggcgtagccgatatacaagaagacttacttgaagaagtggcctcattggttgaatggccaatagtgttaaccgctcactttgaagaaaagtttttagccgtaccgtctgaagcactggtttacaccatgaaaggcgatcagaaatacttcccagtatttgataacactggcaagttattacctaactttatctttgtcaccaatatagaatctaaagatccacaacagattattgcaggtaacgaaaaggtcgttcgtcctcgcctagccgatgctgagttcttctttaatacagataaaaaacacactctagagtcacgtttaactagcctagaaaccgtggtgtttcaaaaacaacttggtaccttaaaagcgcgagttgaacgtatttctgaattagcaggatttattgctaccgagcttaatagccaaggtgtaaacaccaacagtgctgatgcaagccgcgccggcctattgtctaaaaccgacttaatgaccaacatggtgatggagtttactgacacccaaggcaccatgggaatgcattatgctcgcctagacggtgaaacagatgccgttgctattgctttagaagagcaataca

SEQ ID NO: 298384 - DNA, 716 bp, Unknown
  Bacterial polypeptide expressing nucleotide sequence isolated from the Sargasso Sea
taaaagaatagaatggtgggttaatcaaggaataaaaaaagaaaatttaaaaaaaattgaagtagaaaaagatgagctagcacactactcaaaaagaactgttgatatcaattatgtgtttccacacggcgaagaggaacttgaaggtgttgcaaatagaacagattttgacttaggttctcacactaaaaatcaaaacgattttaaaattacatcagaagttatgaaaaactcttcttcaactacaaaactagctgttcaagatttagaagaaaaaaaatggtatattcctttcgttattgagccatcagctggtgttgatagaggagttctggctttgttaaatgaagcttatcgtgaagaaaatgtagataaagataataaaagaatccttttatctctaaaacctcatctttcacctattaaagctgcagttattcctcttaaaaagaataatgaggaattagttaatttatctaaagaaataaaatctaatctgcagaaattgggattaggtagagttgttctagaaaattcaggaaacattggtaagaattatagaagacatgatgaaataggaacaccaatttgtttaactacagattttgaaactctagaagataaaagtgttactgttagggatagagatactatgaaacaggaaagagtttctatcgaaaatttatctgaatattacaaaaaatattttaattaat

SEQ ID NO: 298385 - DNA, 804 bp, Unknown
  Bacterial polypeptide expressing nucleotide sequence isolated from the Sargasso Sea
aaaggttatatcaaatctggaaatgagagagttatagaagcaagactaagtgatgctgcttttttctggaagaaaaataaaggatataatttagttaaacaaatatcaaaacttaaaacaatgaagtacttcaaaggacttggaacatactttgataaaattcaaagaatgagaaaactttctggaatgatttctgatgaattgttaattagtaaagagaagatagaattatcaagttcaatttgtaaagttgacttaacttcagacctagtaggagaatttccagaactacaaggaactatgggtggatattttgcagaagctcaaggatttgaaaaggatattgccttagcaataagtgaacattatttaccgaatggtttagaaagtaaagttccaaaaaaaccattcagtatagctttatctcttactgataaattagatacactggttggattttttggaataaatgaaaaacctaccagctcgaaagatccatttgctctgaggagagcagcgcttggaataattagattgataattgaaaataataaagaacttaaattagtagatttaattaattattcgcttttattatatcatgaacaagattttaaacttgaaaatcatttagcaaaaaaagaattgattgattttttattagatagattaaaatattatatgaaagagaaaaatattaggtcagatattataagtgcaagccttgattcatttggcatcgatcatattactacaatttataaaaaatcttttgcattaaataaaattataaataaagaaact

SEQ ID NO: 298386 - DNA, 523 bp, Unknown
  Bacterial polypeptide expressing nucleotide sequence isolated from the Sargasso Sea
atttgtcgaagatgattgggagagtccaactttaggagccgcaggtttgggttgggaagtatggtgtgatggtatggaaattacacaatttacttattttcaaaagatgacaggaatagaatgtaaaccaatatcggtagagctgacatatggtttagagagaatttgtatgtttgtgcaaggaaaaaaaaatgtatttgatattgactggaatgataatggagttaaatatggagacgtttatcttcagtcagaaaaagaattctccgcttataattttgatcaagctaacaccgactctctcctaaaaaattttgaaatcgcagaacaggaatgtaaaaatcttcttgatcaaaaacttcccttgccagcttacgaccaatgtttaaaagctagtcatatttttaatttactagatgcaagaggtgtaatcgcagttgcagagagaactggttatataaatagaattcgagaattagcaaagggagccggatcaggctggttagaaaatcaagaaagataa

SEQ ID NO: 298387 - DNA, 584 bp, Unknown
  Bacterial polypeptide expressing nucleotide sequence isolated from the Sargasso Sea
ggaggagcttgaaggtattgcgaatagaactgattttgacttaggatctcatactaaaaatcaaaatgaatttaaaattgagtcaaaagtcatgaaaaattcttcatccacaacaaaattggccgttcaaaatttagaagaaaagaaatggtatataccatatgtgattgagccttcagctggtgttgataggggtgttctcgctttactaaatgaagcttataaggaagaaaatactgataaagataataaaagaattcttttatctttaaaaccgcatctttcgccgattaaagctgctgttattcctcttaaaaagaataacgacgaattagttaatttatctaaagaaattaaatcaaatttgcaaaaacttggattagggagagtggtattagaaaattcagggaatattggaaaaaattatagaagacatgatgaaattggaactcctatttgtgttactgtagattttgaaacattagaagataagtcagtgactgtaagagatagagatacaatggagcaaaaaagaattaacttagatggtttagaaaattattatagggattattttaattaac

SEQ ID NO: 298388 - DNA, 373 bp, Unknown
  Bacterial polypeptide expressing nucleotide sequence isolated from the Sargasso Sea
tatgaagcattcaacgtcacttcaaaacatcatcatggctttaaatgaatattggaatcgccacggctgcctgctgatgaatccatatgatgtggaaaccggtgcaggaacgatgaatccaatgaccacactccgtgcagttggacctgaagaatggaatgtcgcctatgtggaaccttcccgccgccctgcagacgggcgatacggtgagaacccgaaccgtctctatcaacatctgcaatatcaagtgatcctgaaaccttctcctgacaacgtcgaagaactctacctaaaatcacttgaagaacttggagtggatcctctgcagcatgacattcgttttgtggaagaaactgggaggctccgacactag

SEQ ID NO: 298389 - DNA, 835 bp, Unknown
  Bacterial polypeptide expressing nucleotide sequence isolated from the Sargasso Sea
gacgaccaaaaatatgtgccgctgctagatagcgatggtgcactttcaaacactttcttattcgtaacgaatatcgaaagtcgtgatgcgtctcaagttatttcaggcaatgaaaaggttatccgccctcgtcttgcagacgctgagttcttctttaacagcgataaaaagacgacattagaaagccgccttgaaagcttagaaaccgtgttgttccaaaaacagcttggtacgctaaaagaaaagtctgagcgtatatctgccctatcggcgtttatcgcgtcgcaaatagatgcgaatgaaacacaagctgcacgagcaggtcttctagctaaaaccgacttgatgtcgaacatggttatggagttcccagacgttcagggtgttatgggtaaatactatgcgctgaacgacggtgaagatgcgcctgttgcagaagcactgtatgaacaatacatgccgcgttttgctggtgacgcacttcctagttcaggcgttagcgcttcggtcgcgcttgctgacaaactagatactcttgtgggtatttttggtattggccagttacctaagggtgataaagacccatttgcgcttcgtcgtgcagctataggtgtactacgtattgtcactgagctgtcactgccgctagatcttgaaacgctagtaagcaaagctatcgatgtgtatggcgataagttaacaaatgctgaaacacaatctcaggttgttgattttgtattgggtcgatttactgcgcttcttcaagatcaagctatcgccattgacgttattcaggccgttgctgctcgtcgccctactaagccagctgactact

SEQ ID NO: 298390 - DNA, 951 bp, Unknown
  Bacterial polypeptide expressing nucleotide sequence isolated from the Sargasso Sea
gattttgaatttgatgaatgtgatccaaatattcaaataagtaaaaaatcaaaaagtcataggctagtcaatgaagttttagaggttgagaatcctgataatttttttgaattgttgaaacgaaatagagtattcgctatgcgaaatgaaagaaaagaaaaaattgaaagtttaataaatcaggcatctaaatctctaaatatgaaacctgacctttctgaagaattgcttaatgaactaactgatttagttgaatggccagacttaattattggtaaatttagtgaagactttcttgatctcccggttgaagtcctatcaaccgtcatgaaaagtcatcagagatacgttcctcttttattaaaaaataatactttttcaaaactagatttaagctctgaaaaaaatattagtacaagttttgttgttatttcaaatggtcttgaagaatcaaataataatattgccaaggggaatgagaaagtattgagggcgaggttttcagatgcaaagttttttgtagagagcgataaaaaagttgcttcaatcgaaagaaatgacaaacttaaatctgtttcctatttgaaaggactgggaaatatttttcagagagttgaaagaatagaggaagttactaaaaaagttcttaaattcttagatgataagactttagaagaaaaaaaaataatagaagctgctaaatactgtaaaaatgacttatgtagcgaaattgttttcgaattccctgagcttcaaggcataatgggtggaaaatatcttaaatatgagggatttagcgaggatgtttgcttggctgtggcggaacattacttaccttctttttataaagatgctttgccctctacaaaatatggtgcaatagtttctatcgcagataaggttgaaaccctaataagtatatttatttctggtaagcgccccagtggatca

SEQ ID NO: 298391 - DNA, 797 bp, Unknown
  Bacterial polypeptide expressing nucleotide sequence isolated from the Sargasso Sea
catgggccaatactacgccgccaatgacggcgaaccggaagacgtggccaaggcactgaacgaacagtacatgccccgtttcgctggcgacgatttgccaacaaccctgaccggctgtgccatcgccatcgcggaccgtctggactccctggtgggcctgttcggcatcaaccagccgccatccggcacacgggacccgttcgccctgcgccgggcctccctcggggtgctgcgcattatcatcgagcgcgaactgccgctggacctgcaaacctgctgcgagtgggccgaagagaacttcaccgtgctgaccgagcagaacaccgccagcaccgtggtggactatatgctggagcgcttccgtgcccactacgacgagcagggcattggcgccgaggtctacctggccgttcacgcccgccgtccgacccgcccgctggatttcgaccgccgggtaaaagcggtggaagccttccggcagctgcccgaagcgcaggccctggccggcgccaataagcgggtttctaacatcctgaccaaacagggtggcgacagcatcggcgaaacggtcgacgccagcctgctgcaggacagcgccgaaaaggccctcgccgagcaggtcgaccaacaggccgcgaaagttctgccgctgttcgagaacggcgactacgccagtgccctgagctcactggccagcctgcgtgcaccggtggacaacttctttgatgaagtgatggtcatggccgacgacgaggcggtaaggaacaaccggctggcgttgctgaaccgcctgcgca

SEQ ID NO: 298392 - DNA, 355 bp, Unknown
  Bacterial polypeptide expressing nucleotide sequence isolated from the Sargasso Sea
aatgaatatcgaaaaaattgtttctttatgcaagcgtcgcggttttgtttttcaaagctcagagatttatggtggctttaaagcggtttatgattatggaccattaggtgttgcactcaaaaacaatatctccaaaatttggtggaaagctatgacgcaacaccatgaaaatattgttggattggatagtgcaatttttacgcatcccaagatttgggaagcgtcaggtcatgttggagcttttaatgaccctttagttgattgcaaacaatgtaaagcgcgttaccgagttgatgaattaagcacagaaactgatccagattggggaaaaatgacttgtccaaactgcggctca

SEQ ID NO: 298393 - DNA, 262 bp, Unknown
  Bacterial polypeptide expressing nucleotide sequence isolated from the Sargasso Sea
ctaggagaaaaagcaaaagaaatttaccattctcttaaacttgactttcagtgtttatacgaagaaaaagactcaattggtaaaaggtatagacgaaatgacgccataggaacaccattttgcattactgttgatcatgaaacccttgaagataataaagttactttaagagagagagactctatgaaccaaaaaagggttttaataaaagatttatccaccattatagaccaaaaaaccaacatgaaaactttattttaac

SEQ ID NO: 298394 - DNA, 764 bp, Unknown
  Bacterial polypeptide expressing nucleotide sequence isolated from the Sargasso Sea
tttgatgtttaaaacaaacataggtccagttgacgatggcaaaacatttgcctacctaaggcctgaaacagctcaacaaatttttacaaactttaaaaacgttgttgactcaacttctagaaatgtaccattcggtattgctcaaataggaaaggcttttagaaatgaaattacattaaaaagtttcatcttcagagtaagagaatttgaacaaatggaattagaattttttgtagttcctggtacagatgaagattggcataaaaaatgggttgagttaagaattaattggtgggagaaacaaggagtttctaaaaaaagcttagaactttatgaagtgccaaaagatgaattagcacattattctaaagctacagttgatatcatgtacaaatttccacacggagtagaagagctggaaggcattgctaatcggaccgattttgacttaggttctcactcaaagaatcaagatgagctaagccttaagtcaaaagtttctgaaaataatgaatcaaatgctaaattagcattaaaagatgaaaataataactggatggttccttttgtaattgagccttcagcaggtgttgatagggctattttagctatattaaacgaagcttatcatcttgagaaaatagaagaaaaggaaagagttgttttaaaattaaaaccgcatctttctcctataaaagcagctattattccattgaaaaaaaatgacgaaaagatagtagcaaaagccaaagaaataaaaaata

SEQ ID NO: 298395 - DNA, 928 bp, Unknown
  Bacterial polypeptide expressing nucleotide sequence isolated from the Sargasso Sea
acttgagtcgcaatatgtcattgcagactttgaagcgcgtaaagcgaagactcgtcaacagttagaagatgctgctgcagcgttatccctcaagcctgactatgatgaagcactactcgaagagattgcttcacttgttgaatggccagtggtcatgcaggcaggatttgatgaaggcttccttgcggtaccaaaagaagcgctcatctatacgatgaaagacgaccagaaatatgttcctcttcttaacgccaatggcgacttggtgaataccttcctatttgtgagtaatattgagagtagcgatcctattcaggtcatttcgggcaatgaaaaggttatccgccctcgcctagctgatgctgagtttttctataacagcgatagaaaagtatccttagagagccgtctcgatagcctaagcaccgtgctatttcaaaagcagctcggcacgcttaaagaaaaatcagagcgcatttctgtgctatctggctttattgcagcacaaataaatgcagacgaagcacatgcgactcgtgccggactgctagctaaagccgacctcatgtccaacatggtcatggaatttccagacgtacaaggcgtaatgggtaaatactatgccttaaacgacaatgagcactctgacgttgcgcaagccctgtacgaacagtatatgccacgtttcgccggtgatactcttccgagcaacggcgtgagcgcctcggtagcgcttgctgataagctagatacgctagttggtatattcggtatcggccagctgcctaaaggtgacaaagacccctttgcccttcgtcgtgcagccattggtgtactgcgtattatcactgagttatcacttccacttgatttaactaccctagtaacaaaatcaattgaagtttatggcgaaaaactttcaaatgac

SEQ ID NO: 298396 - DNA, 622 bp, Unknown
  Bacterial polypeptide expressing nucleotide sequence isolated from the Sargasso Sea
gctactgtagatcttatgtatgaatttccacatggacttgaagaattagagggaatagcaaatagaactgattttgatcttggttctcatacaaaaaatcaaaatgactttaaaatatcagcagatgtaatgaaaaataaccaatcaacaacaaaattgagtattcaaaatttagaaagtaaggaatggtatatcccttatgttatagaaccctccgctggtgttgatcgaggtgtatttgcactgctcaatgaagcttacaaggaggaggatttagaaaacggaaacaaaagaattgtattaagtttaaaaccacatttgtctccaattaaagcggctgtaattcctctaaaaagaaataatgaggatttagttggtaaagcaagtaagattaagaatgaacttcaagcgctaggtatgggaagggtaattttagaaaactctggcaatattggaaaaggttataggcgtcatgatgagattggtacacctatttgtataacagttgattttgaaacaatcgaaaatgatacagtaactataagagatagagatactatgtcacaaaaaagggtctcatctcaagatctacaccttgaattcaaaaaggtttttaattaac

SEQ ID NO: 298397 - DNA, 599 bp, Unknown
  Bacterial polypeptide expressing nucleotide sequence isolated from the Sargasso Sea
tgtttcctcatgggaagaggaactgaaaggagtggccaatagaactgactttgatttaggttctcacactaaaaatcaaaacgattttaaaattacatcagaagttatgaaaaactcttcttctacgacaaaactagctgttcaagatttagaagaaaaaaattggtatattccttacgttattgagccatcagctggagttgatagaggagttcttgctttgttaaatgaagcttatcgtgaagaaaatgtagataaagataataaaagaattgttttatctctcaaacctcatttatcacccattaaagcagctgttattcctcttaaaaagaataatgaagaattagttaatctatctaaagaaataaaatctaatctgcagaaattgggattaggtagagttgttttagaaaattcaggaaacattggtaagaattatagaagacatgatgaaataggaacaccaatttgtttaactgtagattttgaaactctagaagataaaagtgttactgttagggatagagatactatgaaacaggaaagagtttctatcgaaaatttatctgaatattacaaaaaatattttaattaat

SEQ ID NO: 298398 - DNA, 868 bp, Unknown
  Bacterial polypeptide expressing nucleotide sequence isolated from the Sargasso Sea
ggtgggagcatgaaattttcaagacctattaggtggattgcctctatttataatgatgaaattcttgattttgaatttgatgaatgtgatccaaaaatcaaaataagtaataaaacaaaaagtcataggttaatcaatgaagttttagaagttcagaatcctgatgatttttttgaattattgaaacgaaatagagtaattgctattcgaaaagaaagaaaagaaaaaattgaaagtttaataaatcaggcatctaaatctttaaatctgaaacctgacctttcagaaggattactaaatgaactaactgatttagttgaatggccagacttaattattagcaaatttagtaatgaatttcttgatcttccggttgaagttctttcaacagtcatgaaaattcatcagagatacgttcctcttttattcaaaaacgaaagtttttctaaactagatttaagctctgaaaaaaatattagtacaactttctgcgttatttcaaatggccttgaagaatcaaataataatattgctaaaggtaatgagaaagtattaagggcaaggttttcagatgcaaagtttttcgtagaaagtgacaaaaaagttgcttcaatcgaaagaaatgaaaagcttaaatctgtttcatatttaaaaggacttggaaatatatttcagagggtagaaaggatagaggaagttactaaaaaaattattaaatttttaaatgataagtctttagaagaaaaaaaaataatagaagctgctaaatactgtaaaaacgacttatgtagcgaaattgttttcgaattccctgagctgcaaggaataatgggtggtaaatatcttaaatatgagggatttagtgagg

SEQ ID NO: 298399 - DNA, 862 bp, Unknown
  Bacterial polypeptide expressing nucleotide sequence isolated from the Sargasso Sea
caaaattattaatgacacatcatatttacttgataagggaaagttaaaattagttaatgataagtcattacttgaagaagttgtaggtcttgtagaatatcctaacgttcttattggctcaatcagcaaacaatttatgaaacttccaagagaagtattatcaacaacaatgcgtgtgcatcaaaagtatttttcaatcagtgacaaagaaaataatttagagtcgaaatttttatttgttgctaatagcttgaaaaataagaatagggatttaagagtcattgaaggtaatgagagagttttaaaagcacgtttatctgatgctagttatttttttgaaaatgatatttctaatacatttgaaaattggaataaaaaacttaaaaacgtattgttttatgatggtttaggatcattgcatgataaaaccataagaatggctaacatttctaacatttttgcaaaagcctttggagttaaatcagaattagctaaacaagcaacccttttttctaaagcagatcttgtctcagaaatggttatagaatttcctgaacttcaagggattatgggtgggcattatgctaaaattaaaaaaaaatctgaagcagtttcaaaagctatttttgaacattataaacctaagggagtttctgatgatataccagaaactaaacttgggtgtttattatcaatagttgataagattgatactttggtaggcttcttttctattggtaaaaaacctactggttctaaagatccatttgctctaagaagaaatggattttccattgttcaaatcttaattaatttgaaaattaatttgtcatttaaatcagttattgatccatcttttaaa

SEQ ID NO: 298400 - DNA, 355 bp, Unknown
  Bacterial polypeptide expressing nucleotide sequence isolated from the Sargasso Sea
gatgccaaaaaaaataaaaaaaaaaaataaaattttatcattccaaaatttaatttttagcttacaaaaattttgggataaacaaggctgtataattttacaaccttatgatttagaggttggtgcaggaacttttcatccagctacaactcttcgttccctaggacccaaaccgtggaaagctgcatatgttcagccttcaagaaggccaactgatggaagatatggaaaaaatccaaatagactgcagcactattatcaataccaggtaattatcaaaccatctccaaaagatataaaacaaatctatttaaaaagtttggtagctattggtatagactccaaagatcatgat

SEQ ID NO: 298401 - DNA, 837 bp, Unknown
  Bacterial polypeptide expressing nucleotide sequence isolated from the Sargasso Sea
tgaattttttgtagtagcaaataacaaggataaaaaaggttatatcaaatctggaaatgagagagttatagaggcaagactaagtgatgctgcttttttctggaataagaataaaggatataatttagttaagcaaatatcaaaacttaaaacaatgaagtattttaaggggcttggaacatattttgataaaattcagagaatgagaaaacttgcaggaatgatttctgatgaatttttaattagcaaagagaagatagaattatcaagttcaatttgtaaagttgacttaacttcagacctagtaggagagtttccagaactacaaggaactatgggtggatattttgcagaagctcaaggttttgaaaaggatattgctttagcaataagtgaacattatttaccgaatggcttagaaagcaaagttccaaaaaaaccattcagtatagctttatctctcaccgataaattagatacactagtaggattttttggaataaatgaaaaacctactagttcgaaagatccatttgctttgaggagagcggcgctgggaataattagattgataattgaaaataataaagaacttaaattagtagatttaattaattattcactattattatatcacgaacaagattttaaacttgaaaataatttagcaaaaaaagaattgattgattttttattagatagattaaaatattatatgaaagagaaaaatatcaggtcagatattataagtgcaagccttgattcatttggcatcgatcacatcactaaaatttataaaaaatcttttgcattaaataaaattataaataaagaagc

SEQ ID NO: 298402 - DNA, 326 bp, Unknown
  Bacterial polypeptide expressing nucleotide sequence isolated from the Sargasso Sea
aatgccaaaaaaaataaaaaaaaaagaaaaaacattaataacatttcaagatttagtttttaatttacaaaagttctggggaaaatatggttgtgtaattttacaaccgtatgatatagaggtgggcgcgggtacattccaccccgctacaacgcttagatctctcggacctaaaccatggaaagctgcatacgtacaaccctctaggagaccaacggatgggagatatggaaaaaatccaaatcgtttacaacattattatcaatatcaagtaattatcaaaccctctccacaaaatataaaacaaatatatttaaagagtttat

SEQ ID NO: 298403 - DNA, 751 bp, Unknown
  Bacterial polypeptide expressing nucleotide sequence isolated from the Sargasso Sea
atttttgttaaaccaggatctgatgatgaatggcataaatattgggtagataaaagaattgactggtgggaaatgcaaggtgtaagtaaaaaaaatttacatcctatagaagtagcgcagagtgaattatcacattattcaaaagcaacagtagatattatgtatgaatttcctcacggtaaagaggagcttgaaggaattgcaaacagaactgattttgatttaggttcacatactaaaaatcaaaaagattataatattagttcagatgttaaaaaaaatgatcattctactacaaaattaggagtgcagaatttggaagaaaaaacctcctatatcccatatgttatagagccttcagccggggttgatagggggttacttgctattctgaatgaagcttatacaatagaaaccatagaaaaaggtaatgtaagaacagttctaaaattaaaaccacatttatcacctattaaagcggcagttattcctttgaaaaaaaataatgaagaaattgttgcaaaagcaaaagctattaaaaatgaattacaaaatcttggaatgggaagggtgattttagaaaattctggaaatattggaaaaaattacagacgtcatgatgaaattggaactccaatttgtattactgttgattttgagacactagatgatgactcagtaactgttagagaccgtgattcaatgagtcaagagagagtattggtaaaagatttaaatcaatattatcaaa

SEQ ID NO: 298404 - DNA, 742 bp, Unknown
  Bacterial polypeptide expressing nucleotide sequence isolated from the Sargasso Sea
gataaaacatgcatcagattatgaacagcatctatataatttgaaagtaattgttgatttcgagaaaagacgtcagtccatagtctcgcaggttagaaaactggaaaagaagcacgattgccaggtgcaacttgatgaaactctacttaatgaagtcacaaatttagtggaatggcccacagttctaattggaaattttgaaaaagaattcctggaactcccagatgaagtgttgattaccagcatggagatccatcagcgttactttccggtattcaacatcaaaaagaaaaaaagttttagagaaaaaaaactgcttcctaattttgtaactgttcgaaacggtgacaacaagtcactggatactgttaggcgcggcaacgcaaaagtgcttcgtgccagactaagtgatgcccggtttttctaccagaaagaccaaaaaagcatgcttgatgagttcaggaaaaaagctgagaaagttgtgtttttccaatccaggggttcacagcatcaaagggttcaacgcataactcagctcagcacgttcatctcggaaaaactaattctgtcctcaacacagcaaaagcatgtccagcgaattgctgaactcagcaagtttgatttggaaaccagaatggtctatgagtttccggaactccagggagtaatgggtcaaaactacgcccacctgaaaaatgaacaggatgtggtctgtaatggaataagggagcattattatccc

SEQ ID NO: 298405 - DNA, 245 bp, Unknown
  Bacterial polypeptide expressing nucleotide sequence isolated from the Sargasso Sea
tatggtttctaaaaaaaaaaacaataaaaaaaaaagatttcaaacttttcaagacaccattctaaatcttcaaaaatactggatcaagcaaggatgcataattttacaaccttacgatatagaagtaggagcaggaacttttcatccagctaccacccttagatcattaggacaaaaaccttggaaggtagcttatgttcaaccttcaagaagaccaacagatggaagatatggcgacaatccaa

SEQ ID NO: 298406 - DNA, 301 bp, Unknown
  Bacterial polypeptide expressing nucleotide sequence isolated from the Sargasso Sea
atgagtgaaaataattcttttcaaaaaattattactaatctccaatcattttggatcgatcaaggttgtgttttattacaaccatatgacttagaagttggagctggtacatttcatcctgcaacagtacttcgagtgttaggtccagatccaatttggaaagcagcatatgttcaaccgtgccgaagaccaaccgatggtagatatggtaaaaaccctaatagactacagcactactatcaatttcaggttattattcaaccatctcccgacgatatacaaaatttatatctagagagtt

SEQ ID NO: 298407 - DNA, 705 bp, Unknown
  Bacterial polypeptide expressing nucleotide sequence isolated from the Sargasso Sea
ggctcaggccaaagccttaaacggcgtggcgctgatggatgatgccttgctggaagaagtggcctctttagttgaatggccagttgtgctggtaggttcttttgaagaacgtttcctgcaggtgcctgctgagccgttaatctccaccatgaaagacaaccagaagtatttcccgctggttgataacaatggcaagttactgaataaattcatttttgtggccaacattgccagcaaagacccaagccagatcatctctggtaacgaaaaagtagtgcgcccacgtttatctgacgctcagttcttttttgtgacagatgctaaaaccaaactggttgatcgtctgccagctttaagtaccgtattgttccagcaaaagctgggtactttattagaaaaatcagagcgtatcgccaaagtagcagcttttattgctggcaaaattggtgctgatgttactcatgcagaacgcgctggtttgttatccaaaaccgacttaatgaccaatatggttggcgagttccctgaagtgcagggcgtgatgggtatgcattatgctcgccttgacggtgagccagaagctgtggctgtagcgctgaacgagcaatacaaaccacgttttgccggtgacagcctgccaagccagttagaagcttgtgctgtggccatcgccgataaaatggattctctggtcggtatttttgg

SEQ ID NO: 298408 - DNA, 805 bp, Unknown
  Bacterial polypeptide expressing nucleotide sequence isolated from the Sargasso Sea
acgagcatggcagtccatcaacgttacttcccggtttattcgaatcaaacagactcaggagggaacaaactactccctcaattcattgccatccgcaatggcaatgagcaacaccttgaaacggtctgccagggcaacgaaagagtattaagagcccggctcagtgacgcacgctttttttatgaggaagaccagaaaaaaccgcttcaacattttcaggaactgcttgaacgggtggtttttttccagaaaagaggaagccagcatgaacgggtgcagaggattcaaaccctgagtttgaaacttggagaaatgcttcaattcaatgaagaagaacttcaaaaggtcagaaggattgcagaactctgcaaattcgacctgcagacccagatggtttatgaatttcctgaactgcagggaatgatgggagaggtatactctgcgctgaaaggtgaggattcacagatgtcccggggaattcgagaacattatttcccgcgaacttcgggggacggcctcccatccgatcaggtgactttacctgttgctcttgctgaccgcatggacatgctcagcgttgcgttttctctgaagatgatccccagtggatccgcagatcccttcgctttaagaagaatggcgcagggtgtggttcaaattgttctaggcaagcaactcccgctggggtggaaagagctttcctcactttcggttcaaatcctgagggaccagcaggaattcaccaatgaaccagacatcctcgaaaagcagttggttgatttcctggatcaacgtgaacgatggt

SEQ ID NO: 298409 - DNA, 715 bp, Unknown
  Bacterial polypeptide expressing nucleotide sequence isolated from the Sargasso Sea
aaaagacttgaatggtgggataaacaaggtgtacccacagaaaatatcgaaatttataatgtgccaaaagaagagcttgcacattattcaaagaaaacaatagatttaatgtataaattccctcatgggctagaagaacttgagggcatagcaaatagaactgattttgatttaggctcacattcaaaacaacaagatgaaattaacataaattcatctgtaaaggctaacaaacattcgaatagtaaaatggcagttcaaaatgaatctggtggttggtttgtgccatatgttattgagccctcagctggagtagaacggggtttcctagctattcttaatgaggcatattcaattgaaaagcttgatgacggtaaagataggcttgttcttaatctcaaaccgcatcttgcgcctgttaaggcagcagttatccctttaaagaagaataacaaaaaattagtagacttagctaaagatattaaaaatgatcttcagaagctaagattaggaagaataatttttgaaaatacaggtaatattggaaaaagttatagaaagcatgacgaaataggtacacctatatgtattacggttgattttgatagtcttgataataaaactgttacattaagaaatagagatacaatgaaacaagaaagaatacataaagatcaattattagaatacctcaaaaatctagtaaataaataat

SEQ ID NO: 298410 - DNA, 544 bp, Unknown
  Bacterial polypeptide expressing nucleotide sequence isolated from the Sargasso Sea
cgtctacggcgacaagctgaccaacaaaaccgtcgtcaccgacgtggtcgactttatgctgggtcgcttccgcgccgcctatcaggacgaaggcatcggtgccgacgtggtgctggccgtactggcccgccgcccgacccgtccgctcgacttcgatcgtcgcgtcaaggccgtcagccacttccgcacgctggatgccgccctggcactggctgccgccaacaagcgcgtgagcaacattctggccaaggtcgaaggcgaattgccgactgccgtcaaaccggaactgctggtcgatgccgccgagaaggcgctggccacccaggttgcagcactgcaagccgaactggcccctctgttcgctgccggtgactatcaggctgccctcacccgtctggccgccctgcgtgaaccggtcgacaccttcttcaacgaggtgatggtgatggcagacgacgaggccctcaaggccaaccgtctggcactgctgaacaacctgcgcaacctgttcctgcaagtcgcggatatctccctgctgcagtga

SEQ ID NO: 298411 - DNA, 1318 bp, Unknown
  Bacterial polypeptide expressing nucleotide sequence isolated from the Sargasso Sea
tctgccggcagttaagcagttaaaatctctggcagaaaaaacctgtgaaaaacatcggttaaattttaatgatcttaatacttattcctctccaagacgacttgcaattgaactttcaggcctccctgataaagaaaatgatcgaagggttgatttgaagggacctcccatctcagttgcaaaagacgaccataataactggactaaagctgctgaagggtttgccaggaaaaacaatgtttcccttaaaaatctggaaacgaaaacaatcgaaggaagtgactatctgtttgtacaacagcgagagttgggacagtccgtccctgaactgctgcaagaaagtgtacaacaatggatttctcagctaagtttcccaaaaaatatgcgatggggatcgtacaggacacgttacatcaggcctatccgctgggttgtttctctttggaacagtaaagtggtgccgataaaactagaaatgctggttgcaggtaatcaaacacggggtcatcggtttttgagtactggatacagtaagataaaacatgcatcagattatgaaaagcatctacatgatctgaaagtaattgctgatttcgagaaaagacgtcagtccatagtctcacaggtaagaaaactggaaaagaagcacgattgccatgtggaacttgatgaaactctgcttaatgaagtcacaaatttagtggaatggcccacagttctaattggaaattttgaaaaagaattcctggaactcccagatgaagtgttgattaccagcatggagattcatcagcgttactttccggtattcaacagcaaaaagaaaaaaagttttggagaaaaaaaacttattcctaattttgtaactgttcgaaacggtgacaacaaatcactggatactgttaggcgaggtaacgcaaaagtgcttcgtgccagactaagtgatgcccgttttttctaccaggaagatcaaaaaagcatgcttgatggtttcacgaaaaaagctgagaaagttgtgtttttccaatccaggggttcacagcatcaaagagttcaacgcataactcagctcagcaccttcatctcagataaactaaatctttcatcaacacagcaaaagcatgtccagcgaattgctgaactcagcaagtttgatttggaaaccaggatggtctatgagtttccggaactccagggcgtaatgggtcaaaactacgcccacctgaaaaatgaacaggatgtcgtctgtagaggaataagggagcattattatcctcgcaacgccaaagactcgctcccgggaaattctgaaacaatt

SEQ ID NO: 298412 - DNA, 1081 bp, Unknown
  Bacterial polypeptide expressing nucleotide sequence isolated from the Sargasso Sea
gacccgttatattcggcctatccgctgggttgtctctttatggaacactaaagttgtaccgataaaactagaaatgctggtggctgggaatcaaacacggggtcatcgttttttgagttctggaaacatcaagataaaacatgcatcagattatgaacagcttctaaatgatcttaaagtaattgctgatttcgataaaagacgttactccattgtttcacagatcagaaatcttgaaaagaagcacaattgtcatgtagagcttgctgaaaatctgcttaatgaagtcacaaatttagtagaatggcccacagttctgattggaaactttgaaaaggaatttttagaactcccagatgaagttttgataacaagcatggaggtccatcagcgttattttccggtattcgatcgcaaaaagaaaaacagttctggagacaataaattgcttcctaattttataactgttagaaacggtaatagtaattcacttaatactgttaggcgtggcaacgaaaaagtacttcgtgcaagactaagtgattcacgttttttctaccaagaagaccaaaaaagcatgcttgatgagtacaataaaaaagctgagaaagttgtatttttccaatctaggggttctcaacttcaaagagttcatcgcataactcagctaagcaccttcatctcgtttaaactaaatttttcgcaagtacagcaaaagcatgtcaagcgaatagctgaactcagcaaatttgatttaggaaccagaatagtcaatgagtttccagaactccaaggagtaatgggtcagaactatgcccgcctgaaaaatgaacaggatatagtctgcaatggaattagagagcattattacccccgcaatgccaaagactcgcttccgaaaaatcaagaaactgttccagtcgcaattggagataaactggatcttattaccactgcattttctttgggaatgttgccttcaggtgctgcagacccgtatgctttgagaagaaacgcccagggagtaacccaactgatcctaggcttgcgtctcccactcgatctgttgggaattaactga

SEQ ID NO: 298413 - DNA, 1051 bp, Unknown
  Bacterial polypeptide expressing nucleotide sequence isolated from the Sargasso Sea
atggcctctaattcaatggaggatcttgttgccctatgtaagcgtagaggttttatttttcaatcagatgaaatttacggtggtcaaaaaggactctattcttttggaccaatgggcgtcgaacttaaaaataatttaaaacaagcttggtggaaagcgatggtctggcaacgagatgatgttgaaggactcgatgcatctcttttgacgtctccaaatgttttaaaatattcaggacatgaggatacattcactgatccattatccgactgtaaggattgtaaaagtagatggagagaggatcaattaacaaatggtatatgcccaaattgtggatctaaaaatttaacagaggctagaccttttaatttaatgtttaaaacatcgattggtccagttgacgacggatcatcctttgcatatttaagaccagaaaccgctcagcaaatatttaccaactttaaaaatgttcttgattctactaatagagcggttccatttggtgttgcgcagatgggtaaaagttttaggaatgagatcactccagggaaatttatttttagagttcgagagtttgagcaaatggaattagaatttttttgtaagccagatactgatgaagaatggttcaaatattgggttcaatctcgaattgactggtggcttgaacagggaattaaaaaggaaaatttagaagtatttgaggcgccggaagatgatctctctcattattctaaagcaactactgatttactctataagtttccacatggatttgaagaattagagggaatagcgaatagacaagactttgatttagggtctcattctaaaaatcaatctgaatttaatattaaggctaaagttatggagaacaaggactcaacaacgaaattagcagttcaggatttagattcgaaggaatggtatatacctttttgtattgagcctagtgcaggggttgaacgtggtgtgtttgctctattaaacgaagcctataatgaagaagaagttgagggaaagacaagggtagtcttaagtctcaagcctc

SEQ ID NO: 298414 - DNA, 1885 bp, Unknown
  Bacterial polypeptide expressing nucleotide sequence isolated from the Sargasso Sea
ccagcacaagtcttaggccgtgttgaagaaaagagggggcctagaaaagatgctccagaaaaagcaatccaaggttttttaaaaaatacaggtttagaattaagtcaactggaagttcgtcaagaaaaaaaaggtgaattttattttgcaagcatacgaaccgaaggcctaaaagcagctaatataatttcttctgttttagataaaacagttagaaattttccctggcccaagtcaatgagatggggtgaaagttcactaaaatgggttcgccctttgcattccataatctgcattttatatgacgaggatggatctaaggtcgtcaatattgatattgaaggtgtttcctcaggagataagacttttggtcatcgatttatggggaatggtgatttttcggtaaattctttcgaggattatgcttctaagttgaaaaaagaatttgtgatattagatccctcaaaaagggaagagataatcctacaggaaatcgaaaatcaagcttttgctcagggtctggaactggtcaatgatcatagtttattgaatgaagtagttggtctgatcgagtggccagtcgttttaatgggtaagttggaggaccaatttctttctttgccccgggaagttttgcaaacttccatgagggagcatcaaaagtttttttcaattctaaaccctaaaaacaataaagtggtgcagtttgcaactgtagctaatagtgaaacacccgataacggatctacaattctagccggaaatcaaaaagttctttcagctagattggctgacgcaaaatttttttgggataatgatcttcgagttgttaatagcagcggccttgatctttggttagaaaaattaaagcaggtgacttttcacaataagttaggtagccaatttgagcgtgttgaacgcattactgatttatctggaacaattgccaaaaaaattggttgtgatcctaattccgcaaagagtgctgcttctatatccaaagcagatctttcgtctgagatggtatatgaatttccagaattacaaggagtaatgggaacttactatgctattgaggcgggtttcgaggaaaacatagcaaatgcctgtaaagagcactacgctccattgggcccgagtgataaggttcccaattcatcagtatcaattgtcgtggctttagccgataaaattgatactctcactagcttttgggccataaacgaaaagccaacgggttctaaagatccatttgctttgagaagaagtgccttaggtttgatccgaataataattgaaaatgacattcgaatttctttgtcagatattttagcactaggtaatgatggtgcagatatagaagatctgaaatattttattcaccagagaatgaaagtttttcttcgtgatcaatcactaaggcatgatttaatcgatgcatgcgtgtcactggacaaaggtgatgatctggcgctttcagtgaaaaaatcatttgccttaagggactttattaaaacaagcgacggatcaaatctaatacaaggttttaaacgtgcaaacaacattttgctccaagctgaacagaacgatggtgttgagtattcttatggagctgacccgaagttcgcagaagaagatgctgaacgtaatttatttgatgcacttgatgatgaagaagtcaaaatcagaagcgctctagaagaagaaaacttcgttgaggcaatgaattcaatggctaatctaagaacacctatcgatagtttctttgaaactgttcagattaattccgatatcgattttattaggcgtaataggctaaatttattatctcgaatttgcaaactgtgtttatcagttgctgatctaaccaaagttgagggatgaa

SEQ ID NO: 298415 - DNA, 1687 bp, Unknown
  Bacterial polypeptide expressing nucleotide sequence isolated from the Sargasso Sea
tacggtctcgagcgcattctcatggcattgcaaggcgtcgatcacttcaaggacatcgcgtacaacgatcgcatgacgtacggtgagatgcgcatgcaggaagaatacgagatgtcggtatttaatctcgacgaggcgagcgtggagacgcacagagagcgcttcaacatggcggacgaagaggcgattcgcatgctcgaggcgcgtcttccgttgccggcgtacgacaacttgctcaaggcgtcgcacgcgttcaacgtcctcgacgctcgaggcgcagtcggtgtcacggagcgtcaaaagttattcgcatccatgcgtaagctcgcgcgagagaccgcgcagctctgggtcgctcgaagagaggaacttgggtatcctctgggtctcgccgaggcgccggcgccggcgccgcccgtcgagcgcacgggcgacgtaccgtccgcgcccgcggactgtgtcatcgagatcggcaccgaagaattacctccacaagacgtcacgagcacgtctcgtcaattctacgacgccgtcgacgctcttctcaaggcggaaggtttgacgcacgagggcatctctgtcggggcgacgcctcgtcgcttcgcgctcaccgtcaaggctttgagcgcgggtcaacccaacgtcgaggagcgagttcgcggtccaccgctctcacgggcgttcgaagaggatggcgtgacgcccggtaaggcggcgctcggtttctgtaagaagaacggtatcgacgcgagcgaattggaaaaagacggcgagtacgtctgggccgtggtgaaaaaggagggtcgatccaccgtcgccgtgttggaggaggcgcttccgaagattatcgccggcatcaacttttccaaggcgatgcgatggatcaccaactccgacgtcaccttctcgcgtccgatgcgatggctcttcgccgtgcacggagatcaccatttatcgtttgaggcgctcggcgtgcccagcggcgcgacgacgcggctcttgcgaacgcgaggtgacgtctcggacacgcacgtcgccgccaatgcggccgagtaccacgcgttgttggccaaggacgccatcgtggccgaatacgaagcgcgcgtgtcgaagatttggagcgaggccaaggacgccgccaaatccgtcggcggcgacattccggagagcgctcgcgagggcttgctcgaggaggtggccaacctcgtcgaggcgcccaacttggtcatgggtgactttgaagagaccttcttggcgcttcccaaggaggtgctcgtgatggtgatgcgcaagcaccagagatatttcccggtggaaaacgcggacggttcgttgaagccgcacttcatcacctttgccaacgggccgtgcgacgtcggcgtcgtcaagcacggcaacgaagctgtgcttcaagcgcgttacgaggatgccaagtttttctatgaatctgatttgaagaaaacattggctgagtttaaaccggagctcagcgggatcacgttccaacaagagctcgggaacatgttggacaagacgagtcgcatcgaggcgctggtggaggacgtcgccaaggcgctcggtttcggcgctgacgtcgtcggtactgccgcgaccgccgcgggcttggcgcgtgcggatttggcgacgtcgatggtgatggagctcaccgccttggcggggacgatgg

SEQ ID NO: 298416 - DNA, 697 bp, Unknown
  Bacterial polypeptide expressing nucleotide sequence isolated from the Sargasso Sea
attgatcaaggcatattctgaaaaaagattaaaaaagctagatgttgaagatgctgacctatctcactattcaaaagctactgtagatcttatgtacgaatttccacatggacttgaagagttagaaggtatagcaaacagaactgattttgatcttggctctcacactaaaaatcaaaatgactttaaaatatccgcagatgtaatgaaaaacaaccaatcaacaacgaaattgagtattcaaaatttagaaagtaaagaatggtacatcccgtatgtaatagaaccctccgctggtgttgatcgaggtgtatttgctctactcaatgaagcttacaaggaggaggatttagaaaacggaaataaaagaattgtgttaagtttgaaacctcatttatctccaattaaagcggccgtaattcctcttaaaagaaataatgaggatttagtcaataaagcaagcaagattaagaatgatcttcaagcactaggtatggggagggtcattttagaaaactctggtaatattggaaaaggttatagacgtcatgatgagattggtacacctatttgcataacagtagattttgaaacaatcgaaaatgatacagtgactataagagatagagatactatgtcacaaaaaagagtttcatctcaagacttaaaccttgaatataaaaaagtttttaattaa

SEQ ID NO: 298417 - DNA, 229 bp, Unknown
  Bacterial polypeptide expressing nucleotide sequence isolated from the Sargasso Sea
tatggtttctaaaaataaaaaaaaacaaaaaccaaaatttcaaacctttcaagaaactattttaaatcttcaaaaattttggagcaaacaaggatgtattattcttcaaccatatgatatggaagttggagctggcacgttccatcctgctacaactcttagatctttgggcactcaaccatggaaagctgcttatgttcagccatcgaggagaccaacggatggtaga

SEQ ID NO: 298418 - DNA, 1135 bp, Unknown
  Bacterial polypeptide expressing nucleotide sequence isolated from the Sargasso Sea
tcagaattaggtttaacttatgaaagctctgctaatttttctactcctaggcgtttaactttagttttagaaaatgtttccagcaaaagtctcagccgcgttgaagaaaaaaggggccctaggaaagatgctccagaaaaagcagtccaaggtttcttaaaaagtgtaggtttagaattaagtcaactagaaatccgccaagaaaaaaaaggtgaattttattttgcaagcatacgaaccgaaggcagaaaagccgctgatattgtttccacagttttagataaaacggtcagaaactttccctggcctaagtcaatgagatggggtgaaggctcgttaaagtgggttcgccctctgcattcgataatctgcattttgtatgatgaggatggatctaaggtcgtcaatatagatattgaaggtatttcctcaggagataagacttttggtcatcgatttatggggaatagtgacttttcggtaaattcttttgaggattatgtttctaaattgaaaaaagaatttgtcatattagacccctcagagagggcagagataatcttacaggaaattaaaaatcaagcttttgctcagggtctagaattaatcaatgacccaaatttattgagtgaagtagtcggtttggtcgagtggccagttgttttaatgggtaaactcgaagaacaatttctttctttgcctccggaagttttgcaaacgtccatgagagagcaccaaaagtttttttcaattcttaactctaaaaataacaaagtagtgcagtttgcaactgtagctaatcgtgaaacatctgataacggatctacaattctagctggaaatcaaaaagttctttcagctagattagctgacgcaaagtttttttgggataacgatcttcgaattgttaataccagcggtcttgatctttggttagaaaaattaaagcaagttacttttcataataagttgggtagccaatttgaacgtgttgaacgcattactagtttgtccggaacaattgctaagaaaattggttgtgatcctaaattagcgaagaatgctgcctatatatccaaatcagatctttcgtctgagatggtatatgaatttccagaattacaaggagtaatgg

SEQ ID NO: 298419 - DNA, 580 bp, Unknown
  Bacterial polypeptide expressing nucleotide sequence isolated from the Sargasso Sea
atgaataatcatacaatggaagatcttgtatcgctgtgcaaaaggcgcggttttatatttcaatctaatgaaatctacggaggtcttcaagggttgtatgattatggacctctaggtgttgagctcaaaaataatttaaaaagggcttggtggaagtccatgatatacgatagggatgatattgaaggcatagattcttcaattctaaccaatccgttggtcctgaaatactctggtcatgaagatacattttctgatccattgctggactgcagaagttgtaaatccagatggcgggcagatcatgttgaagatggcaaatgtcctgggtgtggatcagaagatttaactgaaccaaggccttttaatttgatgttcaaaaccaatgttggaccagtagaagatggcaattcatttgcctacctcagaccagaaacagctcaaaatatttttaccaatttcaaaaatgttcttgattctacgccccaccctcttccattcggtattgcacagatgggtaaggcttttagaaacgaaataacacctagaaactttatattcagggtcagggagttgaaca

SEQ ID NO: 298420 - DNA, 268 bp, Unknown
  Bacterial polypeptide expressing nucleotide sequence isolated from the Sargasso Sea
tatggtctctaaaataaaaaaaaaaactttatcttttcaagatacaatctttaacttacaaaagtactggtctaaaaaaggttgtctaatattacaaccttacgacctagaggtcggtgccgggacattccatccagcaaccactttaagatcgcttggcccaaaaccatggaaaactgcatatgttcaaccatcacgccgcccgaccgatggaagatatggtgacaaccctaatagattgcacattactatcaattccaagttttaa

SEQ ID NO: 298421 - DNA, 256 bp, Unknown
  Bacterial polypeptide expressing nucleotide sequence isolated from the Sargasso Sea
atggcctctaaaaaaagtaaaaaaaaatcaaaatttaaatcttttcaggatacaattttaaacctccaaaaatattggagtaaacatggttgtataattttacaaccatatgatatggaggttggagcaggaacctttcatccagctacaactctcaggtcacttggaccaaaaccatggaaagcagcttatgtacaaccttctagaagaccgactgatggaagatatggagataaccctaatagacttcagcact

SEQ ID NO: 298422 - DNA, 2080 bp, Unknown
  Bacterial polypeptide expressing nucleotide sequence isolated from the Sargasso Sea
atggcaactagtgatctcctaattgaaattggaactgaagagcttccacctaaggcattaaattcactttcgacggcttttgaagatttgattagcgacgcacttgcgtcacagaatatcgctttcaaaaaaacacaaagatttgcgacaccaaggagacttgcggtaataataaagcaagttgctgagaaccaaagcgatgaaaaattgttgagggttgggccggcgatttctgcggcttacgatgaaagcggaaatgcaacaccagccgcattaggctttgctaaatcttgtagtgttgaattaaaagatctgaaaactataacgaagaatggtgtcgaaaaactgtcttacgaagctttagaaaagggaaaagagacgaacactcttattccagagcttataggatccgttttaaaaaagttgccaacaccaaaaagaatgcgctggggtagctctaaagaagagttcgtaagacctcttcactggattcttctattatttggcaaggaacagttggaattcagagcgtttggtgtgtcttcctctaattttacgatagggcatagattccataacaacatagaaattgtgattgacgagcctactcaatacgaaaaggtgctgagcgaagtaggtcatataataccgaattttgaaaaacgtaaagatctcattcgtgctgaagttcttaagcaaggttcattggcaaacgcaattgctgtgatagacgaggaactattagacgaggtaactagtttggtcgagtatcccatagcattaacgggagaatttgattcagagtttttaaaagtacccccagaggcacttatccttgctatgaaatcacaccagaaatgctttcacatgaatgacgctgaaggcaatctgttacccaagtttataactgtcagcaatatttgctcaaaagatcctttacaagtagtcaaaggcaatgagagagtaataaggcctaggttggctgacgcaaaattcttttttgagacggacaaacaactaagtcttgagtcgagacttgaaggccttaaaaatttagttttccaaaataaactaggcagcatccatgacaaggttgagagagtcgcaaaaattagtaaatccattgcgaaaagtttatccattaatgaaaccaattgtgagcgagcgtctttactttctaagtgtgatttgcttactgatatggttagagaatttgctgatcttcaagggataataggttgtcattatgcaaaacatgacggtgaatctgaagaagtatccgttgcaatacaagagcattatcttcctcgattttcaggtgacgatttaccaacaagccaggtaggtagtgtggtcgcaatagccgataagttagataccattgtgtctttgtttggtatcaatcagcccccaacaggatccaaggatccgtttggattacgtcgatctgcgataggtatacttaggattgtcgtcgaaaaacgacttgatctaaatattgctaaacttattgacgatgccatattcgcccaaaataaaaatgagctattgcccgagacgaaagagttggtctttcagtttttcctagataggtttaggtcttggtataaagacgatggcataccgagcagcgtgtttgaatcggtctatgccctaaaaccacaaaggcctcttgatttccatttacgagttgaagcggtgagtgcttttaccgaactaccagagtcaatgggcttagctatagcaaacaagcgagtttcaaacctcttgagcaaatatgaggccgaaggtagtttacctccatgcaataagaatttactcaaactagagtcagagataagtttacactctcaaatagaaagtaaaaaattagaagtggcgccttttttagaaacgctagactatactaaagcgcttttatgtttatcgtctctcaaatcggcaattgatgacttttttgacaatgttttagtgaatgatgaagacgaaaaactgcgcaagaatcgatattcattactttatgagctgcgtgaattatttttaatgacggctgatatctctttccttgacaataactaag

SEQ ID NO: 298423 - DNA, 450 bp, Unknown
  Bacterial polypeptide expressing nucleotide sequence isolated from the Sargasso Sea
gtggcgaaattacctacggtatcgaaaggctagccatgtatatccaaggagtcgaaagcatttatgacattgtttggaccgagggggctgatggaccaattacttacggcgatgtatttaaacagaatgaagtagaaatgtcagagttcaactttgactgcgccaatgttgatttgttgttttcctactttgaagattgcgaggagcagtgcaatatgctgatagaaaagaatctgccgctaccagcctatgagcaagtccttaaggcatctcattattttaacttgttggatgccagaaaagcagtgtcggtaactgaaagacaaaggtttattctccgtgtgcgtgctctagcaagattagtggctcaaacatatttagagagtagaaaatccttaggcttccccttggcttccgacgacttacgcaaggaatacatagaaaattaac

SEQ ID NO: 298424 - DNA, 289 bp, Unknown
  Bacterial polypeptide expressing nucleotide sequence isolated from the Sargasso Sea
ggtggctattttacctttaagtaagaatgagaagttggctcctttgacaaaagggatcctagatcgtttgaaatttaagttcaaatgccaatatgatgactctcaaagtattggtcgaagatatcgaagacaggatgagataggtacgccgttttgtgtgactatagattttgactcgttagaggacgataaagtaactattagagaaagagattcgatgcatcaatctagaattcccatttcagatttagtgagtgtgcttgaagacaaattggaacataactggtga

SEQ ID NO: 298425 - DNA, 1741 bp, Unknown
  Bacterial polypeptide expressing nucleotide sequence isolated from the Sargasso Sea
ctggtggaggtcggcacggaagagttgccccctgcagcgctgcggcaactcagcgaagcctttgcatcaggcctggctgaggctctcacaacagccggcttagtggagaacccgacagcaacaccctttgcgagcccaaggcgacttgcggtgcgcatcagtggcgttgccaggaaagcggctgatcaggaaagtgagcggcgcggtcctgccgtaagcgcggcctatgacgagaatggccaacccacgccggccgcaacggggtttgcacgttcctgtggcgtggaagtcgcagacctacagaccctgagcacagacaaaggcgagtggttggtacaccgtagcgtagtatccggggaaaacgccaagacactcatcggacccggcatccagcaggcgctggacaaattgccgatccccaagcgcatgcggtggggcacgggaaccgacgagttcgtgcggcctgtgcattggcttgtggtcctgcatggccagcaggttgtgccgtgcagcgttttgggtgtggctgccgggcgcatcagtcgcgggcaccgctttatgggggaaaccactgtacgtatcgcgtccgcctcagattatgagcagcgtttacaggaagagggcgctgtcatgcccgactttgcggcgcgctcggcaatgatcgagaagcaggtcacccgtcttggagaaaaagcaggcggccatgcggtcattgatgcggctctgctggaaaccgtcacggcactcgtcgaaaaaccgcacgccgtgctcggcagttttgatcccgcttttttgaaagtgccccaggaagccctgatttcttccatgcgcggccatcagaagtattttcacgtggtcgataaaaagggcgcgctgcttcctgcgttcatcaccatcagcaatatcaaaagccgctcgcccgcacgggtacggaccggcaatgaacgcgtgctgaacgcccggctggctgacgccaaattcttctgggagtcagacgccacccaaactctggcacaacgggcacaaacgcttgaccaggtgctttttcaccacgcattgggcagtcttgccgacaaaacgcgccgcattgaaagattagccggcaagatcgcgcgggccatcggggcttcagaggccgattgttctcgcggtgcaagtctctgcaaggctgatctcgtaagcgggatagtcggggaatttccggacctgcagggcaccatggggcgttatctggcaaaacatgacggcgagtctgccgctgtcgcgcgggccgtcgaggagcactatctgccccgacaggcaggcggcgcattgcccaaaagcgttcccggccaggtgctggcgcttgcagaccggctcgattctttggtggggctttttattgcgggagaagaacctacaggagaaaaagatccgtatggtctgcgtcgggcggcattgggggttatccggattctggtcgagaagaaacttgatcttgatgtggcgacactcgtggaagaagctgccgacggctatgttgtcggcggactcggcacaggagacagcgccaaagcacagtgcaccacgttcattctggaaagatatcgctccctgtatgtcgcattgggctttgcccaggatgagatttcggccgtgcttgaagcaggtgcaaggcgaccgctggattttgaccggcgattgaaagcggtatcacgctttcgtcaccatcgagacgcgcccagcctgaccgcggccaaca

SEQ ID NO: 298426 - DNA, 628 bp, Unknown
  Bacterial polypeptide expressing nucleotide sequence isolated from the Sargasso Sea
ttccaaaggactcttgatatcatgtaccgatttccgcatggtcttgaggagctagaggggattgccaacagaaccgattttgaccttggttcacacacaaaaaaccagaaggacttatctctaaactcatcagttgttgaaaatgatgagtcaaccatgcgtcttgcggtacaagaccttgaagccaaagagtggtatgtcccatatgttatagagccttctgctggtgtagacaggggtgtcttagcaatcttaaatgaggcgtacacgaatgaagatattggtgagggcaaacagagagtggtgctaaaactaaaacctcacttgtctcctattaaagcagctgtaattccgctcaagaaaaacaaaaatgagcttgtgtccatggcaaaagagataaaacaatcgcttcaatcgctcggtttaggtagggtctttttagaaaacactggaaacatcggcaaagcatataggaggcatgatgaggttggtaccccaatctgtattacggttgactttgatagtattgaaaacaatacagtaaccataagagacagggacacaatggaacaaaacagggttgatatttctgagataaagcaatcctacctcagtgttttaaagtagt

SEQ ID NO: 298427 - DNA, 1990 bp, Unknown
  Bacterial polypeptide expressing nucleotide sequence isolated from the Sargasso Sea
atgtctgaactttttattgaattttttagtgaagagataccaccaagtttacaaataagtgcaagaaaccaatttcagaaacttctagtagacaaactatccgaagcaaacttaaaatataataattttgagatatattctacaccaacaagaatagccacctgtatttctggactaccaggtaaaattaaaattttaccagctgagataaagggccctaaagttggcgtgccagaaaaagttctggaaaattttgctaaatctagatttgttagtttgagtgatctatatgaaaaaaaaacagaaaaaggaaatttctattttgttaaaattaagggaaaggaaattaatagtgaagaagaattaattaaatgtattttaaaatctcttagtgaaatatcatggaaaaaatctatgaaatggtccgaccatgaaatgagttggggtagaccattgagatcaattttagctatttttaatgaaaaagttcttaaatttaattataaacaccttgaggcttcgaattttactcttatagaggaaaactcctctattaatcaaaaaaaaattaaaagtttctctgaatataagaaaattttaaaaagttattcaataatactcgatcataaagaacgtgagaaaataataagcgataaaatttcatcaatatgtaaaaaaaaatcatttaaagtttttattaaccaaactttacttaacgaggtaagtaatttagttgataagccaaatgtgttaatagctcaatttgataaaaattatttaaaattgccccaagaagttattaggtctactcttcaaacacatcaaagatattttactttggttgatcatagagacagaataagtaatgaattcgttgtagtagcaaataaaagagatgaaaaaaaattaatcaaaataggaaacgaaagggtagttgatgcaagactttctgacgctagtttcttttgggagaaagataagtccttaaacttgatcaaacaaattaataaattaaaagaaataacgttttatgaaaaccttggctcaatttacgataaaacccaaagacttagaaagatggcctattttatttctgatcaacttaatttaaaaaaagaaaaagttgagatagccgcatctataagtaaaaccgatttagtttcaggtttagttggtgagtttcctgaacttcaaggaataatgggaaaatattttgcctcaaatcaaggatttgaagaagatgtatctttagcagtaagcgaacattacttaccgataagtatttcctcacatgttccaaaaagaccaattagttatggtctttcaatcatagataaactagatactttggtaggtttcttcttgataaatgaaaaacccacaagttcaaaagatccatttgctttaagaagatcgtctattgggcttttaagaactgtaattgagaataatttaagagtaagcataagagatttagttgattatttaataagaatgtattctgaacaaggtgtcaaagaattaaatcaaaatactcattcagagcttttaaaattttttagagatcgtatgaaaaatattttaaaagagaaaaaaattagacctgacattatcgaagcatctgtaagctcacatttaaatgatgattttcttgaattatataaaaaaaccattgttatgaataaatttatatcaaaagatcttggtaggaatgcagtatcaacttataaaagagcatccaacattcttgataaagaaaaaaatatatcaaaaaatggtccagatgcagttctttttaaacaagatgaggaaaaagaactctttaataaaataaacgacatcagaaaggtttttgcctttaaggaaagcaaacaaaattacgaaaatcatttaaaacttttatcggaaaccaagttatccactgataagttttttgaaaatgttaaggtaaatgacgataataatgatattaaaaataatagattagaac

SEQ ID NO: 298428 - DNA, 529 bp, Unknown
  Bacterial polypeptide expressing nucleotide sequence isolated from the Sargasso Sea
aaaaaacaagataatttgaatataaaatcaaatgtatcaagaaataaagactctaatagcaaacttgctgttcaagaagaaagtggtgaatggattgttccttatgtaatagagccttcggctggggttgaaaggggttttttggcaattattaatgaggcatacaatgtagaaagcttaaatgatgggaagagtagagttgttttaaaactaaagcctcatttagcaccaattaaggctgcagttattccattaaagaagaataatgaagaaatggtaaatttatcaaaattagtaaaagaaaacttacaaaaaattggtcttggtagaattatatttgaaaatactgggaatattggtaaaagctatagaaaacatgacgaaattggtactccgttatgcattactattgatttcgaaagcttgaatgataaaacagtaactgttcgtgacagagactcaatgaaacagtcacgagttgaatttgataaacttagtgattttcttataaacataattaagaattaaa

SEQ ID NO: 298429 - DNA, 763 bp, Unknown
  Bacterial polypeptide expressing nucleotide sequence isolated from the Sargasso Sea
atggtctctaagacaatggatgatctcgtttctctttgtaagcgaagaggttttatatttcaatcaaatgaaatttatggaggattacaaggtctttatgactatggacctcttggcgttgaacttaaaaataatctcaagcaggcatggtggaaatcaattatatatgaccgagatgatgtagagggacttgatgcatctatcttaacaggtagagaagttttaaaacattctggtcatgaagatactttttcagatcctttggttgattgtagaagctgtaaaaatagatttagatcagatcaatcagctgatggtaaatgccctgcttgcggctcagatgacttaactgaaccaaggccatttaatctcatgtttaaaaccactgttggacctgtagatgatggaagtaattatgcatatttgaggccagaaacagctcagcaaatttttacgaactttaaaaatgttttagattcaaccaacaaatctattccatttggtgttgctcaaattggtaaggcattcagaaatgaagttaccccaggtaaattcatatttagagttagggagtttgagcagatggaactggaattttttgtagagcctggacaagatgaagagtggcataaatattgggttgaatcgaggtataattggtggatagaacaaggaattgataaagataggattcagaaacttgaagttgataaatcagatttatctcattattcaaaagcaacagtagatattatgtatgatt

SEQ ID NO: 298430 - DNA, 532 bp, Unknown
  Bacterial polypeptide expressing nucleotide sequence isolated from the Sargasso Sea
ctaaaaaacagggaagatttaaatttaacctctaaagttagcttaaataagaattcaaatagtaaattagctgttcaggaagattcaggtgattgggtggttccttatgttatcgaaccttctgcaggtgtagagagatcatttttagcaattttaaatgaagcctatacggttgaagatcttgatggagaaaaaaacagaactgttttaaagttaaagccacatctttctcctgtgaaagctgcaattatgccgcttaaaaaaaataattctgatcttgttgatattgcaaaaaaaattaagaataatcttcaacaattaggtttgggtaggattattctagaaaatagtggaaatataggaaaaggctatagaagacatgatgaaattggtacaccaatatgtattactgttgattatgaaactttagatgacgaaacagttacaattagagacagagacacaatgctgcaatctaggcataaaattagtgaaatatctgattatttaattaatattataaaatattaag

SEQ ID NO: 298431 - DNA, 1167 bp, Unknown
  Bacterial polypeptide expressing nucleotide sequence isolated from the Sargasso Sea
cttgtctaaatatttacttgagataggaacagaagagttgcccgcaaaattttctcattctgttctagagcaatttaaatctctaatagaatttgaattggataaaaagttaatcaaattcgaacatatagttgttacctccacaccaaggcggatagttctacttctcgaaggtttagttgattatgcagaagataagataatagaaagaaaagggcctaaagcaaattcagcttatttaaatggatgtcctactaatgctgctttaggatttgctaatagcttagatatagatgtaggtgaactagaaataaaaagtacagaaaagggtgattttgtatttggaaagaaaattgagaaaggacaatcaacaagaatttctttgtcttcgattatcccaaaattagtaaagagtcttcaaggccctcgatttatgaaatggggtgctgggaacataaaattttcaagacctattagatggattgcctctatttataatgatgaaattcttgattttgaatttgatgaatgtgatccaaaaattcaaataagtaataaatcaaaaagtcatagattaataaatgaagtttttgaagttaagcatgctgataatttttttgaattattagaacaaaatagagttttagttaaacgacatgaaagaaaagaaaaaattgaaagtttaataaatcaggcatctaaatctttaaatctgaaacctgacctttcagaaggattactaaatgaactaactgatttagttgaatggccagatttaatagtcggaaaattcagtgaagaatttcttgatctcccagttgaagttctctcaacagtaatgaaaagtcatcagagatacgttcctcttttattgaaaaacaaaagtttttctaaactagatttaagctctgaaaaaaatattagtacaactttctgcgttatttcaaatggtcttgaagaatcaaataataatattgccaaaggtaatgagaaagtattaagggcaaggttttcggatgcaaagttttttgtagaaagtgacaaaaaagttgcttcaatcgaaagaaatgaaaagcttaaatctgtttcttatttggaaggacttggaaatttatttcagagggtagaaaggatagaggaagttactaaaaaaatcttaaattttaa

SEQ ID NO: 298432 - DNA, 358 bp, Unknown
  Bacterial polypeptide expressing nucleotide sequence isolated from the Sargasso Sea
aatgccaaaaaaaaataaaaaaattgtaaaaaataaaaaatttttatcttttcaagatataataatgaatctgcaaaaattttggggtaagtacggatgtgttattttacaaccctatgatcttgaagttggagcaggaacatttcatccagcaaccacattaagatctctgggtagtaaaccatggaaagcagcctacgttcaaccgtctagaagaccaaccgatggtagatacggtaaaaatccaaatagacttcagcattattatcagtatcaagtgataatcaaaccttcaccaaaaaatataaaacaaacttacttaaagagtttatccacaatcggtatagatgtaaaaaat

SEQ ID NO: 298433 - DNA, 185 bp, Unknown
  Bacterial polypeptide expressing nucleotide sequence isolated from the Sargasso Sea
ccttcacctgctcgaggcccgcggcgtgatctcggtgaccgaacgcacggccaccatcggtcggatccgcaacctggcacgcaaggtggcggaagcctggttggcggaacgggaagctctcgggttccctctgctgagcggggtcaaagcgtccgagacggtgcctgtggccggagcgagttgag

SEQ ID NO: 298434 - DNA, 1561 bp, Unknown
  Bacterial polypeptide expressing nucleotide sequence isolated from the Sargasso Sea
aataatatcactatgccacatgcgtttttgacagatgcagttttggaagttgaaagtttcagtcagtataagaagtctctagatactggtcacgttgtactaaaaattgaagatagaatagccataatcgcaaagggagcagaggctatagcaagtgggttaaaactaagtgtgcgtcaggatgaccaattaattaaggaggtagcaggtttagtagaatggccagttcctttgttaggccaaatagacaaaatatttatggatgttcctcatgaaattttggaaactactatgcgaaaaaaccaaaaatatttttcattagaggaccctgagggaaaattagcaccttactttattgttgtcgcaaataaagagaccccagatggcggggcagcaattgttgccggaaatgagagagttttaaggtcaaggttagcggatgcaaagtttttttgggagagagatttaacaacctctctggaagaaaaatcaaaaaagctagatagtgttattttccatgctgagctagggagtgtgttagataagacgaaaaggttgcaaacaatctccgcctttgttgcggaggaattaaaatttgaaaaagaggaaacacatagagctgcgagtttatgtaaggctgatctcgtaactggtctagtgattgaatttccagaattacaaggaataattggaggttactgtgctactaatgatggagaaagaccggaagttagcaaggctatttccgaacactattctccgataggtccctttgatatatgtccaactcagccagcaagtatggtagtttctattgctgataaagtggataatttggctagttttttttcaataaatatgaaacctacgggatctaaggacccttttgctcttcgcaggtctgcactgggtgttattaggataatattggaaaacaagttgcagttagacctacgaaaactttttgttaacctactccccgagctttggtctgttgattcggtggatcggatgtccgacgatattctagatttctttatagataggtttagggtatttttgcttgatcggggaggacaacatgacttgatctcagctgttttgtcctcacaagacgaagttgatttggtcaaaatgtctatgaaacttaatgcgttaacggcattcttagactcttcagagggcagagacttgttgatagtattcaagagagcaaataacattttgagaattgagcaggggaaggataataaagtttataataatccggataaagttgataaaaaattattggaagaagcgagtgaagtggaattatttaataagtttatcagtattagtccacagataagacaggcattagaaaacagtaattatgaaaaggctctcgatattttagcttcaatgcgacaaaagattgacgacttttttatggaagtaaaagtaaatgcaggtacggcaaaactaagacaaaatagactatatcttctaggtataatctgctccatttttaatgaaatagcagatttctctaaaattgagggaggaaaatttgactaag

SEQ ID NO: 298435 - DNA, 1600 bp, Unknown
  Bacterial polypeptide expressing nucleotide sequence isolated from the Sargasso Sea
aagatcaattttagcaatttttggaaaaaaagttcttaaatttaattatcaacaccttgagacttcaaattttacacaaatagaggaaaattactcattaacacaaaaaaaaattaataatttttctgagtataacaaaattttaaaaagtaattcgataatgcttgatcatagagaacgtgaaaaatttattaacgataaaatttcatcaatatgtaaaaaaaaatcttttaaagtttttattgaccaaactttacttaccgaagtaactaatttagttgataatccaaacatattagttgctcaatttgataaaagttatttaaaattaccccctgaggtcattaggtctactcttcaaactcatcaaaggtattttactttggttgatcatagagacagaataagcaacgattttattgttgttgcaaataaaaaggatgaaaaaaaagtgatcaaagtaggaaatgaaagggtagtcgacgcaagactttctgatgctagtttcttttgggagaaagacaaatctttaaatttaatcaaacagattaataaactaaaagaaattacattttatgaaaatttaggatcactttatgataaaacacaaagattaagaaagatggcgtactttatttcagaccaacttgatattaaaaaagaaaaacttgagatagcggcatctatttgtaaatctgatttagtttcgggtttagtcggggaatttccagaattacaaggaattatgggaaaatattttgctgccaaccagggatttgaagaagaagtatctcgagctgttagtgaacattacttaccaattagtatttcttcaacggtgccaaaaaaaccaatcagttatggtctatcgataatagataaattagatacacttgttggtttctttttaataaatgaaaaaccaacaagttcaaaagatccttttgccttaagaaggtcagctataggattattaagaactattattgaaaataatctgaccgttggtcttagagacttgatagattacttaataaggttttacactgagcaaggtgttaaagatgtaaataagaatacacatttagaattaattaattttttcagagatcgtatgaaaaatatattaaaagaaaaaagagtgagacctgatataattgaagcctcattaagttcacatactaatgataattttcttgagctatacaaaaaaacacttgtgatgaataaatttatatcaaaagatcttggaaaaaatgcagtttcaacttacaaaagagcatacaatattattgatagagaaaaaaacatatcaaaatctggtcctgatgcagttctttttaaacaggacgaggaaaaagaattatttgataaaattaacgatataagaaaagcttttacttataaggagaggaaagaaagttatgagaatcaccttaaacttttgtcggatgccaagttacccactgacaagttttttgataatgtaaaggtaaatgatgaaaataacgatattaaaaacaatagattagaactcttgcaaagactctgttctacatttaatacttttatagatttttcaaaattggaaggtaattaa

SEQ ID NO: 298436 - DNA, 220 bp, Unknown
  Bacterial polypeptide expressing nucleotide sequence isolated from the Sargasso Sea
cttcaatctctaggtaagggtagagttctcttggaaaatacaggaaatatcggaaaaagttataggaagcatgatgaagtgggtactccaatgtgcataacaattgattttgattctcttgataataacacagttacaataagagatagagatagtatggaacaaaaaactattcaaatacaagagcttacaacttatttctctaatttttttaagtaaa

SEQ ID NO: 298437 - DNA, 568 bp, Unknown
  Bacterial polypeptide expressing nucleotide sequence isolated from the Sargasso Sea
atagcaaatagaactgattttgatttaggctcacatactaaaaatcaaaaagaatttaatattagttcagatgttaaaagaaatgaacattctacaactaaattaggggtgcaaaatttagaagaaaaaacctcctatatcccttatgttattgagccttcagctggtgttgatagaggtttactcgctatattaaatgaagcttatactatagaaactttagatgatgataatacgcgaacattattgaaattaaaaccacatttatcccctataaaagcagctgtcattcctttgaaaaaaaataatgaaaaaatagttgcaaaagcaaaagcaattaaaaatgaattacaaaatcttggaatgggaagagttatattagagaattcaggaaatattggaaaaaattatagacggcacgatgaaattggcactcccatttgcattactgttgattttgaaacatttgatgatgattcagtgacggttagagatcgtgactcaatgagtcaggaaagagtagcttctaaagatcttaatcaattttatcaaaaatactttcattaat

SEQ ID NO: 298438 - DNA, 2164 bp, Unknown
  Bacterial polypeptide expressing nucleotide sequence isolated from the Sargasso Sea
cttgtctaaatatttacttgagataggaacagaagagttgcctgcaaaattttcttattctgttctagagcaatttaaatctctattagaatttgaattggataaaaagttaatcaaatgcgacaatatagttgtcacctccacaccaaggaggatagtgctacttcttgaaggtttagttgattatgcagaagataagataatagtaagaaaaggacctaaagcaaattctgcttttttaaatggatctcctactaatgctgccttaggttttgcaaatagtttaggtatagatttaggcgagctagaaataaaaagtacagaaaagggtgattttatatttggaaagaaaattgagaaaggacaatcaacaagaatttctttgtcttcaattattcctaaagtagtgaagagtcttcaaggtcctagatttatgaagtggggagctgggaacttaaaattttcgagacctattagatggattgtctctctttataatgatgaaattcttgatttcccatttgatgaatgtgatccaaaaattcaaataagcaataagtcaaaaagtcatagactattaaatgaagtttttgaagttcagcatgttgatgacttttttgaattattgaaacaaaatagagttttagttaaacgagatgaaagaaaagaaaaaattgaaaatcttataaatcagacatcccaatcacttaatctgaatcctgacctttctgaagtactacttaatgaattaattgatttagttgaatggccagacttaatagttggaaaattcagtgaagaatttcttgatcttcctcttgaagttctttcaactgtcatgaaaagtcatcagagatatgtacctcttttactgaaaaataatagtttttctaaactagatttaagctctgaaaaaaacattagtacaaatttttttgttatttcaaatggttttgaagtatcaaataaaaatattgctaaaggtaatgagaaagttttgagggcaaggttttcagatgcaaagttttttgtagaaagtgataaaaaagttgcttcaattgaaagaaacgaaaagcttaaatctgtttcctatttgaaaggatttggaaatatttttcagagggtagaaagaatagaggaggttactaaaaaaatcctaaaatttttaaaagataattctttagaagaaaaaaaaataatagaagctgctaaatactgtaaaaatgacttatgtagtgaaatcgttttcgaattccctgagctgcaaggaataatgggtggcaaatatcttaaatatgagggatttagtgaggatgtttgcttggctgtggctgaacattatttaccttctttttataaagatgctttaccctccacaaaatatggtgcaatagtttctatagcagataaggttgaaactttaataagtatatttatttctggtaaacgtcccagtggatcatctgatccttatgccctaagaagaaatttgaatggagtcattaaaataatttgggattatgaacttgatttacctttagataaattatttaacgaacttattgatttttggaaaatggcatttccaaatttaaacttcacaagagaaacagtatttaatgatataaatgaatttttagttcaaagaattgttagtcatctagaagaaaaattactaagtaaagaattgataaaggccgtttgctcttctgatgaattatctcaaaaaagagttttgaatattgttgatcttaagaaaaggactaaatctattatgaattttaacgaaagggagaattttgttgaaatccagaaggtaattacaagggtaagcaaattagctaaaaatagtgatctttcaacagacgttctctcagcaagagattatgtaaacacaaaactttttgaaaaagattgtgaattgaaagtttttgaatttattagagaattagaaaaacgtttttctgaaggttattgcaattatttggaactactaaacttgtttgagattaatgtaaacactatcgaagatttatttgataatgaaaagggagtcctaataatgtcagaggatttaaaaataagaaataatagactcaatttgttgagcttaattagaaattattctctaaaaatagccgactttacacttttgaactcttaa

SEQ ID NO: 298439 - DNA, 1168 bp, Unknown
  Bacterial polypeptide expressing nucleotide sequence isolated from the Sargasso Sea
tttggtcatcgatttatgggaaatggtgaatttttggtaaattcttttgaggattatgcttctaaattgaaaaaagaatttgtgatattagatccctcggaaagggcagaaataatcttacaggaaataaaaaatcaagcttttgctaagggtttggaactaatcaatgacccaaatttattgaatgaagtagttggcttgatcgagtggccggttgttttaatgggtaaactggaagaacgatttctttctttgcccccggaagttttgcaaacatccatgagggagcaccaaaagtttttttcaattctaaactctaaaaataataaggtagtgcagtttgcaactgtagctaatcgtgaaacatctgataacggatctacgattctagccggaaatcaaaaagttctttcagcaagattagcagacgcaaagtttttttgggacaatgatcttcgaattgtttataccagtggtcttgatttttggttggaaaaattaaagcaggttacttttcataataagttgggtagccaatttgaacgtattgaacgcattactaatttatctggagcaattgctaaaaaaattggttgtgatcctaatttagcagagaatgctgcttctatatcgaaatcagatctttcgtctgagatggtatatgaatttccagaattacaaggagtaatgggaacttactacgctatagaggcgggttttgagaaaaatatagcaaatgcgtgcaaagagcactacgctccattagggcccagtgatgaggttcccaattcaccagtatcaattgttgtggctttagccgataaaattgatactctaactagcttttggtctataaacgaaaagccaacaggctctaaagatccgtttgctttgagaagaagtgcattaggtttgatccgaataataatcgaaaatgacattcgcatttctttgtcagatattttagcactaggtaacgatggagcagatatagaagatctgaaatatttcattcatcagagaatgaaagtttttctgcgtgatcaatcacttaggcatgatttaattgatgcatgtttgtcattagacgaaggtaatgatctggcgctttcagtgaaaaaatcacttgcattaacagactttattaaaacaagcgacggagcaaatc

SEQ ID NO: 298440 - DNA, 488 bp, Unknown
  Bacterial polypeptide expressing nucleotide sequence isolated from the Sargasso Sea
tatgagtatcgataagattgtttctctatgtaaacgcagaggattcatttttcaaagttctgatatatatgggggtttcagagcagtgtatgattatggacctttaggaatagcgcttaaaactaatatctctcaactatggtggaagtcaatgacccagcttcacgaaaatattgttgggctggatagtgcaattcttatggatccaaaaatatgggaagcttcaggtcatgttggagcgttcaacgacccattggttgactgcaaacaatgtaaggcgcgctaccgtgctgatcaacttggtgatattgaaaatgaaaaaattagttggaatgaaattcaatgtccaaaatgcggcaccaaagggaacttaactgagccaagacaattcaatctaatgttcaagacttatgttggcgctgtagaagaagattctagtgcaacatttctgcgtcctgagacagcgcaaggtatttatgtaaattatt

SEQ ID NO: 298441 - DNA, 101 bp, Unknown
  Bacterial polypeptide expressing nucleotide sequence isolated from the Sargasso Sea
ctacattctgcgcattcgcaccctgaccaaagccgtggcagaagcgtactacgcttcccgtgaagccctgggcttcccgatgtgcaacaagaataaataag

SEQ ID NO: 298442 - DNA, 505 bp, Unknown
  Bacterial polypeptide expressing nucleotide sequence isolated from the Sargasso Sea
gtttctgaaacaaagaagaatgatgagtcaactatgcggctggctgttcaagacattgaggccaaaaaatggtatgtgccatatgtaatagagccctctgctggagtagataggggtgttttagcagtattaaatgaggcctataccgttgaagagtttggcgaaggaaaagaaagggttgtattaaagctaaagtcgcacctcgcaccgattaaagctgcagtaatacctcttaagaaaaacaaagaggagcttgttgggctcgcaaaagaaatcaaatcaagtcttcagtcgatggggaggggtagggtgtttttagaaaatacaggaaatattggaaaagcctaccgaagacatgatgaggttggaacaccggtgtgtattactgttgattttgatagtctcgagaacggaacagttacactaagagatagagatactatggagcaacacacagtagcaatttctgacttgaaccagctgtacttagattcattaaagtaaa

SEQ ID NO: 298443 - DNA, 1112 bp, Unknown
  Bacterial polypeptide expressing nucleotide sequence isolated from the Sargasso Sea
aatattagggaatgaaaaagttcttagatcaaggttacaagatgcaaaatttttttgggaaagtgacagatcaaaaacattttctagcatgcttgaagatttgaagaaagtttcatactttgaaggattgggttcattgtatgataaatctaaaagaattgaaaaaatatcagattttatctcaaaacaaataaatttaagtaatgtaaaacctattaaaagagcagcacttttgtgtaaggttgatttgctatcaggaatggttggtgaatttcctgaactacaaggcattatgggtggttactattcatctaatgaaggtaaagatgtttcagatttaattagatcgcattatttacctaaaggaagttctggagaggtatcaacaaacaccggtgtaaatattatttctttatctgataaaattgatcatttggttggattttttattgtcggtaaattgccttctggcagcaaagatccatttggcttaagaagatcagcattaagcattataagggttttgatagagggaaatatattaataaatttagatagtttaattgaatttacttctaaacaaattaataaaaaaaatattgataatcaaaaaattaaatcttttattattgaccgatacaaggttttacttagagagaaaaatataaaatatgatgtaatcaattgtttagtagataataatcttacatttttatccaaaacaaatgaaagactagttatattaaataactttttagatactaaagagggtaatgaacttaaattactttggcaaagagtatcaaatattctccatatagaagaaaaacaaaacaagaaaatagaaattttgaatgctaaaatgcaaagtgaatacgtaagggatgaagtaaatattataaatgcaattaataatattgagaaaacggatgattatttaaaaatgttaagtcaaagatcgtcattaaaagatataacttttgagttttttgaaaatttaaaaatcaatgatagtgatccattaattaaaaatagaagactttcaatcttagctttgcttagagagaaattattagacattggagatcttagaaagcttgaaggaagttaag

SEQ ID NO: 298444 - DNA, 1492 bp, Unknown
  Bacterial polypeptide expressing nucleotide sequence isolated from the Sargasso Sea
aaaggagtcagcgattatttcgaagcgctaacaaataatcttgtaatagccgatcaagggcagagaagagaattgatcttagaacaaatatcaaaaattgaaaaaaaatttgatatcagtgtaataaaggacgaaaaactattagaagaagtttcaggtctcgtggaatggcccatagcactttgcgctgaatttgacgagaaatttctcaaccttccagatgaagtacttcagacatcaatgagaagtcatcagaaatacttctctgttgcagaaaaaaagacaaaaaatcttacaaataaatttatacttatctcaaatattcaaacatcagacgagggaaactctgttatattaggaaatcagcgtgttttatctgcaagattgtacgacgcaaaatatttttgggatagggatatagatcagccgctaatcgataatttgcgtttattagatagtgtaacttatcatcagaaattgggaagcttgggttcaaaagttgagaggattgagcttattgcgctagagcttgatcaaactcttgccttaaatctagaaaatattccaatagctgcaaaattaatcaaaaatgatcttttatctgaaatggttggtgaatttccagatttacagggtattatgggaagttattatgccgaacgtcaaggctatgatgaagacgtatgtgatgctattaaaaatcactatatgccagtaacaccacgggacgaaactcctaagaaagccctctctttttgcctctcggttgccgataaaattgatactttagttggtttttggtcgattggtgagacgccgacaggttcaaaagatccatacgctctcagaagagcaggtaatggcttaattcggaatattattgaaaataagcttgattttgattttgcacattttattgaaaaaatactacaaaaatcagacttgttaaaaaaacaacaacatagctcagttagggaagggcttgttaattttatgaacgaaagattccgaggttatattcttgataataaatatgatgttagaatttacgacgctatttctcgtgatgatgattttgtaaattattatatgactctatcacgcatacaattattaagtcagtttatcaaaacagacaatggcttatctttgcttaaagcactgaaacgaatcaataatattctagatccaagtttatcaaacaatacttttggtgaaattgataagaagatttttacaagtgacgtcgaaaataatttatacacaggtattgaaaaactaaggaagaaaaagtcgaagtctaatgatataacagagatcaaaaaatacttgagtgatgtatctatcttagcagaccccataaatgatttttttgaaaatattattgttaatgacgaggacaaaaatatacgaacaaacagattttttcttttgaattctgttattgatctaacaagtaatatttttgatataggtaaaattgagttatagt

SEQ ID NO: 298445 - DNA, 608 bp, Unknown
  Bacterial polypeptide expressing nucleotide sequence isolated from the Sargasso Sea
ttcaagaagaccaacagatggaagatatggagaaaatccaaatcggttacaacattattatcaatatcaagtgattataaaaccatctccgaaaaatattaaacaactttatctcaaaagtttagcagccattggaatagatgtaaaaaatcatgacattcgtttcgttgaagatgattgggaaagtccaacattaggagcagcaggtttaggttgggaagtttggtgtgatggaatggaaattacgcaatttacttattttcagcaaatgacaggtatagagtgcaaacctgtaccagtagagattacgtatggtcttgaaagactatgtatgttcgttcaaggaaaaaataatgtttttgatctcgattggaataaagagggagtcaaatataaagaagttttttttcaagctgaaaaagaattttctgcttataattttgagtttgcaaataccgatactctgcttaaacattttgagaataccgaaaatgaatgtaaatctttacttgaaaagaaactatcattaccggcttatgatcaatgtctaaaagcaagtcatatttttaatttactagatgctcgtggtgtcattggtgttgcagaaa

SEQ ID NO: 298446 - DNA, 900 bp, Unknown
  Bacterial polypeptide expressing nucleotide sequence isolated from the Sargasso Sea
acactacgcctctgcattagagaaacaatatgtgttggcagattttgaagcgcgtaaagataaagtacgccagcaacttgaagacgcagccaaaaacttatcgcttaagccagattacgacgaagaactgctggaagaaattgcttccctggtagagtggcctgtagtgctgcaagcaggattcgataagggtttcttagaagtgccgaaagaagcacttatctacacaatgaaggacgaccagaagtatgtgccgctgcttgatagtgatggcgcactttctaacactttcttgtttgtgacgaatattgaaagccatgacgcatctcaagttatctcaggtaatgagaaagttatccgccctcgccttgccgatgcagagttcttctttaacagcgataaaaagacaacgctagaaagccgccttgaaagcttagaaaccgtgttattccaaaagcagcttggaacgcttaaagaaaagtctgaacgtatttctgccctatcggcgtttatcgcttcgcaaatagatgcgaatgaaacacaagcagcacgagctggtcttctagctaaaaccgacttaatgtcgaacatggttatggagtttccagacgttcagggcgttatgggtaaatactatgcgttaaacgacggtgaagatgcacctgttgctgaagcgctgtacgaacaatacatgccgcgttttgctggcgacgcccttcctagttctggcgtaagcgcatcagtagcccttgctgacaaacttgatacactagttggtatattcggtattggccagctgccaaaaggtgataaagacccgtttgcacttcgtcgtgcagctattggtgttctgcgtattgttaccgagctatcactgccattagaccttgaaacgcttgt

SEQ ID NO: 298447 - DNA, 742 bp, Unknown
  Bacterial polypeptide expressing nucleotide sequence isolated from the Sargasso Sea
tatggaagaaactaatacagagttattcgaaaaaatcgtaaaggtcgcacaagcaagaggatttgtttttaatgcttcttctatttatggtggccttagaagctcttatgattatggtcctcttggagttttacttaaaaataatatatccaattattggtggaatgatattaacaatgaaaacgaaatatctatttttcctgttgatacagctattattcaaagctctgaagtgtggaaagcttcaggccatttagctgaattttcagacccaatggttgatcataaaccaactggtgaaagatatagagctgatcaagtaccagatgatatagataaagccgatctcactgaacctcgacaatttaatcttatgtttgaaacaggtattggtcctgttaaaaatgaaaattcaactgtttatctaagaccagaaacagctcaaggaatatttgtaaattttgagaatgttttgagaacaatgagagcaaagattccgtttggaattgcgaatattggaaaatctttcagaaatgaaataacaccggggcagtttatttttaggactagagagtttgagcaaatggagattgaattcttctgcaaagaagaagatgaaaacaaatggtttgattattgggtaaaaaagagaatggaatggtataaatctattggaatcccagatagtagccttcgacttagagagcatagtaacaatgaattggctcattatgcttcaaaa

SEQ ID NO: 298448 - DNA, 422 bp, Unknown
  Bacterial polypeptide expressing nucleotide sequence isolated from the Sargasso Sea
tatggtttctaaaaaaaaaacaaaaaacccaaaatcatttatttcttttcaggatacaatattaaatcttcaaaagtattggtcaaaaaaaggttgcgttattttacaaccttatgatttagaagttggggcaggaacatttcacccagcaacaactctcagatcattaggtcccaaaccatggaaaacagcttacgttcaaccatcaagaagaccaacagatggaaggtatggagaaaatcctaatcgtttgcaacactactatcaatttcaagttttaataaaaccttcaccaaaagatattaaaaaaatgtatcttaatagcctttcatcagtaggtattaaatacgaagagcacgatatcagatttgtagaggatgattgggaaagtccaaccttaggtgctgctggtcttggatggg

SEQ ID NO: 298449 - DNA, 939 bp, Unknown
  Bacterial polypeptide expressing nucleotide sequence isolated from the Sargasso Sea
ttgcccgcagtgtggcgtgagcctggccgagatcgaccagagcggcccgaagctgcgctttgtgcagaacattccggggcaacccgcgactgacctgctgcccggcatcgtcgatgccgcgctggccgcactgccgattcccaagcgcatgcgctggggtgcccgcaagaccgaattcgtgcgtccgacccaatggctggtaatgctgctcggcgagcaggtcgtgccctgcgagattctctcccagcaggccggcaacctgtcccgcggtcaccgcttccatcacccggatcaggtcaccatcgccagccctgccgcctacgccgagaccctgcgcagcgcccatgtgattgccgactttgccgagcgccgcgaaatcatcaagacccgcgtcgacgcgctggcagcagagcagcagggtacggctattgttccggctgacctgctggacgaagtgaccgcgctggtcgagtggcccgtgccgctggtctgcagcttcgaggagcgtttcctcgaagtaccgcaggaagccctgatctcgaccatgcaggacaaccagaagtacttctgcctgctggatgcggccggcaaactgttgccgcgctttatcaccgtctccaacctggagagcagggacccggcgcagatcgtcgagggcaacgagaaagtcgtacgcccacgcctgaccgacgccgagttcttcttcaagcaggacaagaagcagccgctggaaacccgtaacgagcgcctggccaatgtggtattccaggctgatctgggcagcgtgtttgaaaaagcccagcgtgtatccagcctggccggcgtcattgcagcgaagatcggcggcgacgccgagcgcgccgctcgcgcaggcctgctgtccaagtgcgacctggcgaccgaaatggtcggcgagttcccggagctgcagggcattgc

SEQ ID NO: 298450 - DNA, 535 bp, Unknown
  Bacterial polypeptide expressing nucleotide sequence isolated from the Sargasso Sea
cacaaaaaatcagaaagattattctctatccgcaacagttttgtctaatgacaaatctaactccaaacttgcgattaatgatcctgggtccaaagaatgggtgataccgtatgtgatcgagccttcagcaggtgtagataggggcgtgcttgctctcctcaacgaggcatacacagaagaaagacttgaaaatgatgacacaagaattgtattaaaattggatccaagattagctccaatcaaagttgcagtaataccactcaaaaaaaataattctgagattgtaaagcttgcacacaaaataaaagattctatccaatccttaagaattggacgtattgttattgaaaatacaggaaatattggtaagagttatagaaaacatgacgaaattggtacgccaatctgtattactgtagattttgattctctagaaaatgaagatgtaactattcgagacagagatactatggaacaaataagacaaccaatttctaaagtatcagaatttgtaaaacagcagataaataagtga

SEQ ID NO: 298451 - DNA, 455 bp, Unknown
  Bacterial polypeptide expressing nucleotide sequence isolated from the Sargasso Sea
tatggcctctaaaaaaaaaaattcagaaatacaaacattccaggatacaattttaaatctgcagaaattttgggcaaaaaatggctgtataattttacaaccatatgacatagaagttggtgcaggcacatttcaccccgcaaccaccttgagatctttaggacccaaaccatggagatcagcttatgtacaaccttcgagaagaccaactgatggaagatatggagaaaatccaaatagactacaacattattatcagttccaagtgattataaaaccgtcaccaaaaaatattaaaagattatatcttagtagtcttaatgctattggaataaaacataatgatcatgatattagatttgttgaagatgattgggaaagtccaacattgggtgcagccggactaggttgggaagtttggtgcgatggaatggaaattactcaatttacttatt

SEQ ID NO: 298452 - DNA, 625 bp, Unknown
  Bacterial polypeptide expressing nucleotide sequence isolated from the Sargasso Sea
atggcctctaaaaaaaaaaattcaaaaatacaaacattccaggatacaattttaaatctgcagaaattttgggcaaaaaatggttgtgtaattttacaaccatatgacatagaagttggtgcaggcacatttcaccccgcaaccaccttaagatctttaggacccaaaccatggagatcagcttatgtacaaccttcgagaagaccaactgatggaagatatggagaaaatccaaatagacttcaacattattatcagttccaagtgattataaaaccgtctccaaaaaatattaaaaaattatatctaagcagtcttaatgccattggaataaaacataatgaccatgatattagatttgttgaagatgattgggaaagtcctacattgggtgcagccggactaggttgggaagtttggtgtgatggaatggaaattactcaatttacttattttcaaaaaatggctgggatggattgcaaacctatttctgtagagcttacttatggtttagaaagattatgtatgtttacccaaaagaaaaaaaacgtatttgacttagtatggaatgatgaaggtattctttataaagatgtttttttacaagctgaaaaaaagaattttc

SEQ ID NO: 298453 - DNA, 319 bp, Unknown
  Bacterial polypeptide expressing nucleotide sequence isolated from the Sargasso Sea
tatggcctctaaaaaaagtaaaaaaaaaccaaaatttcaaacttttcaggatacaattttaaacctccaaaaatattggagtaaacatggttgtataattttacaaccatatgatatggaggttggagcaggaacttttcatccagctacaactcttaggtcacttggaccaaaaccatggaaagcagcttatgtacaaccttccagaagaccgactgatggaagatatggagataaccctaatagacttcagcactattatcaatttcaagttataattaaaccttctcccatcaaatataaaaaaacttttatttaa

SEQ ID NO: 298454 - DNA, 981 bp, Unknown
  Bacterial polypeptide expressing nucleotide sequence isolated from the Sargasso Sea
ggatgaactcgtctctctctgtaagagaagaggatttatttttcaatctggagaaatttatggtggtcttcagggaatatatgactatggtccaatgggggtagaacttaagaagaatattaaggattcatggtggtcatcaatggtctacaaaagagacgatatagaaggcttagatgcgtcaatattaaccaacccaaaagtactcaaatattccgggcatgaggatactttttcggatccgttagttgattgtaaggactgtaatggacgttttagatcagatcatttagatgatagtaagtgcccactatgtgattcaacaaaccttactgctccgcgtccttttaacctaatgttcaagacaactgttggcccagttgatgatggtaaaaattttgcatatttaagacctgaaacagcacaacatatttttacaaattttaaaaatgtactggactcaaatcctaagaatttaccatttggaatagctcaaatagggaaagcttttcggaatgagattacgccaagaaattttatttttagagtgcgtgaatttgaacagatggagttagagttctttgtaaaaaatggtgatgatgaaaaatggcatgaatattggttagaagaaagattatcatggtgggaagaccagggggttcccagatcaagtcttgaaattttagatgttcctgaagatgatctttctcattattcaaagaaaacatatgaccttatgtataagtttccacatggagttgaagaattagagggtatagctaataggacagactttgatcttgggtctcacagcaaaaatcaaaatgaatttgaaataacagccaaggtcacaaacaataaagaatctaactctaaacttgctgttcataatttagataaaaaaaaatgggagataccatatgtaattgagccatctgctggcgtagatagagcattccttgcaatacttaatgaagccta

SEQ ID NO: 298455 - DNA, 796 bp, Unknown
  Bacterial polypeptide expressing nucleotide sequence isolated from the Sargasso Sea
gttagagagtttgagcaaatggagctggagttttttgtaaaaccaggatctgatgatgaatggcataaatattgggtagataaaagaattgaatggtgggaaacacaaggtataagtaaaaaaaatttacatcctatggaagtagaacagagtgaattatcacattattcaaaagcaactgtagatattatgtatgaatttcctcacggaaaagaggagcttgaaggaattgcaaacaggactgattttgatttaggctcacatactaaaaatcaaaaagattataatattaattcagatgttaaaaaaaatgaacattctacaacaaaattaggggtgcaaaatttagaagaaaaaacctcctatataccctatgtaattgagccttcagctggtgttgatagaggtttactcgctattttaaatgaagcttatactatagaaactttagatgatgataatacgcgaacagtattgaaattaaaaccacatttatcacctataaaagcagctgtcattcctttgaaaaaaaataatgaacaaattgtttcaaaagcaaaagcaataaaaaatgaattacaaaatcttggaatgggaagagttatattagagaattcaggaaatattggaaaaaattatagacggcacgatgaaattggaactcctatttgcattactgttgattttgaaacacttgatgatgattcagtaactgttagagatcgtgactcaatgagccaggaaagagtagcttctaaagatcttaatcaattttatcaaaaatactttcattaat

SEQ ID NO: 298456 - DNA, 717 bp, Unknown
  Bacterial polypeptide expressing nucleotide sequence isolated from the Sargasso Sea
acaaaaccgtggaaagcagcatacgttcaaccatccagaagaccaacagatggaaggtatggaaaaaatccaaatcgtttacaacattattatcaatatcaggttatcattaaaccgtcgccagaaaatataaaacaaatttatcttaaaagtttatcgactataggaattcaatctaaagatcacgatattagatttgtcgaagatgattgggagagccctacactcggtgctgcaggattaggttgggaggtctggtgtgatggaatggaaataactcagtttacttattttcaaaaaatgaccggtatagattgtaaacctatatctgtagaactcacttatggtctggagagaatatgtatgtttgtccaacaaaaaaaaaatgtttttgatatcgattggaataatgatggagtaaagtatggagatgtataccttcaatctgaaaaggaattttcagcatataattttgaacatgcaaatacagattctttattgaaaaattttgaaatagccgaaacagaatgtaaatcgttattggagaaaaaactttctttacctgcctatgatcagtgtttaaaagcaagtcatatatttaatttattagattcaagaggtgtaattgctgttgccgagagaacgggatacattaatagaattagggatcttgcaaaaggatcaggatctatatggttagaaaatcaagaaaaataa

SEQ ID NO: 298457 - DNA, 769 bp, Unknown
  Bacterial polypeptide expressing nucleotide sequence isolated from the Sargasso Sea
tatggaggttggtgcaggaacttttcatccagctactaccctaagatcacttggaactaaaccatggaaagcagcttacgtacaaccatcaagaagacctacagatggaagatatggagataatccaaacaggttgcaacactattatcaatttcaagttttaattaaaccttcccctgaaaatataaaaaaactttatctaaatagtttatctaatataggaatagatcataatgatcatgatataaggtttgttgaagatgattgggaaagtccaacattaggtgccgcaggattgggatgggaagtatggtgtgatggaatggaaattactcaattcacctattttcaacaaatggctggatttgattgtaaacctgtatcagttgaaatcacttatggtttagaaagaatttgtatgttcactcaaaaagaaaaaaacgtttatgatttgttgtggaatgatgaaggtgtaaaatatcacgaagtatttcatcaagccgaaaaagaattttcagcatacaattttgaacacgcgaatgtagaaacacttttgaaaatgtttgaaatgcatgagtctgaggcaaaagatttggtagaaaaaaaaatttctttaccagcatatgatcaatgtttaaaagccagtcatgtgtttaatattttagatgcaagaggtgcaatcagtgttgcacagagagctggttatattgccagaataagagatattacaaaatctgcagcaggcgtttggttagatagtcaaaaataa

SEQ ID NO: 298458 - DNA, 895 bp, Unknown
  Bacterial polypeptide expressing nucleotide sequence isolated from the Sargasso Sea
atggtctctaaaaaaaaaaataaaaaacaaaagtttcaaacttttcaagatactatcttaaatttacaaaagttttggagtaaacatggatgtatagttttacaaccttatgatatggaagttggagccggaacattccaccctgcaacaactttaagatcattaggaccgaaaccgtggaaagcagcatatgttcagccttcaagaaggccaacagatggtagatatggagataatccaaatagacttcagcattattatcaatttcaagttataataaaaccttctccactaaatattaaaaaactttatttaaatagtttgtcagtgataggtataaacccaaagtatcacgatattagatttgttgaggatgattgggaaagtccaactttaggtgcggctgggcttggttgggaagtttggtgtgatggtatggagattacccagtttacatattttcaacaaatggcaggttttgaatgcaagcctatttcggtagaaattacatatggtttagaaagaatttgcatgtttacgcaacagaaaaaaaatgtttatgatttaatttggaacgaggaaggtgtcgaatatcgagaagttttctttcaagcagagaaagaattttcagcatataattttgattttgctaatactaaaaatctttttaagatttttgatatgttagaaaatgaagcaaagtcattagttgaaaaaaaaatttccctacctgcgtatgatcaatgtctaaaagcaagtcatgtttttaacattttagatgctcgtggtgctattagtgtagctcaaagagcagaatatattggaagaattagagaaataacaaagttagtagctacgatttgggttgatactcaaagaataaaatgtcagaatt

SEQ ID NO: 298459 - DNA, 763 bp, Unknown
  Bacterial polypeptide expressing nucleotide sequence isolated from the Sargasso Sea
gggcgcgggtacatttcatccggcaacacactaagatctctcggacctaaatcttggaaggcagcctatgttcaaccctcaagaagaccaactgatggaagatatggaaaaaatccaaatcgattacaacactattatcaatatcaagttataattaaaccatctccaaaaaatattaagcaaatatatttaaaaagtttggaagccataggaataaaatcaaaagatcatgatgtaagatttgttgaggatgattgggaaagcccaactcttggagcagccggattaggatgggaggtttggtgcgatggtatggaaataactcaatttacctactttcaaaagatgacaggaatagagtgtaaaccaatatcagttgagcttacttacggtttagaaagaatttgtatgtttgttcagggtaaaaaaaacgtatttgatattgattggaataataatggaattaagtatagagatgtatattttcagtctgagaaagaattttcagcgtataattttgatcacgcaaatacagattttttattgaaaaactttgaaattgctgagaaggaatgtaagtctttattagaaaaaaaacttcccctacctgcttatgaccattgtttgaaagcaagtcatatatttaatttgttggactctagaggggtaatttctgttgcagaaagaactggttatataaatagaattagagatcttgcaaaaggatcgggatctgtatggttggaaaatcaagaaaagtgaa

SEQ ID NO: 298460 - DNA, 980 bp, Unknown
  Bacterial polypeptide expressing nucleotide sequence isolated from the Sargasso Sea
aactaattggactgacgttaaacaatttaatttaatgtttaatacaaaagttggtgcctcagcagagagtgctactgaattatttttaagacctgaaactgcccaaggtatttttttaaactatttaaatgttcaaaagacaggaagaatgaaaatcccttttggaattgctcaaattggaaaagcttttcgaaatgaaattatagctagacagtttatttttagaatgcgcgagtttgaacaaatggaaatgcaattttttgtcaaacctggtactcaaaaagaatggtacgaaaaatggaaaaaaaacagaatggaatggcatttatcaattggaataaataaaaataattatagatttcatgaccacgataaacttgcacactatgctgatgctgcttgtgatatcgagtttaatttcccttttggatttaaagaattagagggtattcactcacgaacagattttgacttggcaaatcatgaaaagttttcctcaaaacaaattaaatattttgatcctgaggatgaatctaaatacatcccttatgttgtagaaacttcaataggtttagatcgaatgtttcttgccgtcttttctaattccctttctttcgaatcgttagaagacggttctcaaagaactgtattaaaaatcccaaaaatattagctccaaatcaatgcgcaatcctgccattggtaaagaaagatggacttgccgattttgcaaaagaattaaaaaatcaacttaaagtaaaatttaagttaatttatgatgaaaaagatgctataggtagaagatataggaggcaagatgctttaggaacacctttttgtataacagttgaccatcagacacttgacgataaaaccatcacgattagagatagggactctatgaaacaaaaaagaattaaagtggatgaattagaaaattttttatttaaatcttttgaaatttctaattggcttaggtaaa

SEQ ID NO: 298461 - DNA, 753 bp, Unknown
  Bacterial polypeptide expressing nucleotide sequence isolated from the Sargasso Sea
tatggtctctaaaaaaaaagaatcaaaaaaaaaattacaatcatttcaagaaacaatttttaatcttcaaaagttttggagtaaaaaaggatgtatcgttttgcaaccatatgatatggaagttggagctggaacatttcatccagccactacacttaggtcaattggcccaaagccatggaaagttgcttatgtgcaaccatcaagaagaccaacagatggaaggtatggtgacaatccaaatagattacagcattattatcagtttcaagttttaataaaaccttcaccagataatataaaaaaattataccttaatagcttatcaacgattggtattgatcataatgaacacgatataagatttgttgaagatgattgggaaagcccaactcttggagcagctggtttaggttgggaagtttggtgtgatggtatggaaataacacaatttacatactttcaacaaatggcaggttatgaatgtaaacctgtttctgtcgaaatcacatatggcttagaaagaatatgtatgtttatacaacaagaaaaaaatgtgtacgatctattatggaatgatgaaggtgtgaagtataaagatgtatttcatcaagcagaaaaagaattttcagcatataattttgaacatgcaaatatagacagcttatttaaaatgtttgatatgcatgaaacggaagcaaaatctcttgttgaaaaaaaaatatctctacctgcgtacgatcaatgtttaaa

SEQ ID NO: 298462 - DNA, 279 bp, Unknown
  Bacterial polypeptide expressing nucleotide sequence isolated from the Sargasso Sea
aatgcctaaaaatattcaaagcacaagagacccaaagaattcatttcaagatcttatcttaatgcttcaagatttttggtcaagcaatggctgtgtgatcttacagccttatgatatggaggtcggagccggtacgttccaccctggtacaatactaagagcccttggtgaagacacttggaacgctgcttatgttcaaccatcgcgtaggccaacagatggccgatttggtgagaatcctaatagactgcaacattattaccaatttcaggttgtttt

SEQ ID NO: 298463 - DNA, 268 bp, Unknown
  Bacterial polypeptide expressing nucleotide sequence isolated from the Sargasso Sea
ggcttcgagcagtacgagaaggaagcccaaaatctgctggcactggaaaaaccactgccgctgcctgcctacgagcgcatcctcaaagccgctcactccttcaacctgctggatgcccgcaaggccatctcggtcaccgagcgtcagcgctacatcctgcgcattcgcaccctgaccaaggccgtggcagaggcatactacgcctcccgcgaagcgctgggcttcccgatgtgccaacgtggcagcaacgagaacaagcaaggttaag

SEQ ID NO: 298464 - DNA, 904 bp, Unknown
  Bacterial polypeptide expressing nucleotide sequence isolated from the Sargasso Sea
aatgactcataattcgaatattgttggtttagatagttcaataatggtccatcctgatgtctgggaagcaagtggtcatgtagccaattttaatgatcctatgacggataataaagataacaaaaagcgttatagggttgatgatttattattgcagcaaaaaaataaagttatcgatgctctctgtgaaatgatgtcaatcgaaaataataacgataatgacacaattgataaaattagtagtacactattaaatgacgcaaataaatataacaatgctttagagtctgcgggggttattgatccattttctggcaatgtcggtaaatggacacaagctacccaatttaacttaatgtttaaaactaatgctggcccctctgaaaaaactggtaaaagtatttacctaagacctgaaacagctcagggtatttatattaattacctcttagtccaaaattccatgcgtttgaaggtgccttttggtattgcccagactggaaaagctttcagaaatgaaatcattgcaaggaattttatttttagaaccagggaatttgaacagatggaaatgcaatattttgtgcatccttccgaagatgagtcttctatgaacttttggaaaaaacaaagaatggatttttattcctcggaactcggaataagtaatgaaaatttaaaatttcatcagcattcaaaagatgcattagcgcattatgctaaagatgcatttgacattgaatataactttccatttgggtggggtgaagttgagggaattcacaatagaacagattttgatttaaaagaacatgaaaagttgtctggtaaaaacatgatgtactttgatgccattaaaaacgaaaaataccatccctatataattgaaacatctactggttga

SEQ ID NO: 298465 - DNA, 443 bp, Unknown
  Bacterial polypeptide expressing nucleotide sequence isolated from the Sargasso Sea
tatggcctctaaaaaaataaaaaaaaaaccaaaatttcaaacttttcaagatacaattataaatcttcaaaagttttggagtaaaaatgggtgtgtaattttacaaccttatgatatggaagttggagctggaacatttcatccagctactactctaagatctcttgggcctaagccatggaaagcagcgtatgtccaaccttcacgaagacctacagatggaagatatggagataatccaaatagacttcagcattattatcaatttcaagttataataaaaccctctccaattaatattaaaaaactttatttaaatagtttgtcagtaataggaattaatcataaagaacacgatattagatttgttgaagatgattgggaaagcccaactctaggagctgcaggtcttggatgggaagttggtgtgatggaatggaaat

SEQ ID NO: 298466 - DNA, 575 bp, Unknown
  Bacterial polypeptide expressing nucleotide sequence isolated from the Sargasso Sea
tatggggttaaatagcatgccagccacttcaatggaccaattggttgctttatgtaagcgtcgcggttttatatttccagggtctgagatctacggtggtcttcagggtacatatgactatggtcctttgggggttgagcttaagaacaatctaaaagcagcctggtggcgagcgatgatttatgagcgtgatgatattgaaggcttagacgcttcaattttagggcatcggatggtttttcagcattcgggccatgaggcgacgttttcggacccaatggttgattgtcgtgcatgtaaaagccgttttagagcagatcacctaaaaaacaatcaatgtgagcattgtggttcaacggacttaactgatcctcgtcctttcaatatgatgtttaaaacacaagttggaccgatggaagatagtgcttccattgcctatttgaggcctgaaacggcgcaggatatttttattaattttaaaaatgttctcgattcatcaccccatcatttgccatttggtattgcgcagattggtaaagcttttcgtaatgagattactccgcgcaattttatct

SEQ ID NO: 298467 - DNA, 442 bp, Unknown
  Bacterial polypeptide expressing nucleotide sequence isolated from the Sargasso Sea
gcgaattacctacggtttagagcgtctggcaatgtatattcagggcgttgattcgatttatgatctggtctggaccgacggccccttaggccgtgttacctatggtgatgtattccaccaaaacgaagtagagcaaagtacctataactttgagcacgccgatgtgccggcgctgtttgcttactttgatcagtgcgaaaaagaaagccaatacttaatcgagcaaggcttagccttacctgcctatgaaaaagtgatgaaagcctcgcatgcttttaacctgctggatgcgcgccacgctatctcggtcaccgagcgtcagcgttatattctgcgggtacgcaccctggcgaaagcctgtgccgaggcgtactacgccacccgtgaaaagctgggtttcccgctgtgtaagaacaataatagtgcgaagcaggaggcataa

SEQ ID NO: 298468 - DNA, 654 bp, Unknown
  Bacterial polypeptide expressing nucleotide sequence isolated from the Sargasso Sea
aatggccgagctagttgctctatgcaaaagaagaggttttatctttcaaagttcagaagtatatggaggctttggggggtgctgggattatggccctttaggagttgaacttaagttaaatataaaaaatagttggtggagatcgatgacttttcgtgaggatattgtaggtctagactctactatattaatgcatccagatatttggaaagcttctggacacgtggatggtttctcagatccattggttgattgtaagcagtgtaaagaaaggtttagagaagatcaaattgacttaaatgctccttgtccaaaatgtggagcaaaagatagctttacagagtctagagactttaacttaatgtttaaaactcaagtaggcccggtggaagatagttcttctgttgcttatttgaggccagagactgcccagggaatttttgtaaattttataaatgttcaatcaactatgagaaaaaaactgccatttggaatagctcaaataggcaaggcttttagaaatgaaattactccaggtaattttatttttagaatgagagaatttgagcaaatggaaatgcaatattttttaactccaggtaatcaaatggaagcaatggaggagtggaaagaataccgttggcaatggcatat

SEQ ID NO: 298469 - DNA, 577 bp, Unknown
  Bacterial polypeptide expressing nucleotide sequence isolated from the Sargasso Sea
atgcaaaaattcgatgtcaaaacctttcagggcctgatcctgcagctgcaggactattggtcccgccagggctgtaccatcattcagccgctggatatggaagtgggtgccggtacttctcaccccatgacctgcctgcgcgccctgggccccgagcccatcgcctgcgcctacgtgcaaccgtcccgccgtccgactgacggccgctacggtgaaaacccgaaccgcctgcagcactactatcagttccaggtgatcatcaagccttcccccgacaacattcaggaactctatctgggctccctgaaagagctgggcatggatcccgggatccatgacatccgcttcgtggaagataactgggaaaacccgacactgggtgcctggggtctgggctgggaagtgtggctgaacggcatggaagtgacccagttcacctacttccagcaggttggcggcctcgagtgcaagccggtcaccggcgagatcacctacggtctcgagcgtctggccatgtacattcagggcgtggacagcgtctacgatctggtctggtctgacggcccgctggcaagac

SEQ ID NO: 298470 - DNA, 436 bp, Unknown
  Bacterial polypeptide expressing nucleotide sequence isolated from the Sargasso Sea
atgaattttgaaaacttactcatcgagttaggcaccgaagaactgccaccaaaggcgctgcgtaaactggctgagtctttcttagcgaactttaccgaagaattaatcaaagccgatttagcttttaaatcagctgtttggtacgctgcgccccgtcgtctcgccattaatgtgactgaactggctattgctcaagcggacaaaatcgttgaaaaacgcggcccagctgtgagttcagcttttgatgccgaaggtaaaccaacgaaagccgcagaaggctgggcacgtggtaacggtattaccgttgaccaagctgagcgtttggtgaccgataaaggtgaatggctggtttataacgccaaagtcgaaggcgttgaaaccaagagcttaatcgcagcgatggcacaacgtgcgctggataagttacccattccta

SEQ ID NO: 298471 - DNA, 410 bp, Unknown
  Bacterial polypeptide expressing nucleotide sequence isolated from the Sargasso Sea
cggtttagagcgtctcgccatgtatatccaaggtgtggatagcgtgtacgacctcgtatggaccgatggtccaatgggtcgcatcacctacggtgatgtgttccaccaaaacgaagttgagcaatcgacctataactttgagcacgcagacgtcgactttatgtttgccctgttcgatcaatgcgaaaaaatgtgtcagcacttattgtcgcttgaaaaaccattacctctgccagcctatgagcaagtgatgaaagcctcgcacgccttcaacctgctcgatgcacgccacgccatttcagtgactgaacgtcagcgttatatcctgcgcgttcgtacaatggctaaagccgttgctgaatcctattatcaggcacgcgaagcgcttggcttcccaatgtgtaagtaga

SEQ ID NO: 298472 - DNA, 364 bp, Unknown
  Bacterial polypeptide expressing nucleotide sequence isolated from the Sargasso Sea
tatggcctctaaaaaaattaaaaaaaaaccaaaatttcaaactttccaagatacaattataaatcttcaaaagttttggagtaaaaatggatgtgtaattttacaaccttatgatatggaagttggagctggaacatttcatccagctactactctaagatctcttgggcctaaaccatggaaagcagcgtatgttcaaccttcacgaagacctacggatggaagatatggagataatccaaatagactacagcattattatcaatttcaagttataataaaaccctctccaattaatattaaaaaactttatttaaatagtttgtcggtaataggaattaatcataaagagcacgatattaga

SEQ ID NO: 298473 - DNA, 691 bp, Unknown
  Bacterial polypeptide expressing nucleotide sequence isolated from the Sargasso Sea
caaccttcgaggagacctacagatggaagatacggaaaaaatccaaatcgtttgcaacactattatcaataccaagttattgtaaaaccatctccactgaatattaaacaagtatatttaaagagcctagcggccattggtattcaatcaaaagatcatgatattagatttgtagaagacgattgggaaagccccacactaggggcagcaggattaggatgggaagtatggtgcgatggcatggaaataacacaatttacttattttcaaaaaatgacaggcatagattgcaagccaatatctgtagaacttacttatggcttagaaagaatttgtatgtttgttcaaggtaaaaaaaatgtatttgatattgattggaactctgatggcgtaaaatatggagatgtttaccttcaatcagaaaaagaattttcatcttataactttgattatgcaaatacagattttttgatgaagagttttgaaattgcggagaaagaatgtcaatctttgctggaaaaaaaattacctctcccagcttatgatcaatgtcttaaggcgagtcatatatttaatttactagactcgagaggggtaatcggagtcgccgaaagaacaggctatataaatagaattagagatcttgcaaaaggagcaggatctgcgtggttagaaaaacaagaaaagtaaa

SEQ ID NO: 298474 - DNA, 704 bp, Unknown
  Bacterial polypeptide expressing nucleotide sequence isolated from the Sargasso Sea
tgatggccgttatggagaaaaccctaatcgattgcagcattattatcagtttcaggtgattctgaaaccatcacctaatgaaactcaagccctatatctggggtcgctaaaggccattgggctcaaccctgatctgcatgatataaggtttgttgaagatgattgggagtcgccaacactgggggcgtgggggcttggctgggaagtctggtgtgatggtatggaggtatctcaattcacctattttcaacaggtaggaggcattgaatgtaatccggttccgttggaactaacctatgggttggaacgccttgcgatgtatattcagggcgttgaaaatgtctatgatctggattgggatggcgtgccagaatctgaaggtggaaaaaactacggcgatattttcaaacgtgccgaagtggaattttcaggctggaattttgaaaaggccgataccgagatgctctttggccatttcagggatgctgaggctgagtgtggccgcttgcttgcgctcgatacaccattggcattgcccgcctatgatcaatgtatgaaagcaagccatttattcaacctgctggattcgcgtggggttatttcggtgacggaacgtgcggcctacattggtcgagttcgggccttggctatctcttgctgtaaagcttgggtaggctcaagagagagtgcaaccaatggctgat

SEQ ID NO: 298475 - DNA, 826 bp, Unknown
  Bacterial polypeptide expressing nucleotide sequence isolated from the Sargasso Sea
agatacatttactgatcctcttgtagattgtttttcctgtaagtctagatggcgagcagatcaattgttagaaaataataaatgcccaaattgtaaatcagaagatttaactgacccaagaccatttaatttaatgtttaagactgctatagggccagttgacgatggatcatcatttgcttatttaagaccagaaacatgtcagcaaatatttactaattttaaaaatattctagactctacttctagaactgtgccatttggaattgctcaaatgggtaaggcatttagaaatgaaataactcctcgtaattttatcttcagagtaagagaatttgagcaaatggaattagaattttttgtagaacctggaacagatgataaatggcatgaatattggataaataaaagaataaattggtggatagatcaaggagtcagaaaagaaaatttaaaaacaatcgaggtagaaaaaaatgaacttgctcattattcaaaaagaacggttgatattaattatctatttcctcatggagaagaggagttggaaggaatagcgaatagaactgattttgatttaggatcccatactaaaaatcaaaatgattttaatattgattcaaaagtcatgaaaaattcttcttcaacaactaaattagccgttcagaatcttgaagaaaagaattggtatattccctatgtaatcgaaccctcagcaggagttgatagaggagttcttgctttacttaatgaagcttatcaggaagaaaatattgataaagaaaataaaagaattcttttatctcttaaacctcatctttcacca

SEQ ID NO: 298476 - DNA, 904 bp, Unknown
  Bacterial polypeptide expressing nucleotide sequence isolated from the Sargasso Sea
aagaataatttaaagcaggcttggtggaagtctatggtttatgagagagatgacattgaaggattagatgcatcaattttaagtgcccctgttgtattgcaacaatcaggtcatgaagatacattttccgatccattggttgattgtagaaagtgtaaagctaggtttagatctgatcaaatagaaaacaatgaatgtcctgattgtaagtcaaaagatttaactgagcctagaccatttaatctaatgtttaaaacagcaattggacctgttgatgacggttcttcttttgcctatttacgaccagagacatgtcagcaaatttttactaattttaagaatattactgactcaacaagcagagtagtaccttttggaattgctcaaattggaaaagcatttagaaacgaaattaccccaagaaattttatatttagagttagagagtttgagcaaatggagctggagttttttgtaaaaccaggatctgatgatgaatggcataaattttgggtagataaaagaattgaatggtgggaaacacaaggtattagtaaaaaaaatttacatcctatggaagtagaacagagtgaattatcacattattcaaaagcaactgtagatattatgtatgaatttcctcacggaaaagaggagcttgaaggaattgcaaacagaactgattttgatttaggctcacatactaaaaatcaaaaagattataacattagttcagatgttaaaaaaaatgaacattctacaacaaaattaggggtgcaaaatttagaagaaaaaacttcctatataccctatgtaattgagccttcagctggagttgacagaggtttactcgctattttaaatgaagcttatactatagaaactttagatgatgataatacgc

SEQ ID NO: 298477 - DNA, 730 bp, Unknown
  Bacterial polypeptide expressing nucleotide sequence isolated from the Sargasso Sea
ccttagatcgttgggcattcaaccatggaaaactgcttatgttcaaccatcaagaagaccaacggatggtagatatggtgaaaatcccaatagacttcaacattattatcaatttcaagttttgattaaaccctctcctgaaaatataaaaaggctatatttaaatagtcttactacgattggaattcatcacaatgatcatgatatcagattcgttgaagatgactgggaaagtcctacattaggtgcagctgggttaggttgggaagtttggtgtgatggaatggagattacccaattcacttactttcaacagatggcaggttatgaatgtaaaccagtttcagtagaaattacttatggtttagagaggatttgcatgtttacccaacaacaaaaaaatgtttacgatttattatggaatgatgaggatataaaatacagagaagtttttcatcaagctgaaaaagagttttctgcttataatttcgagcatgctaatgttgaacaattattcaaaatgtttgatatgcatgaatcagaagcaaaatcattagttgaaaaaaaagtttcactacctgcatatgatcaatgtttaaaagcgagccacgtgtttaacattttggatgcgaggggagcaataggtgttgcacaaagagcagggtatattggaagaattcgtgacatcactaagtctgctgctgggatttggatagatagtcaaaattaa

SEQ ID NO: 298478 - DNA, 328 bp, Unknown
  Bacterial polypeptide expressing nucleotide sequence isolated from the Sargasso Sea
atgctaaaaaagaaaaaaaaagacaattctaaagggcagacatttcaagatataattataagtctgcaaaagttttgggtcaagtatggttgtgttttacttcaaccttacgatttagaagttggcgcgggaacttttcacccagcgacaactttaagatctctaggacctaatccatggaaagctgcttatgttcaaccatcaagacgaccaactgatggacgctatggtgaaaatccaaacaggttacaacactattatcaatttcaggttatcataaaaccttctccaaaaaatattaaaaacatttatctgaaaagcctttcag

SEQ ID NO: 298479 - DNA, 628 bp, Unknown
  Bacterial polypeptide expressing nucleotide sequence isolated from the Sargasso Sea
atgccaaaaataattaaggataaaaaaaaaactccaattacatttcaaaatttaatttttaatctacagaaattttggggtaaatatggctgtataattttacaaccatacgatttagaagtaggtgcaggaacttttcatccggcaactacattaagatctctaggaccaaaaccatggaaggctgcttatgttcaaccatcaagaagaccgtctgacggaagatatggaaaaaaccctaatcgcttacaacactattatcagtaccaagttataataaaaccttctccaaaaaatattaaacaagtttaccttaagagtttatcggcaataggaattcaatcaaaagatcatgatattagatttgtagaagacgattgggaaagtcctacgctaggcgcagctggattaggctgggaagtttggtgtgatggtatggagataactcaatttacatattttcaaaagatgacaggtattgattgtaaaccaatttctgtagaattaacttatggtttagaaagaatttgtatgtttgttcaaggaaaaaaaaatgtattcgatatagattggaataataacggggtaaaatatagagatgtttttcttcaatctgaaaaagaatttc

SEQ ID NO: 298480 - DNA, 519 bp, Unknown
  Bacterial polypeptide expressing nucleotide sequence isolated from the Sargasso Sea
aatgcctgaagagatatttgataaagttgtaaatattgctcaatcaagaggatttgtatttaatgcttcatcaatatatggaggattgagaagttcttatgactatggtccattaggtgtacttctaaaaaagaatatcgaaaatatgtggtggaaaagtattagtaatttagaagttgaaatatatccagttgatactgcaattatacaatcaagtgatgtttggaaggcttcgggtcatgtaggtgaatttaccgatccaatggttgaccataaacctactggcgaaagatttagagctgatcagataccagaccatattaagaaagaggatttaacagaacctcgtcaatttaacctgatgtttcagacaaacattggcccggttgaaaatgaaaactcaactgtttatttaagaccagaaacagcacaaggtatatttgtaaattttgaaaatgttttgagaacaatgagagcaaaaataccttttggaattggaaatattggaaagtcatttag

SEQ ID NO: 298481 - DNA, 430 bp, Unknown
  Bacterial polypeptide expressing nucleotide sequence isolated from the Sargasso Sea
tatggcctctaaaaaaattaaaaaaaaaccaaaatttcaaactttccaagatacaattataaatcttcaaaaattttggagtaaaaatggatgtgtaattttacaaccttatgatatggaagttggagctggaacatttcatccagccactactctaagatctcttggacctaagccatggaaagcagcgtatgttcaaccttcacgaagacctacagatggaagatatggagataatccaaatagacttcagcattattatcaatttcaagttataataaaaccctctccaattaatattaaaaaactttatttaaatagtttgtcggtaataggaattaatcataaagagcacgatattagatttgttgaagatgattgggaaagcccaactctaggtgctgcaggtcttggatgggaagtttggtgt

SEQ ID NO: 298482 - DNA, 789 bp, Unknown
  Bacterial polypeptide expressing nucleotide sequence isolated from the Sargasso Sea
ttttggtccgacgaaggttgtttgattatgcagccatatgataccgagaagggtgctggaactatgaatccgcatacttttttaagggctattgggccagaaccttggagtgtggcatatgctgaaccatgtagaagacctacagatggacgttttggcgataatccaaatagggcccaacattactttcaatatcaagtaataattaaaccttcgccagagggaatacaggaaaaatatttaacatctttagaatctcttggaattaatcctagaaatcatgacataagatttgtagaagataattgggagtcgccaacactaggggcgtggggagttggttgggaagtctggctggatggaatggaagttactcagtttacttatttccaacaatgtggaggattggattgtaatccaatccctattgaaatcacctatggattagagaggattgcaatgtttttacaggataaagaaagtatctgggacttaaattggaacaaaagtttgaattatagtgatatttggcttcaatttgaaaaaagtcagtgctcatttaactttactgaatctagtcctgataatctcaggaaattgtttgaaatttatcaagatgaggcaaattctttaatagaaaagaaattaacttatcctgcgcttgattttgttctaaaatgtagtcatacctttaatttacttgatgcgaggggagttatttcagtcacagatcgtgcacaatatattgagaagattcgaaaattagcaagagaagttgcatcatcttgg

SEQ ID NO: 298483 - DNA, 585 bp, Unknown
  Bacterial polypeptide expressing nucleotide sequence isolated from the Sargasso Sea
gagtggccggtaccgctggtctgcagcttcgaggagcgtttcctcgaagtaccgcaggaagccctgatctcgaccatgcaggacaaccagaagtacttctgcctgctggatgccaatggcagactgctgccgcgctttatcaccgtctccaacctggaaagcaaggacccggcgcagatcgtcgagggcaacgagaaagtcgttcgtccgcgcctgaccgacgccgagttcttcttcaagcaggacaagaagcagccgctggaaacccgtaacgagcgtctggccaatgtggtgttccaggctgacctgggcagcgtgtttgagaaagcccaacgcgtctccagcctggccggtgtgatcgctgcgaagatcggcggcgacgccgagcgcgccgcccgcgccggtatcctgtccaagtgcgacctggcgaccgaaatggtcggcgagttcccggagctgcaaggcattgccggttactactacgccaagcacgacggcgaagccgatgacgttgcgttggcgctgaacgagcagtacatgccgcgcggcgccggtgccgaactgccaagcacgctgaccggtgcc

SEQ ID NO: 298484 - DNA, 682 bp, Unknown
  Bacterial polypeptide expressing nucleotide sequence isolated from the Sargasso Sea
ttggtgataatccaaataggggcgcaacattattttcaatatcaagtaataattaaaccttcaccggaaggaattcaggaaaaatatttgacatctttagaatctattgggattaatcctagaaatcacgacataagatttgtggaagataattgggagtctccaacgcttggagcttggggtgtaggttgggaagtttggttggacggaatggaagttactcaatttacttatttccaacaatgcgggggtatagattgcaatccaatcccaattgaaatcacttatggacttgagaggattgcaatgtttttgcaggataaagaaagtatctgggacttaaattggaacaagaatttaaaatatagcgacatttggcttcaatttgaaaaaagtcaatgctcctataatttcactgaatcaagtgctgacaatctcagaaaattatttgaaatttatcaagccgaggcaatttctttaacagaaaagaaattaacttacccagcacttgattttgttctgaaatgtagtcatacgtttaatcttcttgatgctagaggagtaatttcagttacagatcgtgcacaatatatagaaaagattcgaaaattagcaagagaggtagcatcatcttggatggatgagagaaatactttgaattttcctttattaaaaaaataaa

SEQ ID NO: 298485 - DNA, 294 bp, Unknown
  Bacterial polypeptide expressing nucleotide sequence isolated from the Sargasso Sea
tatggtttctaaaaaaaaaaataaaaaatataaatttcaaacattccaagatacaatcttgaatttacaaaaatattggagcaaacatggatgtgtaattttacaaccatatgatttagaagttggagcaggaacgtttcaccctgccacaacacttagatctttaggaagtaagccatggaaaacagcctatgttcaaccttcaagaagaccaactgacggaagatatggagaaaatccaaatagactacagcactattatcaatttcaagttttaattaaaccttcaccaaa

SEQ ID NO: 298486 - DNA, 781 bp, Unknown
  Bacterial polypeptide expressing nucleotide sequence isolated from the Sargasso Sea
tacgatttagaagttggtgcaggcacttttcatccagcaactactttgcgttctcttggacctaaaccctggaaagcagcatacgttcaaccatctagaagacctacagatggaaggtatggaaaaaatcctaatagacttcaacattattatcaatttcaagttataatcaaaccttctccaaaaaatattaaacaaatttatttaaaaagtttgtcatccataggaataatagccaaggatcatgatattagatttgtagaagatgattgggaaagtccaactctcggtgcagctgggctaggttgggaggtgtggtgtgatggtatggaaattacacaattcacttactttcaaaagatgacaggtatcgagtgtaaacctatatctgttgaattaacgtatggcttggaaagaatatgcatgtttgttcaacagaagaaaaatatttttgatattgactggaacagtgaaggagtaaaatataaagatgtatattttcaatcagaaaaagaattttcagcatataattttgatcatgcgaatactgactttttacttaaaaattttgaaatggcagaaagtgaatgtaaatcattgttagaaaaaaaactttcacttcctgcatatgatcaatgtttaaaagctagtcatatatttaatttattagattccagaggagtaatatcagtagctgaaagaacaggatatattaatagaataagggaactcgcaaaaggatcgggatcaatttggttggataatcaaatagaaaaataaa

SEQ ID NO: 298487 - DNA, 879 bp, Unknown
  Bacterial polypeptide expressing nucleotide sequence isolated from the Sargasso Sea
aatggtctatgaaaatgacaatattgaaggtcttgacgcttcaattcttacaaacccactagttttaaagtactcaggacatgaggaaaccttctctgatccaatggttgactgtaaatcatgtaatttgagatttagagccgatcaagtacctgaaaaatgtaaaaaagatgatttaacagagcctagacaatttaacttaatgtttaagacaaatgttggtcctattgaggatgattcaagttatggatacttacgacctgaaacagcccaaagtatattctcaaactttaaaaatgttattgattcgtcgtcaaaatcattaccatttggcatagctcaaattggaaaagcatttagaaacgaaataacaccaagaaacttcatatttcgagtaagggaatttgaacaaatggagctggagtattttgttaagcctggaaatgatgaaagtgctcatgatgattgggtaaataaacggcttgattggtgggaaaatcaaggtatatcgagaaaatctatagagttatatgaagtacctccaaatgaactagcgcattattcaaaaaaaactatagatttaatgtataaatttcctcacggattagaagaacttgaaggtatagcaaataggactgactttgatcttggatcacattcaaaaaaccaagaatgtcttaatttaactgcttctgtagctgaaaataaacattctaatagtaaattagcgatacaagacgattctggtgagtggtttgtaccatatgtcatagaaccatcagctggtgttgaaagaggattcttggcgattcttaatgaatcatatacgattgaggacttaggaaatggaaaaaaaagaactatattaaaacttatgcc

SEQ ID NO: 298488 - DNA, 643 bp, Unknown
  Bacterial polypeptide expressing nucleotide sequence isolated from the Sargasso Sea
aaatcgattacaacattattatcagttccaagtaattattaaaccctctccaaataatataaaatctttatatctcaaaagtttatcttcgattggtatagacgttaaaaatcatgacattcgttttgtcgaagatgattgggaaagcccaacactcggtgcggcaggtttaggttgggaggtctggtgtgacggaatggagattactcagttcacttattttcaacaaatgacaggaattgagtgtaaaccagtaccagttgaaatcacttacggtctcgagaggttatgtatgtttattcaaggtaagaaaaatgttttcgatttagattggaataatgaaggggtaaaatataaagaagttttttttcaagctgaaaaagaattttctgcttataattttgagtttgccaataccgaaagtcttttaaaaagttttgaagaaacagaaaaagaatgtaaatctttgttagacaaaaatttatcacttccagcttatgatcaatgtttaaaagcaagtcatatttttaacttgctagatgcaagaggtgtaattggagtagcagaaagaactggatatattgctagaataagagaattagcaaaaggttgtggatcactttggttaagctcacaagaataa

SEQ ID NO: 298489 - DNA, 918 bp, Unknown
  Bacterial polypeptide expressing nucleotide sequence isolated from the Sargasso Sea
gcaagataccgcgctgatgagttaactaatgatattgaaaatgaggtgtggcaagagttaaagtgccctacatgcggtacaaccggaatgatgacccctccacgacaatttaatctaatgtttaaaactcaagtaggccccttagaggagacaggatccgtagcatacttaagacctgaaactgcacaaggtatttacgttaattatcaattggttcaaggatcaactaggatgaaaataccttttggtattgctcaaattggtaaggcatttcgaaatgagataatagcaagaaattttatttttcgaactcgtgaatttgaacaaatggaaatgcagtactttacaaagcccggtcaggatgatgaaaccatgaatgtatggaaagaaaaaagaatgaacttctacactgattctttaggaatatcttctgaaaatttaagatttcatgaacatggtgataatgaactagctcattatgcaaaagaggcctgtgatatagaatacaacttcccttttggctggtcagaagttgaaggtatccataatagaacagattatgatttaaaaaatcatgaacaattttctggaaaaaatcttaaatattttgatcaagaaaataacgaacgttacttaccatttataattgaaacatctgctgggttaaatagaatgttgctaactgtattatcagactcatattgggaagatacagaaaataatagaaaagtgatgaaatttgaccccaaaattgcacccataaaagctgtcatttgtccgttagtaaagaaagatggtttaccagaaaaagcgagggctattatagaaattttaaaaccacactttaatgttttatatgatcaacaaggttctatcggaaaacgttactacaggcaagatgaagcaggtactccattg

SEQ ID NO: 298490 - DNA, 787 bp, Unknown
  Bacterial polypeptide expressing nucleotide sequence isolated from the Sargasso Sea
atagatgatgggtcatcttttgcttatttaagaccagagaccgctcaacaaattttcacaaattttaaaaatgttattgattctacttcaaagcaaataccatttggtatagctcaaataggaaaagcgttcaggaacgaaataactcctaggaattttatatttagagttagagagtttgaacaaatggaattagaatattttgttgagcctggaaatgatgaacaagcattagatgaatgggtacaaaaacgtcttaattggtggagagatcaaggtgtacccatagaaaaaattgagttatacaatgtacccacagatgagctagcccattactctaagaaaactgtggatttgatgtatatgtttcctcacggattagaagaattagaaggtattgctaatagaacagattttgatttagcctcacattctaaaaaacaagatgaacttaatataacatccaatgttgaaaaaaataaacattccaatagcaagatggcagttcaagataaaaaaggtgattggatcgtaccttatgtcatagaaccatcagctggtgttgaaagaggtattttagctgtattaaacgaagcatttgttgaagaagatcttggtgatggtaaaacaagagttgttttaaagctaaaacctcatttgtcgccaataaaagcagcaattttgccgttaaagaaaaataatgaagaaatagtaaccttgtctaaaaaagttaaaaatagtttacaaaaattaggcttaggtagggttatcctcgaaaacacaggta

SEQ ID NO: 298491 - DNA, 577 bp, Unknown
  Bacterial polypeptide expressing nucleotide sequence isolated from the Sargasso Sea
tatggtctctaaaaaaaaaattaaaaaagaaccattaacatttcaagaaacaatacttgctcttcaaaaatattggtctaaacaaggatgcgttatacttcagccctatgatttggaagtgggagctggaacttttcatccagctacaacacttagatcattaggtgataaaccatggaagacagcttatgtacaaccatctagaaggccaactgacggacgttatggtgataatcccaataggcttcaacattattatcaatttcaagtattaataaaaccatcaccaagtaatataaaaaaattatatttaaacagtattgccgcgataggtgttaatgttgaagaacatgatattagatttgtcgaagatgattgggagagcccaacattaggtgccgcaggactgggatgggaggtgtggtgtaatggtatggaaattacacaatttacttattttcaacagatggcgggtatagaatgtaagccaatttcagtagaaatcacctacggacttgaaagactttgtatgtttattcaaaataaaaaaaatgtttttgatttaaaatggaatgat

SEQ ID NO: 298492 - DNA, 677 bp, Unknown
  Bacterial polypeptide expressing nucleotide sequence isolated from the Sargasso Sea
gagaccaccagacggaaggtatggtaatatcctaatagacttcaccatacttatcagtttcaagtttaatttaaccttcacccagaaaaatataaaaaacttttatcttaatagcttatcgtctataggtatgatcacaaattttcatgatataagatttgtggaagatgactgggagagtcccactcttggtgctgcaggactaggttgggaagtttggtgtgatggtatggaaattactcaatttacatattttcaacaaatggcaggatatgaatgtaaacctgtttcagtagaaattacttacggattagagagaatttgtatgtttacgcaacagcaaaaaaatgtctatgatttattgtggaatgaagaaggtataaaatacaaagacgtatattatcaagctgaaaaagaattttctgcatataactttgaacatgcaaatatagataacttatttaaaatgtttgacatgcatgaattagaagcaaagtccttggttgagaaaaaaatttcgttacctgcttatgatcaatgtttaaaagcaagtcatatatttaatattttggacgccagaggggcaataagtgtagctcaaagagctggatatatcggaagaattagagatattacaaaagctgctgctggaatttggttagatagtcaaaaataat

SEQ ID NO: 298493 - DNA, 673 bp, Unknown
  Bacterial polypeptide expressing nucleotide sequence isolated from the Sargasso Sea
atgtctgtgcaagattttttcgtagaaattggtaccgaagagttaccaccaaaagctttaaaaaccttagctactgcctttagcgacaacattgttgaagagctggcaaaacaaaacttaagccatggcgaagtcagctggtacgcagcacctcgccgtttagctgttcgtgtcaatcaactggtgttgcaacagcaagacaaagtggtagaaaaacgtggcccggctttggcggctgcttttgatgccgatggcaagccaactaaagctgctgcagcctgggctgcatcaaacggtattactgccgatcaggccgagcgtttagagactgacaaaggcgcctggctcattcataaagcgctgattaaaggcgaaagcacagcttctttattaccagctgtgatctctactgctttagctaagttgcccattgccaagccaatgcgctggggcaattcaacggccgaatttatccgccctgtgcacactgtgaccttattattaggtgacgaggtagtgcctgctactattcttggcaaagagtcaggtcgtgtcagctatggccaccgtttccatgcaccagctttggttgagattaaaaatgctgatagctatttaagtacgcttgaacagtgttatgtcattgccgactttgccaaacgtaaagctatta

SEQ ID NO: 298494 - DNA, 286 bp, Unknown
  Bacterial polypeptide expressing nucleotide sequence isolated from the Sargasso Sea
cagcgctgttcgcgtacttcgacccagtgtgaagccgaaagccagaaactgattgaagcaggtttggctttaccggcttatgaaaaagtaatgaaagcctctcatgcgtttaacttattggatgcccgtcacgccatttctgtgaccgagcgtcagcgttatattctgcgggtgcgcaccctggctaaagcctgtgctgaagcctattttgctgcgcgggaaaagttaggttttccgctatgtagcgatagcaagcgccgtaaccagtcaacgcaggaggcataat

SEQ ID NO: 298495 - DNA, 698 bp, Unknown
  Bacterial polypeptide expressing nucleotide sequence isolated from the Sargasso Sea
tatggtttctaaaaaaaaaaaaactaaaaaaactaaaaaaactaaattccatacatttcaagatacaatattaaatttacaaaagtactgggataaaaaaggttgtgttattttacaaccttatgatatggaagttggtgcaggaacatttcatccagccacaactttaaaatcattgggaccaaaaccttggaaggtcgcatatgtacaaccctcaagaagacccagtgatggaagatatggaaaaaatcctaatagattacaacactattatcagtttcaagttttaatcaagccatctccaaataatataaaaaaactttatttaaatagtcttgcttctataggtattaaacatcaggatcatgatattcgatttgttgaagatgattgggaaagtcctactctaggagcagccggtttgggatgggaagtatggtgtgacggtatggaaataactcagtttacatattttcaacaaatggcaggagtagaatgtaatccaatatctgtagaactaacatatggtctagaaagattatgcatgtttacacaagaaaaaaaaaatgtatttgagcttgtttggaataacgaaggtattttgtataaagatgtttttcaccaagctgaaaaagaattttcaaaatataattttgaactagccaacacagaaaatttatttaaaaattttgacatgg

SEQ ID NO: 298496 - DNA, 804 bp, Unknown
  Bacterial polypeptide expressing nucleotide sequence isolated from the Sargasso Sea
attgccaaaaaaaataaaaaataaaagaaatttaataacatttcaagatctcatttttaatttacaaaaattttggagcaaaaatggttgcgtgattttacaaccttatgatttagaagtaggtgcaggcacttttcatccagcaaccacacttagatctttaggcactaaaccatggaaagcagcatatgtacaaccctctagaagaccgacagatggaagatatggaaaaaacccaaatcgattacaacattattatcaatatcaagtcattattaaaccgtcaccacaaaatattaaacaaatctacctaaaaagtctggcagctataggcattcagtctaaggatcatgatattagatttgttgaagatgactgggaaagtcctacactaggagctgcaggattaggctgggaggtatggtgtgatggtatggaaataactcaatttacttattttcaaaaaatgacaggtattgattgtaaaccggtatctgtagaacttacatatggtctagaaagaatttctatgtttgttcaaggtaaaaaaaatgtttttgatattgactggaataacgagggcgtaaaatacagggacgtatattttcaatctgaaaaagagttttcagcatataattttgattatgcgaatacagaggctttattaaacaattttgaaattgcagaaaaagaatgtaagtcacttctagaaaaaaaactttcactacccgcttatgatcagtgtttaaaagcaagtcatatttttaatttgttagatgcgcggggtgtaattggagttgcaga

SEQ ID NO: 298497 - DNA, 752 bp, Unknown
  Bacterial polypeptide expressing nucleotide sequence isolated from the Sargasso Sea
cacttttcatccggccaccacactaagatcactaggagaaaaaccatggaaggctgcttatgtgcaaccttcaagaagaccaaccgacgggcgttatggagataatccaaatagactgcagcattactatcagtttcaagttttgattaagccttcgccaaacaatattaaaaaattatacttgaacagtatcgcttctataggaattaatcataaagagaatgatatcagatttgtagaagatgattgggaaagcccaactcttggagctgcaggacttggttgggaagtgtggtgcaacggtatggaaataactcaatttacatatttccaacaaatggctggtttagaatgtaaaccaatctctgttgagattacttacggcttggagagattgtgcatgtttattcaaaataaaaaaaatgtatttgatttagtttggaataatgatggagtttcttataaagatgtttttcatcaatctgaaaaagaattttcagcatataattttgaacatgctgacactaataatttatttaaaatttttgatatgcatgaaaaagaagcaatgtctttattagaaaaaaatatatctttaccagcatatgatcaatgcttgaaagctagccatgtttttaatttattagatgcgagaggtgtaataagcgttgcccaaagagcagagtatattgcgagaataagagacctaacaaaacaaataggaaaagtttggcttgaaagtcaaaattaaa

SEQ ID NO: 298498 - DNA, 858 bp, Unknown
  Bacterial polypeptide expressing nucleotide sequence isolated from the Sargasso Sea
aaaaaacaaaattcgacatctagctctggactaagctttcaggaactaattttcgaattacaaaaatattgggcaaatcaagaatgtgtggtagttcagccttatgacattgaaatgggtgccggtacttttcatcctgctacctttctccgtgcaatcggtccagagccatggcgtacggcttacgtgcaagcatctcgaagaccaacagatggacgatttggagataacccaaatagattacagcattattatcaatttcaagttattctgaaaccgtcacctgataatattcaagatctttatctaacctcgctcgaaagtataggaatcgatactaaaacccatgatattcgttttgttgaagacaactgggagtcgcccacacttggtgcgtggggtcttggctgggaagtttggctggacggaatggaaattagtcaatttacatattttcaacaaattggagggcttgactgcaaacctatcacaggtgaattaacatatggtctagaacgaattgctatgtgtttgcaaaactgtagtaatttatttgatctaacatgggcaataacaaaggataataaagtaagttatggcgatatctatcatcaaaatgaggtagaaatgtccagatataattttgatttagctgatactgattcattatttagttggtttgatatttgtgaaaaagaatcagtcaaactaatccaagaaaatttaccaataccagcctacgaaatgacaatgaaagcatctcatacattcaatttacttgatgcacgcggtgctatctcagtaacagaacgtcaaaattatatactaagaataaggactctagctcgctcagtgcaa

SEQ ID NO: 298499 - DNA, 739 bp, Unknown
  Bacterial polypeptide expressing nucleotide sequence isolated from the Sargasso Sea
atgccaaaaaaaattaaaaagataaaaaaaaaaaataaaaaaccaaagtttaaatctttccaagatactattttaaatcttcaacaatattggagtaaaaatggatgtgtcattctacaaccttatgatacagaggtaggtgctggaacatttcatcctgcgactaccttgaagtccttaggccccaagccttggaaagcagcatatgtccaaccctcaagaaggccaacagatggaagatatggaaaaaatccaaatagacttcagcactattatcaatttcaggtaattataaagccttcaccaaaggatattaaaaaactttacttaaatagtttagctaccattggaataaatcataaagagcatgacattaggtttgtagaagatgactgggagagcccgaccttaggtgcagcaggacttggatgggaagtttggtgtgacggaatggaaatttcccaattcacttatttccaacaaatggccggattagaatgtaaaccagtttcggtagaattaacatatggtttagaaagaatctgtatgtttacccagcaaaaaagaaatgtatttgatcttatatggaacaatgaaggtataaaatatagagaagtttttcatcaagctgaacaagagttttcagcatacaattttgaatatgcaaatacagaaaatctatttaaaatatttgaaatgattgaaacccgaggcaaaatttctaataagaaaaaaaaat

SEQ ID NO: 298500 - DNA, 700 bp, Unknown
  Bacterial polypeptide expressing nucleotide sequence isolated from the Sargasso Sea
agactgcatatgtacaccatctagaagaccaactgatggacgttacggcgataatccaaatagactacagcattattatcaatttcaagttttaataaaaccatctcctaataatataaaaaaattatatttaaaaagtattgctacaataggcattgatcataatgaacacgatattagatttgtagaagatgattgggaaagcccaacgttaggagctgcaggattaggatgggaagtttggtgtaacgggatggagattactcaattcacttattttcaacagatggcaggcatagaatgcaagcctgtttcggttgaaattacttatgggcttgaaagactttgtatgtttactcaaaataaaaaaaatgtttttgatttaaattggaataatgaaggcatttcttatagagatgtattttatcagtctgaaaaagaattttcagcttataatttcgaacacgcttatacagataatttatttaaaatttttgatatgatagaggaagaagctaaatctttaattgaaaaaaagatatctctacctgcttacgaccaatgtttgaaagcaagtcatatatttaacatattggatgcaagaggagttattagtgttgcgcaaagagctgaatatatttcaaaaattagagatcttaccaaagcagtaggaaaagtttggctagaaagtcaaaattag

SEQ ID NO: 298501 - DNA, 478 bp, Unknown
  Bacterial polypeptide expressing nucleotide sequence isolated from the Sargasso Sea
catgcgaaatgataatttaattagttttcaagatattattgctagattaaatcagttttggtcgaatcaggggtgtcttatattgcagccttatgataccgagaaaggtgcgggaacaatgagtccacatacatttattcgtgtattaggagatttatcttggaattgtgcttatgtagagccttcaagacgacctaccgatggtagatatgcacaaaacccaaaccgtcttcagcattattttcaatatcaagtcattttgaagccctctccagcagatattcaagaactttatatacaaagcttagaaagtataggtattttaagagaaaatcatgatattcgatttgttgaagataactgggaatcaccaactcttggagcatggggagtaggatgggaagtttggttagatggaatggaagttacccaatttacttattttcagcaatgtggaggatatgattgtttttcaata

SEQ ID NO: 298502 - DNA, 598 bp, Unknown
  Bacterial polypeptide expressing nucleotide sequence isolated from the Sargasso Sea
atggcctctaaaaaaaataaaaaaacaccaaagtttcaaacttttcaagatacaattttaaatttacaaaaattttggagcaaacatggttgtgtaattttacaaccttatgacatggaagttggagctggaacatttcacccagccactacattaagatcacttggacccaagccatggaaagctgcttatgttcaaccttcaagaagaccaacggatggaaggtatggagataatccgaatagacttcaacattattatcagtttcaagtaataataaaaccatctctatcaaaaattaaaaaactttatttaaatagtttgtctgtcataggcattaatcacaaagatcatgatattaggtttgtagaggatgattgggaaagtccaactttaggagctgcgggacttgggtgggaagtgtggtgtgatggaatggaaattacacagttcacatattttcaacaaatggcaggttttgaatgcaaacctgtatcagtagaaattacttatggattagaaagaatttgtatgtttactcaacagaaaaaaaatgtttatgatttaatttggaacaatcaaggttggagtatagaga

SEQ ID NO: 298503 - DNA, 655 bp, Unknown
  Bacterial polypeptide expressing nucleotide sequence isolated from the Sargasso Sea
ggtttctaaaaataaaaataaaaaaaaacaaaaaccaaaatttcaaacctttcaagaaactattttaaatctccaaaaattttggagtaaacaaggatgtattattcttcagccatatgatatggaagttggagctggtacgttccatcctgctacaacccttagatcgttgggcattcaaccatggaaaaccgcttatgttcaaccatcaagaagaccaacggatggtagatatggtgaaaatcccaatagacttcaacattattatcaatttcaagttttgattaaaccctctcctgaaaatataaaaaggctatatttaaatagtcttactacgattggaattcatcacaatgatcatgatatcagattcgttgaagatgactgggaaagtcctacattaggtgcagctgggttaggttgggaagtttggtgtgatggaatggagattacccaattcacttactttcaacagatggcaggttatgaatgtaaaccagtttcagtagaaattacttatggtttagagaggatttgcatgtttacccaacaacaaaaaaatgtttacgatttattatggaatgatgaggatataaaatacagagaagtttttcatcaagctgaaaaagagttttctgcttataatttcgagcat

SEQ ID NO: 298504 - DNA, 961 bp, Unknown
  Bacterial polypeptide expressing nucleotide sequence isolated from the Sargasso Sea
taataatgccccaaattgtaaatcggaagatcttactgagccaagaccttttaatttaatgtttaaaactgcaattggaccagtagatgatggttcgtcattcgcatatttaagaccagaaacgtgtcagcaaatttttactaattttaaaaatatattagattcaacttctagaactgttccttttggtatcgcacaaatgggaaaagcatttagaaatgaaataacacctcgtaattttatctttagagttagagagtttgaacaaatggaattagagttttttgttaaaccaggtactgatgatgaatggcatgaatattggataaataagagaatagaatggtgggttaatcaaggaataaaaaaagaaaatttaaaaaaaattgaagtagaaaaaaatgaactagctcactactcaaaaagaactgttgatatcaattacgtgtttcctcatggtgaagaggaactagaaggggtagccaatagaactgactttgacttaggttctcatactaaaaatcaaaacgatttcaaaatttcatcggaagttatgaaaaactcttcttcaacaacaaaactagccgttcaagatttagaagaaaaaaaatggtatattccttacgtaattgagccatctgctggtgttgatagaggagttcttgctttgttaaatgaagcttatcgtgaagaaaatatagataaagataataaaagaattcttttatctctaaaacctcatctttcacctattaaagctgcagttattcctctcaaaaagaataatgaggaattagttaatttatctaaagaaataaaatctaatcttcagaaattgggattaggtagagttgttctagaaaattcaggaaacattggtaagaattatagaagacatgatgaaatagggacaccaatttgtttaactgtagattttgaaactctagaagataaaagtgtt

SEQ ID NO: 298505 - DNA, 817 bp, Unknown
  Bacterial polypeptide expressing nucleotide sequence isolated from the Sargasso Sea
atgccagttaaaaaaaaagttaataaaaaaaataactctctttcttttcaagatataataatgaatcttcaaaaattttggggaagaaatggctgtgtaattttacaaccatatgatttggaagttggagctgggacttttcatcctgcaactacgttaagatctctaggtcctaaaccatggaaagctgcttatgttcagccttcaagaagaccaacggacggcagatatgctgaaaacccaaatcgtttgcaacactattatcaatatcaagtaattattaaaccatccccgagcaacattaaacaaacatatttaaaaagcttagaggctattggtattgatgtaaaaaatcatgatatccgttttgttgaagatgattgggaaagtccaaccttaggggcagcaggattaggatgggaagtctggtgtgatggaatggagattacccaatttacctattttcaacaaatgacaggcatagaatgtaaacctgttccagttgaaattacttatggtcttgaaaggttatgtatgtttgttcaagaaaaaaataatgtttttgatctggattggaataataatggtgtgaaatataaagaagttttctttcaagccgaaaaagaattttcagcttataactttgagtttgcaaatactgatgctttacttcaaagttttgaaaatactgaaaatgaatgtaaatctctacttcaaaaaaatctttcattaccagcttatgatcagtgtttaaaagctagtcatatatttaatttattagatgcccgaggcgtaataggtgtagcagaaagaacca

SEQ ID NO: 298506 - DNA, 842 bp, Unknown
  Bacterial polypeptide expressing nucleotide sequence isolated from the Sargasso Sea
aatgcagggtgtatatgactatggtccattaggagttgaattaaaaaataatctaaaacaagcttggtggagctctatggtttatgaaagagatgatatagagggcttagactcttcaatattaactcatccaaatgttttgagatactctggtcacgaagagacttttactgacccacttgtagattgtaaggactgcaaatcaaggtttagagctgatcatatcgataataataaatgtccttcatgtggttcagaaaatttaactgaccctaggccttttaatcttatgtttaaaacaacaattgggcctgttgatgatggaagtagttttgcatatttaagaccagaaaccgctcaacaaatttttacaaattttaagaatgtagttgattcaacatcaagaacattaccttttggaattgctcaaattggaaaggctttcagaaatgaaataactccaagaaattttatttttagagtaagggaatttgaacaaatggaattagaattttttgtagagcctggtagtgatgaggaatggcatcaaaaatgggttgatgaaagagtcagttggtgggaacgacaaggcgtggataaaagtaaattagaaattattgatgtcgataaagaagatttatcgcattattcaaaaaaaacggttgatataatgtacgaatttcctcatgggcttgaggaattagaaggtatcgcaaatagaactgattttgatataggatcacatactaaaaatcagaaagattttgaaataaatgctgatgttataaaaaatgatgactcagtaacaaaattagcaattcaagataagattaacaatatat

SEQ ID NO: 298507 - DNA, 792 bp, Unknown
  Bacterial polypeptide expressing nucleotide sequence isolated from the Sargasso Sea
actaacttcaagaatgtagttgactcaacatcaaaatctataccttttggtattgcccaaattggtaaggcctttagaaatgaaattactccgagaaactttgtttttagagtgagagagtttgaacagatggaattagagttctttgttaaaaaaggtgaagatgaggattggcacaaatactggattgaagaaagaataaattggtgggtccagcagggaattaataaagagaaaattgaaattctaaatgttccacaagaagaactatcacactactctaaagcaactatagatctaatgtatgaattccctcatggtgtggaggagttagaaggaattgcaaatagaactgattttgaccttggttcacattcaaaaaaccaagaagagcttgatatagaagctgatgtcctaaaaaataaggattcaaacgcaaggctagcaattcaaaatattgattcaaaggagtgggaagtcccatatgtaattgaaccatcagcaggtgtagataggggtgtgctggccatattaaatgagtcgtataaagaggaaacccttgaaaatggaaaaaatagagttgtattagctttaaagcctcacctctcaccaatcaaagctgctgttataccaataaaaaagaatgattcgacaattgtcgacttctcaaaacaaattaaagataacttgcaaaaactgagcctgggtagagttgttttggaaaatacaggaaatattggtaaaagttatcgtaaacacgacgaaattggcactccgatctgtataacgatt

SEQ ID NO: 298508 - DNA, 409 bp, Unknown
  Bacterial polypeptide expressing nucleotide sequence isolated from the Sargasso Sea
aatgcctaaaaaaaaaacaaaaaaaaataattttctctcttttcaggacatagtaatgagctttcaaaaattttggagcaagaatgattgtataattttgcaaccttatgatatcgaggtaggtgcgggtacttttcatccagcaacaacattaagatcattaggtcctaagccatggagagctgcctatgttcagccatccagaagaccaactgacggtagatatggtgaaaatcctaacaggcttcaacattattatcagtttcaagttataatcaaaccttctcctgaaaatataaaacaaatttatttaaaaagtctatcggctatcggaattgatataaaaaaacatgacataagatttgtagaagacgattgggaaagcccgacacttggagcagctggactt

SEQ ID NO: 298509 - DNA, 595 bp, Unknown
  Bacterial polypeptide expressing nucleotide sequence isolated from the Sargasso Sea
caataatataaaacagacttaccttaaaagtctttcatcaattggtatcaattcaaaggatcatgatattagatttgtagaagatgattgggaaagcccaacattgggtgccgcaggattaggttgggaagtttggtgcgatggtatggaaataacacaatttacatactttcaaaaaatgacaggtattgattgcaaaccaatatctgtagaacttacctacggacttgaaagaatatgtatgtttgtgcaaggtaaaaaaaatgttttcgatatcgattggaataaagatggtataaaatataaagatatttatttgcaatcagaaaaagaattctcagcatataattttgatcatgcaaatacagactttttattaaagacttttgatgttgcagaggaagagtgtaaatctttactcgagaaaaaacttccgctccctgcttatgaccaatgtttaaaggcaagccatatttttaatttgttggattccagaggagtaatatctgttgcagaaagaactggttatattaatagaattagggaactagcaaaaggttcaggatctgcatggttagaaacgcaagataattag

SEQ ID NO: 298510 - DNA, 784 bp, Unknown
  Bacterial polypeptide expressing nucleotide sequence isolated from the Sargasso Sea
aaaaatggatgtgtaattttgcaaccttatgatatggaagttggagctggaacattccacccagctactactttaagatcactcgggcctaagccatggaaagcagcatatgttcaaccttcacgaagacctacagatggaagatatggagataatccaaatagacttcagcattattatcaatttcaagttataataaaaccctctccgttaaatattaaaaaactttatttaaatagtttgtcggcaataggaattaatcataaagaccacgatattagatttgttgaagatgattgggaaagcccaactctgggagctgcaggtcttggatgggaagtatggtgtgatggaatggagatatctcaatttacatattttcaacaaatggcaggttttgaatgtaaaccagtgtcagttgagataacctatggccttgaaagaatttgtatgtttacccagcagaaaaaaaacgtttatgatttagtttggaatgatgaaggtattgattacagggaagtttttcatcaatcagaaaaagaattttcagcttataactttgagcatgctaatacagaaaatttatttaaaatatttgatatgcatgagagtgaagcaaaatcattagttgaaaaaaatatatctttacctgcatacgaccaatgtttgaaagctagtcatatatttaatgtattagatgcccgtggagcaattagtgttgcccaaagagcagaatatattggtcgaataagagaaatcacaaaacaagctgctacaatttggg

SEQ ID NO: 298511 - DNA, 946 bp, Unknown
  Bacterial polypeptide expressing nucleotide sequence isolated from the Sargasso Sea
ttgaaaacaactaggggcacccttttgacagcaaaaaacatggatgaattggtctctctctgtaaaaggaggggttttgtatttcagtccggcgaggtctatggtggtttacagggggtttatgattacggtccattgggtgttgagcttaagaacaacttaaaaaactcctggtggagcgccatggtatttgagcgagatgatgttgaaggtcttgatgcatctatattgtcaaaacaagagttgtttaagtactctgggcatgaggaaaccttttctgatcccctggttgactgtaagtcatgtaaatctaggtggcgtgaggaccttgttatcgatggaaaatgtcctggttgtggatcaaccgaattaacagaaccaaggccatttaatctgatgttcaagacagctgtagggccagttcaaaacgatgaaaactttgcgtatcttagaccagaaacagcgcagcatattttttcaagttttaaaaatgttcaagactccacatcaaggcaaataccatttggtatagctcaaattggtaaagcttttagaaacgaaataactccaagaaattttatatttaggttgcgagagtttgagcaaatggagttggaatattttgtcaagccaggggaggatgaggctgctctagagtattggcaaaaagaaaggttagattggtgggagcttcaaggaattgatccttcaaatattgaaatctatgacgtaccaaaaaaggagcttgcacattattccaaaaagactattgatataatgtatcgattcccacatggtcttgaggagctagagggcattgccaacagaacagattttgatcttggttcacacacaaaaaatcagaaggacttatccctaagctcgtctgttgctcaaaacgaggagtcaaccatgcgacttgcggtacatgaccttatgccaaaga

SEQ ID NO: 298512 - DNA, 389 bp, Unknown
  Bacterial polypeptide expressing nucleotide sequence isolated from the Sargasso Sea
tatggcctctaaaaaaagtaaagagaaactaaaatttcaaacttttcaggatacaattttaaacctccaaaaatattggagtaaacatggttgtataattttacaaccatacgatatggaggttggagcaggaacttttcatccagccacaactctcaggtcacttggaccaaaaccgtggaaagcagcttatgtacaaccttctagaagaccgactgatggaagatatggagataaccctaatagacttcagcactattatcaatttcaagttataattaaaccttctccatcaaatataaaaaaactttatttaaatagtttgtctacaatcggtattgatcataaaaatcatgatatcagatttgttgaggatgattgggaaagtc

SEQ ID NO: 298513 - DNA, 575 bp, Unknown
  Bacterial polypeptide expressing nucleotide sequence isolated from the Sargasso Sea
tatggcttctaaaataaaaactaaaaaacctagatttcaatcttttcaagatacaatattgaatctgcaaaaatattggagtaagcaaggatgtgtagttttacaaccttatgatatagaggttggagctggaacgtttcatcctgcaactacattaagatctttaggagctaaaccatggaaggctgcatacgttcaaccatcaagaagaccaactgatggaaggtatggaaataatccaaatagacttcaacattattatcaatttcaagttttaattaaaccttcaccaaaaaatattaaaaaactttatttaaacagtttggcaacaattggcattaaccacaaggatcacgatattagatttgttgaagacgattgggaaagtccaactcttggtgcggctggattaggttgggaagtttggtgtgatggtatggaaattacacaatttacttattttcagcaaatggccggattcgaatgtaagccagtttcagttgaacttacctatggtcttgagagaatttgcatgtttacccagcaaaagaaaaatgtatttgatctttcgtgga

SEQ ID NO: 298514 - DNA, 919 bp, Unknown
  Bacterial polypeptide expressing nucleotide sequence isolated from the Sargasso Sea
ccaatagatgatggttcatcgtttgcatatttaaggcctgaaacagcacaacagatatttataaattttaaaaatgttattgattcttcgtctaaaacattgccctttggtattgcacagataggtaaagcatttagaaatgaaataactcctagaaattttatttttagggttagagaatttgaacaaatggagttggagttttttgtaaagcctggaactgacgaagattggcatgagagatgggttaagaagaggcttgtttggtgggaaaaacaaggtgtgccagaagaaaatatagagctctatgatgttcctgaagacgagttagcgcattactcgaagggtacaattgatattatgtacaaatttcctcatggtcttgaagagcttgaaggcatagctaatagaacagattttgacttaggttcgcacacaaaaaatcaagatgagctgaatatatcagccaaagtcatgccaaataataattcaaatacaagattggccattcaagacatagagtcaaagaagtgggtagttccctatgtcatagaaccttcagctggtgtagaaagaggtattttagcgatcatgaatgaggcatataacgttgaagatttgggcgaaggaaaagaaagaattgtcttaaaacttaagcctcacctttctccagttaaagctgctgtaataccattgaaaaaaaataatgatgacctggttaataaagcttctgatttaaaaaagagcttacaaagtttaaatataggaagaatcgttttagaaaatacaggtaatataggtaaaggctatcgaagacatgatgaaattggtacgcccttatgtattacaatagattttgagagcttagaagacaatacagctacagttagagatagggataccatgaagcaagaaagaa

SEQ ID NO: 298515 - DNA, 802 bp, Unknown
  Bacterial polypeptide expressing nucleotide sequence isolated from the Sargasso Sea
gaattacggttgcgttattttgcaaccttatgatatggaagtaggagctggaacttttcatccagctaccacattacgttctttgggaacaaaatcttggaaagctgcatatgttcagccatctagacgtccgacagatggaagatatggaaaaaatccaaaccgattacagcactattatcaatttcaagttataatcaaaccttctccagacgaaataaaaagtttttttctaaaaagtttatctactattggaataaatcataaggaacatgacattagatttgttgaggatgattgggagagtccaacacttggagccgcagggcgcggctgggaagtgtggtgtgatggtatggaaataacacaatttacttattttcaacaaatggctggtatagaatgtaaacctgtttctgttgagcttacatacggtttggaaagaatatgcatgtttactcaaggaaaaaaaaatgtgtttgatttagtttggaacaatgatggtgtaaaatataaagatgtttttcatcaagctgaaaaagaatattcagcttacaattttgaatttgcaaatacagaaaatttgttaaagaattttgaaatagccgagaatgagtgcaaatcactactagataaaaatcttccacttcctgcgtatgaccaatgtttaaaagctagccatatttttaatcttctagatgcaagaggggttataggcgttgcacagagaaccgagtatatttctagaataagagagctagctaaaggatcaggaaaaagttggttagaaagtcaaaaataa

SEQ ID NO: 298516 - DNA, 871 bp, Unknown
  Bacterial polypeptide expressing nucleotide sequence isolated from the Sargasso Sea
agcagtctatgattacgggccgcttggagttgaattgaaaaataatatatccaagttttggtggaaagaaatgacgcaaatacatgaaaatattgttggtcttgatagtggtattttaatgcaccctagtatctgggaggcctcaggacatgtcggcgcattcaatgatcctctagttgactgtaaaaagtgcaaagcaagatatagagcagatgaattttctcatgatttttcctccattgattggaataaaataaaatgtccaaactgcggaacaattggagatatgacagaaccgcgacagtttaatttaatgttcaaaactcatgttggaccagtgcgagaaactggaacagaggcctatttgagacctgagactgcccaaggaatatatgttaattaccagcttattcaaggagcaatgaggatgaaaatcccctttgggattgctcagattggaaaagcatttagaaatgaaatcattgcaaggaattttatttttcgcacaagagaatttgaacaaatggaaatgcaatattttgtaaaaccaggtacagatgatgcgactttaaaagactggaaagaaaaacgtttcatattttattcaaaataccttggcatagataaatctaaacttcgatttcataaacatgatgataatgaacttgctcactatgctaaagaagcgtgggatattgaatatcatttcccatttgggtggtctgaaatcgaaggtatacataatcgtacaaattatgatttaagtcagcatgaaaaattttctggtaaaaatttatcatattttgatcaacctaataacgagcgttttttgccttatatcattgaaacctctgctggtctgaataggatg

SEQ ID NO: 298517 - DNA, 843 bp, Unknown
  Bacterial polypeptide expressing nucleotide sequence isolated from the Sargasso Sea
ggtcgattgtaagtcatgtggtcttagattcagagctgatcaagtaccaaaagaatgcaaaaaagaagatctaactgaaccaaggcagtttaacttgatgtttaagacaaatgttggtccgatagacgatggttcaaattttgcttatctaaggcctgaaacagctcaacagatattcactaactttaaaaatgtcatagattcaacatcaaaaccagtcccatttggaattgcacaaattggtaaagcatttagaaatgaaataacaccgagaaattttatttttagagtcagggaatttgaacaaatggaattagaatattttgttatgccaggtgaagacgagacatctcatgatatatgggtacaaaaaagactagaatggtggaaaaaacaaggtgtacccacagaaagtattgagctatacgatgtacccactgaagaactagctcattattctaaaaaaactattgatctaatgtataaatttcctcatggccttgaagagcttgaaggtattgcaaacagaactgattttgatttaggttcacactctaaaaaacaaaatgaattgaatattggttcatctgtaaaggaaaataaacactcaaatagtaaaatggcagtacaggatgactctggtaaatgggttgtgccatttgtaatcgaaccatcagcaggtgtagaaagaggctttctagcaatattaaatgaagcttattttgttgaggagctagaaaatgataaaactagggttgtcttaagactaaaacctcatttatcaccaataaaggcagctgttatacctttaaagaaaaataacacagaattagttgaagctgc

SEQ ID NO: 298518 - DNA, 703 bp, Unknown
  Bacterial polypeptide expressing nucleotide sequence isolated from the Sargasso Sea
caaccttatgatactgaaaaaggagctggcaccatgagcccacatacctttttaaaagcacttggtccacaaccctgtagcatagcctacatagagccttgcagacgaccgactgatggacgttatgccaataatcccaatcgattgcaacactattttcagtatcaggtattaataaaaccatcaccagataatattcaaaatttgtttattgatagtttaaagcatatcggaattgatccacatcaacatgatattcgatttgtagaagataactgggaatctccaactctaggtgcgtggggccttggatgggaagtttggttagatgggatggaaattactcaatttacttattttcaacagtgtggcgggtttgcatgtgatcctgtttctgttgagattacgtatggattagaacgattagcatgttttattcaacaaaaagaaagtgtttttgatattatttggcaacggtcaaataatacagaaattagctatgcagatatttataaaaagtctgaaattgaacattgtacttataattttgaaacagcttcaattgctcgtttatttaaactctttaatttatatgaagaagaggccttacattgtttagaaaataatttatgttatccagcatatgacgcatgtttaaaatgctcacatctatttaacttattagacgctcgttgcgctattt

SEQ ID NO: 298519 - DNA, 418 bp, Unknown
  Bacterial polypeptide expressing nucleotide sequence isolated from the Sargasso Sea
aaaataatcccaacagtgatagaacctgcaggaggattaacaagaacactattcgcactactttgctcttgttatgatgaagatgaagtcaacgatacaacaagaactttttttcgttttgattttaatattgcacctatacagattggaatattgcctttaagtaaaaaagatgaattagttgaggtttcgaatgatatcaaaactttattacaggaaagctatagaactgaaattgatgttactcaatcgataggaaaaagatacagacggcaagacgaaattggtactccgtattgtattacagttgattttgattcccttcatgacaatactgtgacaataagaaatagagattctatggaacaggaaagagttgcaattactgacctccctggtttttttagtgatatctaat

SEQ ID NO: 298520 - DNA, 901 bp, Unknown
  Bacterial polypeptide expressing nucleotide sequence isolated from the Sargasso Sea
agtttctctttgcaaaagaagaggttttttatttcaatcaaatgacatctatggtggtatcaaaggtttatatgattatgggccaatgggagtcgagttcaaaaataatcttaaacaagcttggtggaaatcaatggtatatgaacgagatgataccgaaggtttggatgcttcaattttaagttctccagtagttttaaaacattcaggccatgaagatacttttacggatcctctagttgattgtcgcgcatgtaaatcaaggtggagagcagatcaattattagaaaataataaatgtccaaattgtaaatcagaagatcttactgaaccaagaccctttaatttaatgtttaaaactgcaattggaccagtagatgatggttcgtcattcgcatatttaagaccagaaacgtgtcagcaaatttttactaattttaaaaatatattagactcaacgtctagaactgttccatttggtatcgcacaaatgggaaaagcatttagaaatgaaataacacctcgtaattttatctttagggttagagagtttgagcaaatggaattagagttttttgttaaaccaggtactgatgacgaatggcatgaatactggataaataagagaatagaatggtgggttaatcaaggaataaaaaaagaaaatttaaaaaaaattgaagtagaaaaaggtgaactagcacattactcaaaaagaactgttgatatcaattatgtatttcctcatggtgaagaagaactagaaggggtagctaatagaactgactttgacttagggtctcacactaaaaatcaaaacgattttaaaattaaatcagaagtgatgaaaaactcatcctcaacgacaaaactagctgttcaagatttagaagaaaataaa

SEQ ID NO: 298521 - DNA, 511 bp, Unknown
  Bacterial polypeptide expressing nucleotide sequence isolated from the Sargasso Sea
ttcacctacttccagcaggtcggtggcgtcgagtgctatccggtcaccggtgagatcacctacggtctggagcgtctggcgatgtacctgcaaggcgtcgactcggtctacgacctggtctactccgacggcccgttcggcaaggtcagctacggcgatgtgttccaccagaacgaggtggagcagtcgacctacaacttcgagcacgccaacgtcgacaagctgttcgagctgttcgacttctacgaaggtgaagccaaccgtctgatggagctggagctgccgctgccggcctacgagatggtcatcaaggcatcgcacaccttcaacctgctggacgcccgccgcgccatctcggtaaccgagcgtcagcgttacattctccgtgttcgcaccctgtcccgcgcgattgcccagagctacctgctggcccgcgcccgcctcggcttcccgatggccacccccgaattgcgtgacgaagtactggccaagttgaaggaggccgaataat

SEQ ID NO: 298522 - DNA, 812 bp, Unknown
  Bacterial polypeptide expressing nucleotide sequence isolated from the Sargasso Sea
tatgagctcaaaaaacattaaaaccgattttcaatcaattattttaaatttacaacattattggtcagaaaatggttgtgtaatattacaaccatatgacaaagaagtgggtgctggtacctttcaccctgcaacaagtttaagaagtttaggtcctgaagaaaattggaatgttgcatatgttcaaccatcaagacgtccaactgatggtaggtatggagatagctcaaatagagcgcagcattattatcagtttcaaacgattatgaagccttcgcctgtaaatagtcaggctctttatctaggaagcttagaagcaattggattaaatcttaatgatcatgatatcaggtttgttgaagatgattgggaaagtccaacattgggagcatggggcctcggttgggaagtgtggtgtgatggtatggaaatttctcaatttacatattttcaacagatgggtggaattgaatgctctccaatccctttagagttaacttatggtttagaaagattagcaatgtttattcaaaatgttgaaaatattttcgatataagttggttgaaatcttcaacaagacaagttttttataaagatatttacttaaaaaatgaaatagaattttcttattataattttgaaaaagctgatgttagcattttgtataaacaatttgaaatggctcaagaagagtgtaaaaatttacttaataatgataagcctctatctttaccagcctacgaccagtgtttaaaatcaagccacatttttaatctattagatgccagaaggggcatttcagtgtctcaaa

SEQ ID NO: 298523 - DNA, 555 bp, Unknown
  Bacterial polypeptide expressing nucleotide sequence isolated from the Sargasso Sea
ctttgtgtaaaagaagggggtttatttttcaaacaaatgaaatttatggtggtcttcagggtgtctacgattatggacctttaggtgttgagttaaaggaaaacttaaagaggtcttggtgggcggcaatggtctactcgagagatgatgttgaaggtcttgatgcctctatacttactaataaaaaagttcttaaatattctggtcacgaggatacttttacagatccactagttgattgtaaggactgtaataatcgcatgagagcagatcatttaaaagatagtaagtgcttacattgtgggtcaacaaaccttactgaacctagaccgtttaatctgatgtttaaaacaaacattggtcctgttgctgacgatgaatcttatgcatatttaagacctgaaacagcccaacaaatatttactaacttcaagaatgtagttgactcaacatcaaaatctataccttttggtattgcccaaattggtaaggcctttagaaatgaaattactccgagaaactttatttttagagtgagagagttgaacagatgaa

SEQ ID NO: 298524 - DNA, 793 bp, Unknown
  Bacterial polypeptide expressing nucleotide sequence isolated from the Sargasso Sea
tcattcagaaatgaaataactccagggaacttcacatttagaacaagagaatttgagcaaatggaaatggaatttttctgtagccctgatgaagatgaaaaatggcacgaatattggatagacttttcaatggagtggttcaaaaaatttggaattagagaagaaaacttgatgattagaaaacacggaaaagaagaactccctcattattccaaagctagttctgatattgaatatttattcccgtggagttggggagaattggagacaatttctaacagaactgactacgacttgaaggcacattctgaactttcaggcaaagatttatcttattttgatcaagaaaacaacaaacgatacactccttatgtaatagaacctgcaatgggtgctgatagaagtgttcttgcttttctttgcgatgcatactgcgaagaagaaactgaaaaagaaacaagaacattattaaagttacatcctgagatttctccaatacaaatagctgtacttccattatcaaggaatgaaaagctatctgaatatagtagaaaaatctttgagaatataaataaaaaatttacagcacaatatgacgatactcaatctattggtcgaaggtatagaaggcaggatgaaatcggaacacctttatgtgtaacaattgactttgaaagtgttgaagaagatgactctgtaaccatccgacatagggatactatgaaacaaataagagtaagttcagataaattattagatgcaataaatgatcagattaattccttttcataaa

SEQ ID NO: 298525 - DNA, 790 bp, Unknown
  Bacterial polypeptide expressing nucleotide sequence isolated from the Sargasso Sea
atgtctgctaaaaatatggaagaacttgtatctctttgtaaaaggagaggatttatatttcaaactaatgatatttatggaggaattaaaggattgtatgattttggaccgatgggggttgagttaaaaaataatttaaaacaatcatggtggaaatcaatgatttatgaaagagatgatatcgaaggaatagatgcttctatacttacatctccaatagtatttaagcaatccggacatgaggaaacttttactgaccctcttgttgactgccgttcatgcaagtcaagatggagatctgatcagttaaatgaaaataaatgtcctcaatgtggttctaatgatttaactgatccaagaccttttaatttgatgtttaaaacatccataggacccgtagatgatggaagcacttttgcttatttaaggcctgaaacttgtcagcaaatttttacaaattttaaaaacattttagactccacaagcagaaacattccttttggaatagctcaaatcggaaaggcttttagaaatgaaattactcctagaaattttatttttagagtaagagagtttgagcaaatggagctagagttttttgttgagcctgggcaagatgataaatggcatcaatattgggttgataaaagatttgaatggtggattgagcaaggaataaaaaaaaataaaataaaaaaaagtactgtagaaaaaaaagatttatcacattattcaaaatcaacagtagatattatgtatgattttccacatggtggaagaggaacttgaa

SEQ ID NO: 298526 - DNA, 682 bp, Unknown
  Bacterial polypeptide expressing nucleotide sequence isolated from the Sargasso Sea
tatggtttctaaagtaaaaaaagaaaaaaaaaaaattcaaacatttcaagaaataattttaaatcttcagaaattttggagtaaaaaaggatgtattattcttcagccttacgatatggaggttggtgcaggaacttttcatccagctactaccctaagatcacttggaaataaaccatggaaagcagcttacgtacaaccatcaagaagacctacagatggaagatatggagataatccaaacaggttacaacactattatcaatttcaagttttaattaaaccttcccctgaaaatataaaaaaactttatctgaatagcttatctactatagggatagatcataatgatcatgatataaggtttgttgaagatgactgggaaagtccaacattaggtgctgcaggattgggatgggaagtatggtgtgatggaatggaaattactcaattcacctattttcaacaaatggctggatttgattgtaaacctgtatcagttgaaatcacttatggcttagaaagaatttgtatgttcactcaaaaagaaaaaaatgtttatgatttattgtggaatgatgaaggtgtaaaatatcacgaagtgtttcatcaagctgaaaaagaattttcagcatacaattttgaacacgcgaatgtagaaacactttttgaaaatgtttga

SEQ ID NO: 298527 - DNA, 658 bp, Unknown
  Bacterial polypeptide expressing nucleotide sequence isolated from the Sargasso Sea
tatgcctgccaagtcgatggatgaattggttgctctgtgtaagcgtcgaggctttatttttcaatcaagcgatatatacggcggtctacagggagtctacgactatggcccgctaggcgtagagctaaaaaataatctaaaggcaacctggtggtcctctatggtctatgaaagggacgacatagaaggattagatgccgccatcttaacgaatccggtaactctaaagtattccggtcacgtcgatacatttacggatcccctagtcgactgcaaagactgcaaggccagacaccgagcagatcacatttcagacgcaacgtgcccaaattgtggatcaactaaccttacagaaccaagagcatttaatttaatgttcaaaactaacgtaggtcccatagatgacggctcttcttatgcttttttgcgacctgagacagcccagtcaattttcacaaattttaaaaacgtcgttgattctacctcaagaaaattacccttcgggatagctcaaataggtaaatcattcagaaatgaaataactccgaggaattttatttttcgtgtgagagaattcgaacaaatggaattagagtacttcgttaggccaggggtagatgaggaagctcacgaatcctgggtaaaaagccagagtaaa

SEQ ID NO: 298528 - DNA, 817 bp, Unknown
  Bacterial polypeptide expressing nucleotide sequence isolated from the Sargasso Sea
acaaaagttttggggaaattatggttgcgtaattttgcagccatacgatatggaggttggagcaggaacatttcatcccgctactacacttcgttcactaggggaaaaaccgtggaaagctgcatatgtgcaaccttcaagacgtccaaccgacggaagatatggaaagaatcctaatcgtctacaacactactatcaatttcaagttataattaaaccttctcccagtgaaataaaaaaaatttttttaaaaagtctttcaacaataggaattaatcataaagaacatgatattagatttgttgaagatgactgggaaagtcctacacttggagctgcaggtcgcggctgggaagtttggtgtgatggaatggaaattacgcaatttacttattttcaacaaatgacaggaattgagtgcagacctgtttcagttgaacttacatatggactagaaagaatttgtatgtttactcaaggcaaaaataatgtgtatgaacttatttggaacaatgaaggtgtaaaatatagagatatttttcaccaggcagaaaaagaatattccgcatataattttgaatttgctaatacagagaatttgctaaaaaattttaatattgcagaatcagaatgtaaggctctgttagaaaaaaaacttccacttccagcgtacgatcaatgtctaaaggctagtcatatttttaatcttttagatgctagaggggtcattggagtcgctcaaagaacagagtatatttctagaataagagaactagctaaaggctcaggacaaagttggttagaaagtcaaaaatag

SEQ ID NO: 298529 - DNA, 687 bp, Unknown
  Bacterial polypeptide expressing nucleotide sequence isolated from the Sargasso Sea
tatggcctctaaaaaaaatttaaaaatacaaacattccaggatacaattttaaatctgcagaaattttgggcaaaaaatggttgtgtaattttacaaccatatgacatagaagttggcgcagggacatttcaccccgcaaccactttaagatctttaggacccaaaccatggagatcagcttatgtacagccttcgagaagaccaactgatggaagatatggagaaaatccaaatagactacaacattattatcagttccaagtgattatcaaaccgtcaccaaaaaatattaaaagattatatcttagtagccttaatgccattggaataaaacataatgaccatgatattagatttgttgaagatgattgggaaagcccaacattgggtgcagccggtctaggttgggaagtatggtgcgatggaatggaaattactcaatttacttattttcaaaaaatggctgggatggattgtaaacctatttctgtggagcttacttatggtttagaacgattatgtatgtttacccaaaagaaaaaaaatgtatttgacttagtatggaacgatgaaggtatcctttacaaagatgtctttttacaagctgaaaaagaattttcatcttacaattttgattttgcgaatgttgagaacttgtttaaattttttgaaatgctggaacacga

SEQ ID NO: 298530 - DNA, 376 bp, Unknown
  Bacterial polypeptide expressing nucleotide sequence isolated from the Sargasso Sea
agaatatggaaaaaatccaaatagacttcaacattattatcaatttcaagttataattaaaccatcacccaaaaatattaaacaaatctatttaaaaagtttatctgctatcggtattgtagcaaaggaccatgatataagatttgtagaagatgattgggaaagtccgacccttggagcggcaggattaggttgggaagtttggtgtgatggtatggaaataactcaattcacatactttcaaaagatgacagggatagaatgcaaacctatatctgttgaattaacatatggtttagaaagaatatgtatgtttattcaacaaaagaaaaatatttttgatatcgaatggaataatgaagggtgtaaaatataa

SEQ ID NO: 298531 - DNA, 561 bp, Unknown
  Bacterial polypeptide expressing nucleotide sequence isolated from the Sargasso Sea
gatgagcataaaaaccaatttcgacacacctaaaagctttcaagatataatatttaaactccaagaatattggtcagaaatggggtgcgctatcattcaagcctatgacgtggagcttggcgcaggcacgtttcatccagcgactacattacgcgctttgggttctaagccatggtcagtagcttacgctcaggcgtgtagaaggccgaccgatgggcgttatggggcaaacccaaatcgactgcaacactattatcagtttcaagttataatcaagccgtcacccaaaaattttcaggacttgtatctaggtagcctgaagcgcattggaattgatccgtcgtcacacgatatacgttttgtagaagatgattgggaaagcccaactctgggggcttggggattgggctgggaagtgtggtgcgatggaatggaagttagtcaattcacctatttccagcaaatgtgtgggtttgattgtaaacctgtttcaggagaattaacatatggattggaaagattagcaatgtacattttgggaaaggatcacgtgatggacat

SEQ ID NO: 298532 - DNA, 481 bp, Unknown
  Bacterial polypeptide expressing nucleotide sequence isolated from the Sargasso Sea
atggtttctaaaaaaaaaaatattttatcattccaagatacaatattaaatctccaaaagtattggagcaaagaaggatgtattatattgcaaccttatgatttagaagttggagctggaacttttcatcctgctacaaccttaagatctttgggcacaaaaccttggcgtactgcctatgttcaaccatcaagacgaccttcggatggaagatatggtgataacccaaatagattacagcactactatcaattccaagttttaattaaaccatcaccggataatataaaaaaactttatcttaatagtttatcatcattaggtattaaacatgaagagcatgacattagatttattgaggatgattgggagagtcctactttaggtgctgcaggattaggatgggaagtgtggtgtgatgggatggaaattacacagtttacatattttcaacaaatgggcaggaatagaatgcaatcca

SEQ ID NO: 298533 - DNA, 728 bp, Unknown
  Bacterial polypeptide expressing nucleotide sequence isolated from the Sargasso Sea
tatggtttctaaaaaaaaaattaaaaaaaaaatttttcaatcttttcaagatacaattcaaagcttgcaaaaatattggagtaaacaaggatgtgtaattctacaaccatatgatatggaagttggtgctggaacttttcatccagcaactacactaagatcgctcggaccaaaaccatggagggcagcttatgttcagccttcaagaagaccaactgacggtagatatggggaaaatccaaataggctacaacattattatcaatttcaagtactgattaaaccatctccagacaatattaaaaaactctatcttaatagcctagcatctgtaggtataaaacaccaagatcatgatattaggtttgtagaagacgactgggaaagtccgacattaggtgcagcaggattaggatgggaagtgtggtgtgatggaatggagattactcaatttacatactttcagcaaatggcgggcgttgaatgtaaacctatatctgttgagctcacatatggtcttgaaagattgtgtatgtttacccaaggtaaaaaaaatgtttttgatttaatttggaacgatgaaggaattttatatagggacgtttattatcaatcagaaaaagaattttccaaatataattttgagttagccaatacagaaaatttatttaaaatgtttgatatgttagaaaaagaagttaatagtttgattgaaaataaaatttcat

SEQ ID NO: 298534 - DNA, 568 bp, Unknown
  Bacterial polypeptide expressing nucleotide sequence isolated from the Sargasso Sea
tatggtttctaaaaaaaaaacaaaaaatctaaaatcatttatttctttccaagatacaatattaaatcttcaaaagtactggtcaaaaaaaggttgcgttattttacaaccttatgatttagaagttggggcaggaacatttcacccagcaacaactctgagatcattaggtcctaaaccatggaaaacagcttacgttcaaccatcaagaagaccaacagatggaaggtatggagaaaatcctaatcgtttgcaacactactatcaatttcaagttttaataaaaccttcacctaaagatattaaaaaaatgtatcttaatagcctttcatcagtaggtattaaatacgaagagcacgatatcagatttgtagaggatgattgggaaagtccaaccctaggagctgctggtcttggatgggaagtatggtgtgatggcatggaagttactcaattcacttattttcaacaaatggctgggatggaatgcaatccaatatctgttgaaattacttacggtttagagagattatgtatgtttattcaaggtaaaaaaaaaatgtttttg

SEQ ID NO: 298535 - DNA, 656 bp, Unknown
  Bacterial polypeptide expressing nucleotide sequence isolated from the Sargasso Sea
tccaaatcgcttacaacattattatcagtttcaagttatcattaaaccttctccagataatatcaaaagaatttttctgaacagtttatcaaaaataggaattaatcataaagaacatgatatacgatttgtcgaagatgattgggagagtccaacgcttggtgcggcgggtcgaggatgggaagtttggtgtgatggtatggaaattactcagttcacttattttcaacagatggcgggtatagaatgtaaaccagtgtcagtagagcttacatacggtttggaaaggatatgcatgtttacacagggaaaaaataatgtattcgaactcatatggaacaatgatggaattaaatataaagatgtttttcatcaggctgaaaaggagtattcagcatataattttgaatttgctaacactgaacatttgctaaaaaattttgaaatagccgaaacagaatgcaaatctttattggagaagaagctttcattgccagcttacgaccagtgtttaaaagctagccatatctttaatttattagatgcaagaggagttattggagttgcccaaagaactgaatttatttctagaataagagagttagccaaaggttcaggacaaacttggctggaaagtcaaaaagaaaatggctgaa

SEQ ID NO: 298536 - DNA, 742 bp, Unknown
  Bacterial polypeptide expressing nucleotide sequence isolated from the Sargasso Sea
atggtttctaaaaaaaaaaataaaaaatctaaatttcaatcatttcaagatacaatcttgaatttacaaaaatattggagcaaacatggatgcgtaattttacagccatatgatttagaagttggtgcaggaacatttcatcccgctacaacacttaggtctttaggaagtaaaccatggagaacagcctacgttcagccttcaagaagaccaacagatggaagatatggagaaaatccaaatagacttcagcactattatcaatttcaagttttaatcaaaccgtcaccaaaaaatataaaaaaactttatttaaatagtctttcagcaattggcattaaacataaagaacatgatataagatttgttgaagatgattgggaaagcccaacattaggagccgcaggtcttggatgggaagtttggtgtgatggaatggaagtaactcaattcacttattttcagcaaatggctggaatagaatgtgatcctatttctgttgaattaacatatggcttagaaagactttgtatgtttactcaagaaaaaaaaaatgtttttgatttagagtggaacaatgatggagttttatatagagatgtgtttcatcagtctgaaaaagaattttcaaaatataattttgaattagcaaatgctgacaatttatttaaaatatttgatatgatagaaaaagagtctaaatctttgatagaaaacaaattatctttgccagcttatgatc

SEQ ID NO: 298537 - DNA, 502 bp, Unknown
  Bacterial polypeptide expressing nucleotide sequence isolated from the Sargasso Sea
gatggttacgaacgctcctcaatcttttcaggaaatcatcctacggcttcaaaattattgggtggcacagggatgtgctttgatgcagccgtacgatatggaagttggagcaggaacttttcaccctgctaccacactaagatctttgggtcctaaaccttggtcggtagcctatgtccagccttctagaaggccaaccgatggtcgttatggagaaaacccaaaccgattacagcactattatcaatttcaggtattaatgaaacccagcccccctgattttcaaaacctgtatttgggatcattggatgcaattggtattgatcatcaattacacgacttaaggtttgttgaagatgattgggagagcccaacgcttggggcatggggtttaggttgggaagtttggtgtgatggtatggaagtaagccaatttacatattttcaacaagttgggggtcatgaatgcaatccagtttccggtgatttgacatacggttta

SEQ ID NO: 298538 - DNA, 442 bp, Unknown
  Bacterial polypeptide expressing nucleotide sequence isolated from the Sargasso Sea
aatgctcaaaaaaaataaattaaataaaaaaaaaagtaaacctaccccagtaaattttcaggaaacaattttaaatttgcaaaaattttggggaaactatggatgtgttatattacaaccatatgatattgaagtaggcgcaggaacatttcatccggctacaacattacgatcactaggaccaaaaccttggaaggcagcgtacgtacaaccatcaagacgtcctactgatggtagatatggaaaaaatccaaatcgcctccagcattattatcaatttcaagtaataattaaaccttctccagaagatataaaaaaagtttttttgaaaagtttatctgtaataggaataaatcataaggagcacgacatcaggtttgtcgaagatgattgggaaagcccaacccttggagcggccggacgcggatgggaagtttggtgt

SEQ ID NO: 298539 - DNA, 843 bp, Unknown
  Bacterial polypeptide expressing nucleotide sequence isolated from the Sargasso Sea
gctttgtatttccaaactctgaaatttatggaggattaaaagcgtcttatgactatgggcctcttggtgtagaattaaaaaaagctatatcagaaaaatggtggaaagcaatgacgaacaattcaaacattgttgggctcgatagttctatcatggttcacccagatgtatgggaagcaagtggacatattgccaactttaatgatcctatgacggataataaggatagtaaaaaacgttatagaattgacgatcttttgtcccagcaaaaaagtaaagttattgatgccttatgtgaaatgctgtctattgaaaataaaaatgatagtgatactcttgataaaatcagtcacactttacttcaagaatcagatagatatagtaatgctttagaatcagcagaagttattgatccattttcaggaaatattggaaaatggacccaagctactcagtttaacctaatgtttcagacaaattcaggtccatcagaaaaatctggtaaaagtatttatttacgtcctgaaacagctcaagggatttatattaattatttattagttcaaaattctatgagattaaaagttccattcggtatcgctcaaattggaaaagcctttagaaatgaaattatcgcaagaaattttatttttagaacaagagaatttgaacaaatggaaatgcaatattttgttcatccatctgaagatgaatcatctatggaactttggaaaaataaaagaattagcttttattctgaagaattaggaattagcaaagataatttaaaatttcatcaacattccgaagatgcccttgctcattatgcaaaagagctttgac

SEQ ID NO: 298540 - DNA, 649 bp, Unknown
  Bacterial polypeptide expressing nucleotide sequence isolated from the Sargasso Sea
aatccaaacaggttacaacactattatcaatttcaggttttaattaaaccttcccctgaaaacataaaaaaactttatctaaatagtttatctactataggaatagatcataatgatcatgatattaggtttgttgaagatgattgggaaagtccaacattaggtgctgcaggattaggatgggaagtatggtgtgatggaatggaaattactcaattcacttattttcaacaaatggctggatttgattgcaaacctgtatcagttgaaatcacttatggcttagaaagaatttgtatgttcactcaaaaggagaaaaatgtttatgatttattgtggaatgaggaaggcgtaaaatatagtgaagttttttatcaatcagaaaaagaattttcagcatataattttgaacatgcaaatgtagaaactcttttgaaaatgtttgaaatgcatgagaccgaagcaaaagctttggtagaaaaaaaaatttctttaccagcatatgaccaatgtttaaaagccagccatgtgtttaatattttagatgcaagaggtgcaatcagtgttgcacaaagagcaggttatattgcaaggataagagatatcacaaaatctgcggcaggtgtttggttagatagtcaaaaataat

SEQ ID NO: 298541 - DNA, 592 bp, Unknown
  Bacterial polypeptide expressing nucleotide sequence isolated from the Sargasso Sea
atggtctctaaaaaaaataaaaacaatataataacatttcaagatacattaatgagtttgcaaaaatattgggcaaaacatggatgtgttattttacaaccatatgacttagaggttggagctggtacttttcacccagccaccgccttaagatctctcggagaaaaaccgtggaagacagcatatgttcagccttcaagaagacctacagatggacgttatggagaaaacccaaataggttacaacattattatcaatttcaggttttaattaaaccatctccagataatataaaaaaactttatttaaacagcatttcttcaattggtatagattatcaagagcatgatattcgatttattgaggatgattgggaaagtccaacattaggtgcagcaggtttaggatgggaagtttggtgcgatggtatggaaataactcaatttacctactttcagcaaatggcaggattagaatgtaaaccgatctcagtagaaattacttatggtttagaaagattatgtatgtttattcagaataaaaaaaatgtttttgacctagaatggaacagtgaaggggttctttataaag

SEQ ID NO: 298542 - DNA, 735 bp, Unknown
  Bacterial polypeptide expressing nucleotide sequence isolated from the Sargasso Sea
ccccacccgacgggcgctatggcgaaaatcccaaccggtggcagcactattaccaataccaggtcctgatcaaacccagcccgcccaacctgcaagagctgtaccttggcagccttgaggccatcggcatcgacattgccctgcacgatatccgctttgtcgaggacgactgggaaagcccgaccctgggcgcctggggccttggctgggaggtctggtgcgacggtatggaagtcagccagttcacctatttccaacaggtcggcggccatgattgccaccccgtttcgggggaactgacctatggcctggaacgccttgccatgtatgttctgggtatcgaccacgtgatggacatgcccttcaacgacccggatgcaccgatcgcgctgtcttatggcgatgtcttccgccagaccgaacaggaatacagccgctggaacttcgacgtggccaataccgatgttctcttcaaacagttcgaagaggccgaggccgaatgcgaggcgatcctgagccacgaacatgaagaccccaagaccggcaagcgcatcgtcatggcgcacccggcctatgatcaatgcatcaaggccagccacctgttcaacctgctggatgcgcgcggcgtgatctcggtcaccgaacggcaggcctatatcgggcgtgtccgggccttggccaagaaatgcgccgatgccttcgtacagaccgaagccggagggcatgcggcgtgat

SEQ ID NO: 298543 - DNA, 673 bp, Unknown
  Bacterial polypeptide expressing nucleotide sequence isolated from the Sargasso Sea
cctaatagacttcagcactattatcaatttcaggtcataattcaaccatctcctgaagatatacaaaatttatatttagagagtttaaaattcattggtcttaatcctaaagaccatgacattagatttgtagaagatgattgggaaagtccaactcttggcgcctcaggactgggttgggaaatttggtgtgatggaatggaaataagtcaatttacgtacttccaacaggtaggtggtattgaggtaaaacctgttgcaagtgaaatcacttatggccttgaaagattagctatgtttattcaaaaaattgaaaatgtttatgatttagattgggatggtatcgataaaaaaaagggtggcaaaacatacggtgatatttttttacagcaagaaaaagaattttctaaatataattttgaaaaatctcagacatcctctttatttaagcagtttaatgatgctgaaactgagtgcaaaaatttattagatgataagaaaaatcttttagcgctacctgcatatcatcaatgtattaaagcaagtcatatttttaatttattagatgcaagaggcgttatttctgtttcagagagacaatcatacatcttaagagttagaaatatggctagatcttcttgtcttgcttggatgggtaaattaaatgaataat

SEQ ID NO: 298544 - DNA, 660 bp, Unknown
  Bacterial polypeptide expressing nucleotide sequence isolated from the Sargasso Sea
ttgaagtagaaaaaaatgaactagctcactactcaaaaagaactgttgatatcaattatgtatttcctcacggtgaagaggaactagaaggggtagccaatagaacagattttgacttaggttctcacaccaaaaatcaaaacgattttaaaattacatcagaagttatgaaaaactcctcttcaactacaaaattagctgttcaagatttagaagaaaaaaaatggtatattccttacgtaattgagccatcagctggtgttgatagaggagtacttgctttattaaatgaagcttatcgtgaagaaaatgtagataaagataataaaagaattcttttatctctaaaacctcatctttcacctattaaagctgcagttattcctctcaagaagaataatgaggaattagttaatttatctaaagaaataaaatctaatctacagaaattgggattgggtagagttgttttagaaaattcaggaaacattggtaagaactatagaagacatgatgaaataggaacaccaatttgtttaactgtagattttgaaactctagaagataaaagtgttactgttagggacagagatactatgaaacaggaaagagtttctattgaaaatttatctgaatattacaaaaaatattttaattaat

SEQ ID NO: 298545 - DNA, 897 bp, Unknown
  Bacterial polypeptide expressing nucleotide sequence isolated from the Sargasso Sea
aaaagttgtccacattgtaaatctcaggatttaaccgaacccagaccttttaatttaatgtttaaaacttctatcggtccagttgatgatggaaattcttttgcttatttaagacctgaaacagctcaacaaatattcactaatttcaaaaatattttagactctactagtagagtcataccatttggtatagctcaaattgggaaagctttcagaaacgaaataactccaagaaattttatttttagagtaagagaatttgagcagatggaattagaattttttgttgaaccagactcagatgaaaaatggcacaagtattggattaattctagatataattggtggattgaacaaggaatagacaaagatagattaaaattacaaaatgttgaaaataatgaattgtctcattattcaaaagctacagtagatataatgtataaatttccccatggtaatgaggaactagaaggaattgcaaatagaacggattttgatctaggctctcacacaaaaaatcaaaaagaatttaatatttcttcgaaaattaacaagaatgaagattctactacaaaattagcagtacaaaatttagaaaagaaaaattggtttattccatacgtcatcgaaccttctgcaggggtagatagaggatttctcgcattactaaatgaagcttataaagaagaaaaaattgatgacaataatacaagaatacttttagctttaaagcctcatttatctcctataaaagcagctgttatacctttaaaaagaaataatgaacagttagttagtcaggctaaaaatataaaaagcaatttgcaaaaaattggactcggtagagtgatattagaaaattctggcaatattggtaaaaactatcgacgtcac

SEQ ID NO: 298546 - DNA, 925 bp, Unknown
  Bacterial polypeptide expressing nucleotide sequence isolated from the Sargasso Sea
ctgtcctgtggttctacggacctaacagatgcacgtgcgtttaacttgatgttcaaaacaccagttgggccaactgaaaatgaagggtcctttgcctacctgaggcctgagactgctcagcatatttttacgagctttaaaaacgttcaagactctacatcaagacagataccttttggaatagctcaaatcggaaaagcgttcagaaacgagatcaacccaagaaattttatttttaggttgagggagtttgaacaaatggagttagagtattttgtaaggcctggcgatgatgaagctgctctggattactggagagaccaaagattaaaatggtggaaaaaccaaggaattgaatcatcaagtcttgaaatatatgatgtgcccagagacgaattggctcattactccaagagaacgattgatattatgtatcgctttcctcacggtcttgaagaactggaaggaattgcaaatagatcagattttgatcttggatcacatacaaaaaaccaaaatgacctttccttgtcctcaaaaacaaaaggtaatgatgagtcaactatgcgcctagctgcgcaagatcttgaagctaagaaatggtatgtcccattcgtaatcgagccctctgcaggtgtggatagagggtttttagcaatattaaatgaggcttacactgttgataatttgggtgaaggcaaagaaagggttgttttaaaattgaaaccacatctttctcctattaaagctgcagtcatgccccttaagaagaataatgaatcgcttgttgcgctttcaaaagagatcaaaacaggccttcaatcactcggcaagggcagagtgtttttagaaaacacaggtaatattggaaaagcctatcggaggcatgatgaggttggaacaccttatatgcattacggttgat

SEQ ID NO: 298547 - DNA, 778 bp, Unknown
  Bacterial polypeptide expressing nucleotide sequence isolated from the Sargasso Sea
ttgtcattccaagattcaatacttattttacaaaagtattggagcaaacagggatgtgttatattacaaccttatgatttggaagttggagctggaactttccatccggccacaaccctaagatctcttggtccaaaaccttggcgaactgcttatgttcaaccttcaagaagacctactgatggaagatatggagataatccgaatagattacagcattactatcaatttcaagttttaattaaaccgtcaccagataatataaaaaaactatttcttaatagcctatcatctttaggtataaaatgtgaagagcacgacataagatttgttgaagatgactgggagagtcctacgttaggggcggcaggattaggatgggaagtttggtgtgatggaatggaaattacccaatttacatattttcaacaaatggcaggcacagaatgtaatccagtttctgttgagattacttatggactagaaagattatgcatgttcatacaaaataaaaaaaatgtatttgaattaaattggaatgataagggtattctttataaagatgtttttcatcaatcagaaaaagaattctcagcatataattttgagtacgcaaatacagacaatttatttgaaatttttgatatgttagaagatgaagcaaaaaatttaactgaaaaaagactttctttaccagcatatgatcaatgtttaaaagcaagccatgtttttaatatattagactctagaggggttataagtgtagcacaaagagcag

SEQ ID NO: 298548 - DNA, 745 bp, Unknown
  Bacterial polypeptide expressing nucleotide sequence isolated from the Sargasso Sea
atgaaaaatacctcaatggaagacttagtatctttatgtaagagacgaggtttcatatttcaatctaatgaaatttacgggggtctacaggggctttatgattatggtcctttaggagttgagttaaaaaataatctcaaaaaatcttggtggaaatccatgatatacgaaagagatgatgtagagggaatagactcatccattttaactaacccactagttcttaaatattctggacatgaaaatacgtttactgatcccttagttgactgtaagtcttgtggtgaaagatttagagcagatcaagtaccagattattgtaaaaaagaagatttaactgaaccaaggcagtttaacttaatgttcaaaacaaatgttgggcctattgaagatggaaattcatttgcctatttaaggcctgagacagcgcaaaatatctttaccaattttaaaaatgttttagattctaatcctcaccctcttccgtttggtatagctcagatgggtaaagcatttagaaacgaaattacgcctagaaactttatattcagagttcgcgaattcgaacaaatggaattggaattttttgtaaaaccaggtgaagacgaggaatggcataaaaagtggacagatttaagaatgcaatggtgggaagatcaaggagttagcaaggaaagtctagagttatatcatgtgcccagtgacgagttagcacattactctaaagctactgtggacattatgt

SEQ ID NO: 298549 - DNA, 694 bp, Unknown
  Bacterial polypeptide expressing nucleotide sequence isolated from the Sargasso Sea
tcaaccatcaagaagaccaacagatggaagatatggaaaaaatcctaatagacttcaacattattatcaatttcaagttataattaaaccatcacctaaaaatatcaaacaaatctacttaaaaagcttgtctgctatcggtattgtagcaaaggatcatgatataagatttgtagaagatgattgggaaagtccgacccttggagcggcaggattaggttgggaagtttggtgtgatggtatggaaataactcaatttacatactttcaaaagatgacagggatagaatgcaaacctatatctgttgaattaacatatggtttagaaagaatatgtatgtttattcaacaaaagaaaaatatttttgatatcgaatggaataatgaaggtgtaaaatataaagatgtttattttcaatcagaaaaagaattttcctcatataattttgaccatgctaatacagaatttttgcttaaaaattttgaaatagctgaaagtgaatgtaaatcattattagaaaaaaaactttctcttcctgcgtatgatcaatgtctaaaagcaagccatatatttaacttattagactccagaggtgttatttcagttgctgaaagaacagggtatatcaatagaataagggaacttgcaaaaggatcaggatcaatttggttaagaagtcaaatagaaaaataa

SEQ ID NO: 298550 - DNA, 362 bp, Unknown
  Bacterial polypeptide expressing nucleotide sequence isolated from the Sargasso Sea
tatggtttctaaaaaaaaaaagaaacagcctaaatttcaaacttttcaagatactattttgaatctccaaaaatactggagtaaacagggatgtataattttacaaccttatgatatggaagttggagcgggtacgttccatccagcaacaacacttagatcattaggaccacaaccttggaaggcggcatatgttcaaccttcaagaagaccaacagatggtagatatggtgacaacccaaatcgattacagcattattatcaatttcaagtaattattaaaccatcacctaaaaatattaaaaaactttatttaaatagtttaaatactataggaataaatcataacgaacatgacattc

SEQ ID NO: 298551 - DNA, 572 bp, Unknown
  Bacterial polypeptide expressing nucleotide sequence isolated from the Sargasso Sea
tttaaaaagtttatcaaagataggaataaatcataaagaacatgatctaagatttgtagaggacgattgggagagcccaactctaggagcggcaggtctaggatgggaagtgtggtgtgatggtatggaaattactcaatttacatattttcaacaaatggccggagtagaatgtaaacctgtttctgtcgaacttacttatggcctagaaagaatatgtatgtttacacaggaaaaaaataacgtatatgatttagaatggaataaggatgggattaaatatagagatgtatttcatcaagcagaaaaagaattttcagcctataattttgaatttgctaatacagaatttttattaaaaaattttgagattgcagaatcagaatgcaagtctttgttagaaaaaaaacttcccttaccggcatacgatcaatgtttaaaagcaagtcatatttttaatcttttggatgctagaggagtaataggagtagctcaaagaactgaatatatttctagaataagggaacttgctaaaggatctgggcaaagatggttagaaagccaaaaataaa

SEQ ID NO: 298552 - DNA, 796 bp, Unknown
  Bacterial polypeptide expressing nucleotide sequence isolated from the Sargasso Sea
gtttgaaacaagcattggtcctgttcaaaatgaaaactcaaacgtttatttaagaccagaaacagcacaaggtatatttgtcaactttgagaatgttttaaggacaatgagagcaaagattccatttggtattgcaaatattggaaaatcttttagaaatgaaataacacccgggcaatttatttttagaactagagaatttgaacaaatggagattgaattcttttgtaaagaagaagaagagaataaatggtttgatttttgggtgaacaagagaatggattggtacaaatctattggaattccagaggacaacttaaggcttagagagcatagtgataatgaattggctcattacgcttcaaaaacggttgatattgaattcctttatccatggggatggggtgagctcgagggcgtagctaatagaggaacatttgatttatcttctcatgaaaaagcaagtgggaaagacttgtcttattttgatcctgaatcaaatgaaaaaatagtaccaactgtgattgagcctgcaggaggattaactaggacactttttgcattactttgttcaagttatgttgaagatgaagtaaatgatgcaactagaactttatttcgattcgaatttgatattgctccaatacaaattggaattttaccattaagtaaaaaagatgaattaattgaagtttcaaatgatatcaaaaatttattacaggaaagctatagaactgaaataaacgtaactcaatcaataggaaaaagatacagaaggcaagacgaaataggaaca

SEQ ID NO: 298553 - DNA, 748 bp, Unknown
  Bacterial polypeptide expressing nucleotide sequence isolated from the Sargasso Sea
atgcctgccaagtcgatggatgaattggttgctctgtgtaagcgccgaggctttatttttcaatcaagcgatatatacggcggtctacagggagtctacgactatggcccactgggcgtagagctaaaaaataatctaaaggcaacctggtggtcctctatggtctacgaaagggacgacatagaagggttagatgcggccatcttaacgaatcctgtaactctaaagtattccggtcacgtcgatacatttacagatccattagtcgactgcaaagactgcaaggccagacaccgagccgatcacatttcagatgcaacttgcccaaattgcggatcaactaatcttacagcaccaagagcatttaatttaatgttcaaaactaacgtaggtcccatagatgacggctcttcttatgcttttttgcgacctgagacagctcagtcaattttcacaaattttaaaaatgtcgttgattctacctcgagaaaattgcccttcgggatagcccaaatcggcaaatcattcagaaatgaaataactcccaggaattttatttttcgtgttagagaattcgaacaaatggaattagagtacttcgttaggccaggggtagacgaggaatctcacgaatcctgggtacaaagcagagtaaattggtggatagaacaaggcataaactcaaacaaccttgagttgtataaagtcccacaggaggaactcgcccactacagtaaggcgacggttg

SEQ ID NO: 298554 - DNA, 444 bp, Unknown
  Bacterial polypeptide expressing nucleotide sequence isolated from the Sargasso Sea
aaaggatttaactgacccgaggccatttaacttaatgtttaaaactgcaataggtccagttgatgacggtagttcatttgcatatttgaggccagaaactgctcagcaaatatttgtaaattttaaaaatatcgttgactcaacaagtagggttcctccatttggtattgcccaaataggaaaagcatttagaaatgaaatcacacctagaaactttatttttagggttagggaatttgaacaaatggaacttgagtatttcgttaaacctggttctgatgagaattggcataaatactgggtagataaacgtttaaattggtgggctgatcaatgtgtcaaatcagagaaattaaaattacttgaggtagaaaaaaaggatttatcacattactctaaagcaacttttgatattatgtatgaatttccacatggccttgagga

SEQ ID NO: 298555 - DNA, 649 bp, Unknown
  Bacterial polypeptide expressing nucleotide sequence isolated from the Sargasso Sea
aatccaaatcgattacaacactattatcaatatcaagtaattataaaaccttctccaaaaaatattaaacaactttatcttaaaagcttagcagctataggtatcgatgtaaaaaatcatgacatccgttttattgaagatgattgggaaagtccaactttaggagcagcaggattaggatgggaagtttggtgtgacgggatggagatcactcaatttacttactttcaacaaatgacaggtatagaatgtaaacctgttccagttgaaattacctatggtttagagagactatgtatgtttgttcaggggaaaaataatgtttttgaccttgattggaataatgatggtgtgaaatataaagaagttttttttcaatccgaaaaagaattttctgcttataacttcgagtttgcggatactgatactttactaaaaagttttgaaaatactgaaaaagaatgtaaatctttactcgaaaaaaaactctcaatgccagcctatgatcaatgtctaaaagcaagtcatatttttaatttactagatgcacgtggcgttgttggtgttgctgaaagaactggttatattacaagaattagggagctcgcaaaaggttgcggtgctttatggctaagttcgcaaagttaaa

SEQ ID NO: 298556 - DNA, 900 bp, Unknown
  Bacterial polypeptide expressing nucleotide sequence isolated from the Sargasso Sea
tttgacagcaaaaacaatggaagaactggttgctctttgtaaaagaagagggtttattttccaatcaaatgaaatttatggaggcctgcaaggcttgtatgactatggtccgctgggtgtcgagctgaaaaataacttgaaacaatcgtggtggagagaaatggtttttgatagggatgatgttgagggcctggatgcttcaattttaactaagccaaatgttttaaaattttcaggtcatgagaccaccttttcagatccaatggtggattgtaaatcatgtaatcagcgctttagggcagaccaagtgcctgatcattgtaaaaaagaagatcttactgagccaaggcagtttaacctaatgtttaaaacagcagttggaccggttgaggataaaaattcatttgcatatcttagacctgaaactgctcaaaatatatttacaaactttaaaaacgttgtagattcaacatctagaaaggtcccttttggaattgcacaaattggtaaagcatttagaaatgaaataactcctagaaactttatcttcagagtaagagagtttgagcaaatggagcttgaattttttgtggtcccaggaacggatgatgagtggcatcaagcatgggttgatgcaagattagaatggtgggaagaacaaggagtgagtagagatagtatagagctatatgatgtgcctaaagatgagcttgctcattactcaaaagctactgtagatattatgtacaaatttcctcatggtcttgaagagctagaaggtattgcaaatagaacagactttgatttggggtcgcacagtaaaaatcaagaagagctaaatattcaggctgccgttattgaaaatagtgaatcaaatgcaaggcttgcaacgcaaaatct

SEQ ID NO: 298557 - DNA, 844 bp, Unknown
  Bacterial polypeptide expressing nucleotide sequence isolated from the Sargasso Sea
accgccagcggtctgggaagcatcaggccaccttgagaatttcacagacccgctcgtcgattgcaaagaatgcaatgggcgattccgcgaagaccaactagaagatccttcaacttgtccagcatgcggtgcgactaacagtttcacagaggcgcgagcatttaacctcatgttcaaaacccatgcaggtccagtagaaggagcaggtcacgcagtttatctacgcccagaaacagcgcaaggaatgttcacaaatttcaagctcgttctagaaacgtcgagaaaaaaacctccattcggcatcgctcaagtagggaaaagtttccgaaatgaaatcactccgggtaatttcgttttccggacacgagaattcgaacagatggaaatggaatatttcgtcccgccagaccaagcagatatgtggtacgagtactggtgcgaagaacgcatgaactggtatatcgatttgggtatccctaaagaccaactacgtttgcgaccccacgaccaagatgaactaagtcactacagttcaggaaccagtgatgtggaattcctcttcccatggggatggggcgaactcgaaggggtcgcgaatcgaggcgactacgatttacgtcaacacagcgaacactctggagaaaaacttacctacttcgacccagaactaggtgagcactacattccacatgtaattgaaccagcagcgggagccactcgttcgatgatggcattcctaatagctgcatatgacgaggaaacagttaacgatgatctgcggacggttcttcgtttcgacccccgaatcgccccatacaaaatcgccgtcctacctctatcaaaa

SEQ ID NO: 298558 - DNA, 446 bp, Unknown
  Bacterial polypeptide expressing nucleotide sequence isolated from the Sargasso Sea
aatgccagctaaaaaaaaagtcaaaaaaaaaattactactctttcattccaagacatcataatgaatctccaaaaattttggggcaaaaacggatgtataattttacaaccttatgatttagaggtcggcgcaggaacctttcaccctgctactacattaagatctttggggccccaatcttggaaagccgcttacgtacaaccatcaagaaggcctacagacggaagatacggtgaaaatccaaatagattacaacattattatcaatatcaagtaattataaaaccatcacccaaaaatattaagcaaacatatttaaaaagtttagctgcaatcggtattgatgtaaaaaatcacgatattaggtttgttgaagacgattgggaaagcccaacgcttggcgcggctggattaggatgggaagtttggtgtgacggtatggaaa

SEQ ID NO: 298559 - DNA, 814 bp, Unknown
  Bacterial polypeptide expressing nucleotide sequence isolated from the Sargasso Sea
tgaaataaccccaagaaattttatttttagagtcagggagtttgaacagatggaaatggaattttttgtagatccaggatctgatgaagattggcataaatattgggttgaatcaagacttgaatggtggataaaacaaggggtagataaaaaaaggttaaaacttgaaaaagttagtaaggatgaactatctcattactcaaaggcaactgtagatattatgtataaatttccacatggtgatgaggaattggaagggatagcaaatagaactgattttgatttaggatcacacacaaaaaatcagaaagaatttaaaatttcgtctaaagttcttgataataaaaattctactactaaattagcaattcaagacatggaaaccaaaaaatgggttgttccatatgttatagagccttctgcaggagtggacaggggtgttttagctttacttaatgaggcataccaatttgatgaaaaaaattcaagaatagtattagctttaaagcctcatttgtctcctattaaggctgctgttatacctttgaaaagaaacaatgaagatttagttaaagcagcaaagaacataaaaaaaagtctacaaaaaattggactaggaagagttattttagaaaattcaggtaatattggtaaaaattatcgtagacatgatgaaataggaacaccattatgtataactgtagattttgaaacattagaaaataaaagtgttaccattcgagatagggatagcatggaacaaaaaagaattaccccagagaatttaaaagattattacataaattatttttaa

SEQ ID NO: 298560 - DNA, 466 bp, Unknown
  Bacterial polypeptide expressing nucleotide sequence isolated from the Sargasso Sea
agctattcaaatattgattcaaaggagtgggaggtgccctatgtaattgaaccatcagcaggtgtagataggggtgtgctggccatattaaatgagtcgtataaagaagaaactcttgaaaatggaaaaagtagagttgtattagctttaaaacctcacctctcgccaatcaaagctgctgttataccaataaaaaagaatgattcgacaattgtcgacttttctaaacaaattaaggataacttgcaaaaactgggcctaggtagagttgttttagaaaatacaggaaatattggtaaaagttatcgtaaacacgacgaaattggtactccgatctgcataacgattgatttcgaaacccttgaaaatagaacagttactgtcagggacagagattcaatggagcaaaagagagtaaaagttgaaaatttagacgatcttttaaaaaatctgttagtaaagtagt

SEQ ID NO: 298561 - DNA, 553 bp, Unknown
  Bacterial polypeptide expressing nucleotide sequence isolated from the Sargasso Sea
ctggtttttaatttacaaaaattttggagtaaatatggttgtataattttgcaaccatatgatttagaagtaggtgctggaacatttcacccagcaacaacacttcgctctcttggacctagaccttggaaagctgcatatgttcaaccatctagaagaccaacagacggacggtacgggaaaaatcctaaccgtttacaacattattatcagtatcaagtaattattaaaccttctcctcaaaatataaaacaagtatatttaagaagtttagcagcaataggaattcaagctaaggaccacgatattagatttgtagaagatgattgggaaagtccaactttaggggcagcaggactcggttgggaagtttggtgtgatggaatggaaataacacaatttacttactttcaaaaaatgactggcatagattgcaaaccagtgtccgtagaattaacttatggattagaaagaatttgtatgttcgttcaatcaaaaaaaaatgtattcgatattgactggaatagcgaaggtataaaatatagtgatgttt

SEQ ID NO: 298562 - DNA, 682 bp, Unknown
  Bacterial polypeptide expressing nucleotide sequence isolated from the Sargasso Sea
tccaaagagggttgtttaattatgcagccatatgatactgaaaagggtgctggtacaatgagtcctcatacttttttgagggcaattggacccgaaccttggtctgttgcatatgctgagccatgtagaagacccacagacggaagatttggtgataaccctaatcgtgcacaacattattttcaatatcaagtaataattaagccttccccagatgggatccaagaaaaatatttgaaatctctggaatctcttggaatagaggctaaaaatcatgacataagatttgttgaagataattgggagtcgccaactcttggagcttggggcgtaggttgggaagtatggctagacggaatggaagttactcaattcacttattttcaacaatgcgggggagttgattgtcaaccaataccaattgaaattacatacggtttagagagaattgcaatgtttttgcaggataaagaaagtatctgggacttaaattggaatgaagatctgaaatacagcgatatttggcttgaatttgaaaaaggtcaatgttcatataatttctctgaatcaaatcctgaaaatctcagaaaattatttgagatatatcaagatgaagcaaattcattaattgaaaagaagctaacttaccccgcgcttgattatgttttaaagtgtagtcata

SEQ ID NO: 298563 - DNA, 974 bp, Unknown
  Bacterial polypeptide expressing nucleotide sequence isolated from the Sargasso Sea
tatgggaccagtagaaagcgaaaattccactgcctacctacgacccgaaactgctcagggaatctttgtcaatttcaaattcatcacagacacacagtcgcctaaattaccatttggaattgcacaaatgggcaaagcattcagaaatgaaatcacaccaaggcactttatttttcgagtacgtgagtttgaacaaatggaaattgaatttttcgttcacccaaaagaaagtgactcttggcatgagtattgggtacaagaacgttacaattggtgggttgctcaaggattgtcaaaggaaaatctcaaactggaagcacaaacaggtgacgagttagcacattatgcaaaagcaacgacagatttactctataaattcccgcatgggtatgaagagcttgagggcatagccaatcgaaccgattatgatttggcttcacacagtaaaaaccaagaagaattatctccaagtgcaaaagtaaagaaaaatacagattcaactgcacgtttggccatgcaagattcagaaacaaaagaatggtttatcccatatgtcattgaaccctccgctggtgtagatagaggcgtattggcaattttatcagaagcttattgtgaagaaacaatcgataatgacaaatcacgtacggtattaaaactaccagcacacctagctcccgtcaaaattgcggtcattcccttggcaaaaaacaaacctgaactggtttcgtatgcaaaggaaatacaacaagaactacagtccatcataaaaggattggtattattagaaaatagtggaaacataggaaaaaattacagaagacatgatgaaataggcacaccagtttgtgtcacagtcgattttgacacactaaaagagaccacatcggacaaagcactaatcgacacagtcacattacgagaccgagacacactcacgcaagaacgcatacacagaaaagatcttatatctc

SEQ ID NO: 298564 - DNA, 679 bp, Unknown
  Bacterial polypeptide expressing nucleotide sequence isolated from the Sargasso Sea
ttgaaaacaactaggggcacccttttgacagcaaaaaacatggatgaattggtctctctctgtaaaaggaggggttttgtatttcagtccggcgaggtctatggtggcttacagggtgtttatgattacggtccattgggtgttgagcttaagaacaacttaaaaaactcctggtggagcgccatggtgtttgagcgagatgatgttgaaggccttgatgcatctatattgtcaaaacaagagttgtttaagtactctgggcatgaggaaaccttttccgaccccttggttgactgtaagtcatgtaaatctaggtggcgtgaggaccttgttgttgatggaaaatgtcctggttgtggttcaaccgaattaacagagccaaggccatttaatctgatgttcaagacagctgtagggccagttcaaaacgatgaaaactttgcatatcttaggccagaaacagcgcagcatattttttcaagttttaaaaatgttcaagactccacatcaaggcaaataccatttggtatagctcaaattggtaaagcttttagaaacgaaataactccgagaaattttatatttaggttgcgagagtttgagcaaatggagttggaatattttgtcaagccgggggaagatgaggctgctctagagtatggcaaaaagaaaggttaga

SEQ ID NO: 298565 - DNA, 604 bp, Unknown
  Bacterial polypeptide expressing nucleotide sequence isolated from the Sargasso Sea
atgtctgaatcatcgctagataaaataatttcactctgtaaaaggaggggttttatatttcaaagttctgaaatatatggaggattcggagccgtatatgattatggaccactgggtgttgagttaaaaaataatatttctcaaacatggtggaaatttatgactcataatcatgagaacattcttggcttagatagcggaatattaatgcacccaaaaatatgggaagcatccgggcatgtcgatgcattcaatgacccgttagttgattgtaagcactgtaaggcccgctatcgtgctgatgaacttgtcaaaggggattttgtgaatacgaaatgggatgaaatacagtgtccaaaatgcgggacaactggcaatttgacagatccccggcaatttaatttgatgttcaaaacaaatattggacctatagaatctgatagcgacatagcttatttaaggccggaaactgctcagggtatatatgtaaattatttattagtgcagggcacaatgcgacaaaaggtgccttttggtattgctcaaattggaaaagcttttcgtaatgaaataattgcgcgaaactttatatttaggactagag

SEQ ID NO: 298566 - DNA, 688 bp, Unknown
  Bacterial polypeptide expressing nucleotide sequence isolated from the Sargasso Sea
atggtttctaaatcaaaagataaaattcttacatttcaagatacaattttaaatcttcaaaagttttggagtaaaaaaggatgtgtggttctccaaccttatgacatggaagtaggagccggcacatttcatccagcaactacattgaggtccttaggaactaaaccttggaagacagcatatgtgcagccatcaagaagacccacagatggaaggtatggagataatccaaatagacttcaacattattatcagtttcaagttcttataaaaccttcacctgaaaatattaaaaaactttacctcaatagtttgtcatctataggaattgatcattcagatcatgatattagatttgtagaagacgactgggaaagtccaacattgggtgctgctggtcttggttgggaggtatggtgtgatggcatggaaattactcaatttacttattttcaacaaatggcaggatttgagtgtaaacctgtttctgtagaaattacatatggattagaaagaatatgtatgtttatacagcaacaaaaaaatgtatacgatctgttgtggaatgatgatggtgtaaaatataaagaagtatttcatcaagctgagagagaattttcagcatataattttgaacatgcgaatgtagagtcaatttttaaaatgtttgatatgcacgagtcagaag

SEQ ID NO: 298567 - DNA, 422 bp, Unknown
  Bacterial polypeptide expressing nucleotide sequence isolated from the Sargasso Sea
tgaaaaaataacgccgactgttatagagcctgcaggaggattaactagaacattattcgctctactttgttcttgttatgatgaagacgaagttaatgatacaacaagaacactttttcgttttgattttaatattgcgccaatacaaattggaatattgccattgagtaaaaaagatgaattaattgagatttcttataatatcaaaaaaatattacaagagaactttagaactgaaattgatgttactcagtcaataggaaaaagatacagacgtcaagatgaaataggtactccttactgcattacagttgattttgattctcttgatgataattctgtgacaattagaaacagagactcaatggaacagcatagaattcctattactgacctccttggtttttttagtaagttgtaat

SEQ ID NO: 298568 - DNA, 396 bp, Unknown
  Bacterial polypeptide expressing nucleotide sequence isolated from the Sargasso Sea
tatggcctctaaaaaaaataaaaaaaaaccaaagtttcaaacctttcaaaatacaataatcaatctgcaaaagttttggagtaaacacggatgtgtagttttacaaccttatgatatggaagttggagctggaacttttcatcccgcaactactttaagatcactaggaccaaagccatggaaagcagcttatgtgcaaccttcaagaagacctagtgatggaagatatggagataatccaaatagacttcaacattattaccaatttcaagttataataaaaccctctccactaaatattaaaaaactttatttaaatagtttgtcagcaattggaattaatcataaagaccatgatattagatttgttgaagatgattgggaaagccctactct

SEQ ID NO: 298569 - DNA, 712 bp, Unknown
  Bacterial polypeptide expressing nucleotide sequence isolated from the Sargasso Sea
tatggtctctaaaacaaaaaaaaaaactttatcttttcaggatacaatctttaatttgcaaaagtactggtcaaaaaaaggttgcgtaatattacaaccgtacgatctagaggtaggagctggcacatttcatccagcaacaactctaagatctcttggtccaaaaccttggaaaactgcatatgttcaaccatcacgtaggccgactgatggaagatatggcgataaccccaataggttacaacattactatcaattccaagttttaattaaaccttcaccaaaagaaataaaaaagatgtatttaaatagcttgtcatcaataggtattaatcatgaggaacacgatataaggtttgttgaagatgactgggaaagccctacattaggagcggcaggtcttggatgggaagtttggtgtgatggaatggaagttacacaatttacctatttccaacaaatagctggagttgaatgtaaacctgtatctgttgaaattacatatggattagagagattgtgcatgtttattcaaaacaaaaaaagtgtttttgacttaatttggaatgatgaaggaattacttacaaagatgttttttatcagtcagagaaagaattttcagcatataattttgaatacgccaatactgataatttatttaaaatatttgaaatgcttgaagaagaaacaaaattattagttgaaaaaaag

SEQ ID NO: 298570 - DNA, 467 bp, Unknown
  Bacterial polypeptide expressing nucleotide sequence isolated from the Sargasso Sea
tatggcttctaaaaataaaaaaagaattaaaaaaaataattttcaaacttttcaagatacaattttaaatcttcaaaaatactggagcaaacaaggatgtgttattttgcaaccttatgatatggaagttggcgctggaacttttcatcctgcaactactcttagatcgctcggaccaaggccgtggaaaacagcatatgttcaaccatccagaagacctactgacggaagatacggagaaaatcctaatcgtcttcaacattattaccagtttcaagttttaataaaaccttcgccaaaaaatattaaaaagctttatttaaatagtttaagatctatagggattaatcatttagatcatgatattcgatttgtggaagatgattgggaaagcccaacattaggtgcttccggattaggctgggaagtgtggtgtgatggtatggaaattacacaatttacttatt

SEQ ID NO: 298571 - DNA, 523 bp, Unknown
  Bacterial polypeptide expressing nucleotide sequence isolated from the Sargasso Sea
atggtttctaaaaaaaaaacaaaaaatccaaaaacatttatttcttttcaggatacaattttaaatcttcaaaagtactggtcaaaaaaaggttgcgttattttacaaccttatgatttagaagttggagcaggaacatttcacccagcaacaactctaagatcattaggttctaaaccatggaaaacagcttacgttcaaccatcaagaagaccaacagatggaaggtatggagaaaatcctaatcgtttgcaacactattatcaatttcaagttttaataaaaccttcaccaaaagatattaaaaaaatgtatcttaatagcctttcatcagtaggtattaaatacgaagatcacgatatcagatttgtagaggatgattgggaaagtccaaccttaggtgccgctggtcttggatgggaagtatggtgtgatggtatggaagttactcaatttacttattttcaacaaatggcaggtatggaatgcaatccaatatctgttgaaattacttatggtttag

SEQ ID NO: 298572 - DNA, 855 bp, Unknown
  Bacterial polypeptide expressing nucleotide sequence isolated from the Sargasso Sea
tttgggtgttgagttaaaaaacaacctaaaaaactcttggtggagctcaatggtttatgaaagagatgatatagaggggcttgatgcatcgatactgtccaaacaagagcttttcaagtattcaggtcacgaagaaactttttcagacccattggtggattgcaggtcatgtaaatctaggtggagagaagatttagttaaagatggaaaatgtctgtcgtgcggctcaacagacctaacggaggcaagagcttttaatttgatgtttagaacacctatgggcccggttgaaaacgaagaaggttttgcatatctaaggcccgagacagctcaacatatttttacaagctttaaaaacgttcaagactcgacatctagacagatacccttcggaatagctcaaattggtaaagcattcagaaatgaaatcaatccgagaaattttattttcaggttgagagagtttgagcaaatggagttggaatattttgtaaggcctggtgacgatgaggccgcactagattactggagagatcaaagattaaggtggtgggaagaccaaggtatcgagccttcaagtcttgagatttatgatgtccccgaatctgacctggcacattattctaaaagaacacttgatattatgtatcgctttcctcatgggctagaagagctggaaggtattgcgaatagaacagactttgatcttggttctcacacaaaaaaccaacaggatctcgatttggtttctgaaacaaagaagaatgatgagtcaactatgaggctggctgttcaagacattgaggccaaaaaatggtacgtcccatatgtaatagagccctctgctggagtaga

SEQ ID NO: 298573 - DNA, 888 bp, Unknown
  Bacterial polypeptide expressing nucleotide sequence isolated from the Sargasso Sea
tcttttgtgtatttgagacctgaaacatgtcagcaaatttttacaaattttaaaaatatattagattcaactagtagaacaataccttttggtgtggctcaaattggtaaagcttttagaaatgaaattactccaagaaattttatatttagagtaagagaatttgagcaaatggaattagaattttttgtagagccaggaaaggatgaaaagtggcatgaatattgggttaatcaaagattaaaatggtggatagaccaaggtataagtaaagataaattaaaaaaatatgatgtaggtttaaaagaattgtcacattattcaaaaaatactgttgatataatgtatgattttcctcatggtgaggaggagttagaaggaattgcaaatagaactgattttgatttaggttcgcatacaaaaaatcaacaagattttaatatatattcaaaggtaaataaaaacgaacattctactacaaaattagcaatacaaaatttagaaaaaaagacatggtttataccttatgttattgaaccatctgcaggagttgataggggaattttagctgtattaaacgaggcatataaagaagaaaaaattgacgaaaataatacaagaatagtactttctttaaaaccacatcttgcaccaattaaagctgcagtaattccattaaaaaaaaataatgaaaaaatagttgattttgcaaaaaaaattaaaaataatcttcaaaaattaggtttaggtcgagtaatgttagaaaattctggtaacattggaaaaaattatagaagacatgatgaaataggaactccaatttgcattacggtcgattttgagactttagatcataatacagtgactgtaagagatcgtgatagtatg

SEQ ID NO: 298574 - DNA, 475 bp, Unknown
  Bacterial polypeptide expressing nucleotide sequence isolated from the Sargasso Sea
gatgccaacaaaaaaaaaaattaaaaaaaaaaataattctctctcttttcaagatataataatcaatcttcaaaaattttggggaagaaatggctgtgtaattttacaaccatacgatttagaagttggggccggtacttttcatcctgcaaccacgttaagatctctaggccctaagccatggaaagctgcatacgttcagccttcaagaagaccaacagatggaaggtatggtgaaaatccgaatcgattacaacattattatcagtatcaagttataataaaaccctctccaaaaaatattaaacaactgtatttaaaaagtttatcatctataggtatagatataaaaaatcatgatattcgttttgttgaagatgattgggaaagtccaactttaggtgcagcaggattaggctgggaagtttggtgtgatggaatggagataactcaatttacttattttcaacaaatg

SEQ ID NO: 298575 - DNA, 730 bp, Unknown
  Bacterial polypeptide expressing nucleotide sequence isolated from the Sargasso Sea
tttaagatcactaggaccaaattcttggaaagcagcctatgtacaatcttcaagaagacctacagacggcaggtatggagaaaatccaaatcgactacaacattattatcagtaccaagttataatcaaaccttctcctgaaaatatcaaacaaatctatttaaaaagtttatcagctattggaatagatgtaaaaaatcatgatattagatttgttgaggatgattgggaaagcccgactctaggtgcagtgggattaggctgggaagtatggtgcgatggtatggagattactcaatttacatatttccagcaaatgactggaatagaatgtaaaccagttcctgtagaattaacttatggtttggagagattgtgcatgtttgttcagggtaaaaaaaatgtatttgatttagattggaataatgaaggcgttaagtatagagaagtatttttacaagcagaaaaagaattttctgcttataattttgaatttgctaacactgaaactttgttaaaaaattttgaagcttgtgaaacagaatgtaaatcattgttagataaaaaactttctttaccagcttatgaccaatgcttgaaagctagccacttgtttaatttacttgatgctaggggagttattggtgttgctgagagaactggttatataaatagaataagagaactttcaaaagggtgtggggcactttggttaagcactcaaatttaa

SEQ ID NO: 298576 - DNA, 280 bp, Unknown
  Bacterial polypeptide expressing nucleotide sequence isolated from the Sargasso Sea
tatggtttctaaaaataaaaataaaaacaaaaaaaaacaaaaattaaaatttcaaacttttcaagaaattattttaaatcttcaaaaattttggagtaaacaagggtgtattattcttcagccgtacgacatggaagttggagctggtacgttccatcctgctacaactcttagatcgttgggtacccgaccttggaaagccgcttatgttcagccatcaagaagaccaaccgatggtagatatggagaaaatcctaatagacttcaacattattatcag

SEQ ID NO: 298577 - DNA, 844 bp, Unknown
  Bacterial polypeptide expressing nucleotide sequence isolated from the Sargasso Sea
ttgaaaaagatacgagggtttttcttggcagcaaaaaacatggaagaattagtgtctctctgtaaaaggagaggttttgtatttcagtcaggagaggcatatggcggccttcagggcgtttatgattatgggcctttgggcgttgagctaaaaaacaacctaaaaaactcttggtggagctcaatggtttatgaaagagatgacatagaggggcttgatgcatccatattatccaaacaagagcttttcaagtattcagggcacgaagaaactttttcagacccattggtggattgcaggtcgtgtaaatctaggtggagagaagatttagttaaagatggaaaatgtctctcttgcggctcaacagacctaacagaggcaagagcttttaatttgatgtttagaacacctatgggcccagttgaaaacgaagagagctttgcttatcttaggcctgaaacagctcaacatatttttacaagctttaaaaacgttcaagactcgacatctagacagataccttttggtatagctcaaattggtaaagcattcagaaatgaaatcaatccgagaaattttattttcaggttgagagagtttgagcaaatggagttggagtattttgtaaggccgggcgaagatgaggccgcactagattactggagagaccaaagattaaggtggtgggaagaccaaggtatcgagccttccaatcttgagatttacgatgttcctgaatctgacctggcacattattctaaaagaacgcttgatattatgtatcgctttcctcacggtctagaagagctagaaggcattgcgaatagaacagactttgatcttg

SEQ ID NO: 298578 - DNA, 868 bp, Unknown
  Bacterial polypeptide expressing nucleotide sequence isolated from the Sargasso Sea
tggttcagaaaacttaactgatcctaggccttttaatcttatgttcaaaacaacaattggacctgtcgatgatggaagtagttttgcatatttaagaccagaaaccgctcaacaaatttttacaaattttaagaatgtagttgattcaacatcaagaacattaccttttggaattgctcaaattggaaaggctttcagaaatgaaataactccaagaaattttatttttagagtaagggaatttgaacaaatggaattagaattctttgtagagcctggtagtgatgaggaatggcatcaaaaatgggttgatgaaagagtcagttggtgggaacgacaaggagtggataaaagtaaattagaaattattgatgtcgataaggaagatttatcgcattattcaaaaaaaacggttgatataatgtatgagtttcctcatgggcttgaggaattagaaggtatcgcaaatagaactgattttgatataggatcacatactaaaaatcagaaagattttgaaataaatgctgatgttataaaaaatgatgactcagtaacaaaattagcaattcaagataagattaataatacatggactataccttatgtaattgagccatcggcaggagttgatagaggatttttagctgtattaaacgaggcatataaaattgagaagctagaaaatggtaaagagagaacagttttatcgctaaaatcccatttgtcgcctataaaagccgcggttattcctttaaaaagaaataatcaagatttagttaacaaagcagtagaattgaaaaaacaattgcagtcaatcggcttaggaagagtagtgcttgataatgcaggcaatattggtaaaagc

SEQ ID NO: 298579 - DNA, 814 bp, Unknown
  Bacterial polypeptide expressing nucleotide sequence isolated from the Sargasso Sea
cgaaaacattgttggggttgatgcggctatttttatgcaccccaaaacttggaaagcatcgggacatgttgatgcttttaacgatccattaatagacaataaagattcaaagaaaaggtatagggcagatgttttacttgaagactatatagaaaaaatcagaattaaaattgaaaaagaggttttaaaggggaggaagagatttggtgatgattttaatgaagatgagtttagacgaaccaacccaaatgttctcagaaatgctaagaaaatattagatattgaatctgacatgaagcgttttcttgaagaaaacaatcttgaagcaatcaaaaacctaattatagatttaggaattaattgtcctgtttctggatccaaaaattggacagatgttaggcaatttaatttaatgttttcaactgaactcggttcagtatctggtgattcatcaaaaatatacttgaggccagaaacagcacaaggaatatttgtgaattttttaaatgttcagaaatcaggaaggatgaaaattccttttggtattgctcaaattggaaaagcatttagaaatgaaatagttgcccgtcagtttatttttagaatgagggagtttgaacaaatggaaatgcagttttttgtcaaaccaggtgaagagatgaagtggtatgattactggaaaaaaacaagaatagaatggcacaattctcttggattgggcaaagataaatatcgttttcatgatcacttgaaattagcacattatgccaatgcggccaccgatattgagtttgatttcccgattggatttaaa

SEQ ID NO: 298580 - DNA, 694 bp, Unknown
  Bacterial polypeptide expressing nucleotide sequence isolated from the Sargasso Sea
tatgttcagccttcaagaagaccaaccgatggaagatatggagacaaccctaataggcttcagcattattatcaatttcaagttataattaaaccttctccatcaaatattaaaaaactatacttaaatagtttatcagtaattggtattgatcataaaaatcatgatatacgatttgttgaagatgactgggaaagtccaactttaggtgctgctgggcttggttgggaagtgtggtgtgatggaatggaaataactcaatttacatattttcaacaaatggctgggtttgaatgcaaaccagtttcagtagaaataacatatggtttggagaggatttgtatgtttactcaacaaaaaaagaatgtttatgatttaatttggaataatgaaaatgtcgagtaccgagaagtttttcaccaatctgaaaaggaattttcagcatataattttgaacacgctaatacaggaaatctttttaagatgtttgatatgtttgaaagcgaagcaaagtcattagttgaaaaaaaaatatcattaccagcttatgaccaatgtttaaaagcaagtcatatatttaatatattagattcgcgcggtgcaataagtgttgctcaaagagcagggtatattggaagaataagagaaattacaaagtcagttgctactatctgggttgatacccaaaaataaa

SEQ ID NO: 298581 - DNA, 388 bp, Unknown
  Bacterial polypeptide expressing nucleotide sequence isolated from the Sargasso Sea
gatgccaaaaaaaataaaaaaaaaagaaaaaaaatcaataacatttcaggatctaatttttaatttacaaaaattttggggaaaatatggttgtgtaattttacaaccttatgatttagaggtaggagctggaacatttcatccagcaacaactctaagatcattaggacccaaatcatggaaggcagcatatgttcaaccttctagaagaccaacagatggaagatatggaaaaaatccaaatcgtttacagcattactatcaatatcaagttattataaaaccttctcctcaaaatataaaacaggtatatttaaagagtttagcggctatagggattcaatcaaaagatcatgacattagatttgtagaagacgattgggagaag

SEQ ID NO: 298582 - DNA, 285 bp, Unknown
  Bacterial polypeptide expressing nucleotide sequence isolated from the Sargasso Sea
tatggcctctaaaaaaaataaaaaaaaaccaaagtttcaaacttttcaagacacaatttttgatttacaaaaattttggagtaaacacggttgtgtaattttacaaccttatgatatggaagttggagctgggacatttcacccagctactacgttaagatctcttggacctaaaccatggaaagctgcttatgttcaaccttcaagaagaccgaccgacggtaggtatggtgataaccctaatagacttcagcattattatcaattccaagtaataattaaacc

SEQ ID NO: 298583 - DNA, 598 bp, Unknown
  Bacterial polypeptide expressing nucleotide sequence isolated from the Sargasso Sea
tatgtttaaaactcaaattggagcgacagagtccagctcaacggatcttttcttaagacccgaaacggctcagggaatatttttaaattatttgaacgtacaaaaaactgctaggatgaaaataccttttggtattgctcaaattggtaaagcatttagaaatgaaattgtagctagacaatttatttttaggatgagagaatttgaacaaatggaaatgcaattttttattaaaccagggacccaaaaggactggtacaagcattggaaaaaaacaagattagattggcacctttcattaggaattgataagagcttttttaggtttcatgatcatgaaaagcttgcacattatgctgatgctgcttgtgatattgaatttaattttccatttggctttaaagagcttgaaggtattcattccagaacggactttgatttatctaatcatgaaaaatattcaaataagcaaataaaatattttgaccctacagaaaataaaaaatatacaccatacgttttagaaacttcaataggcgttgatagaatgtttttagctgtattctcttcgtcactagtttctgaaaaaattgatgac

SEQ ID NO: 298584 - DNA, 826 bp, Unknown
  Bacterial polypeptide expressing nucleotide sequence isolated from the Sargasso Sea
tttaatcttcagaaatttttggagtaaaaaaggatgcattattcttcagccgtatgatatggaagttggggcaggaacttttcatccagctactactttaagatcacttggaactaaaccatggaaagcagcttatgtacagccatcaagaagaccaacagatggaagatatggagacaatccaaacaggttacaacactattatcaatttcaggttttaattaaaccttcacctgaaaatataaaaaaaatttatctaaatagtttatctactataggaatagatcataatgatcatgatataaggtttgttgaagatgactgggaaagtccaacattaggtgctgcaggattgggatgggaagtatggtgtgatggaatggaaattactcaattcacctattttcaacaaatggctggatttgattgtaaacctgtatcagtagaaatcacttatggtttagaaagaatttgtatgtttactcaaaaagaaaaaaatgtttatgatttattgtggaatgatgaaggtgtaaaataccacgaagtttttcatcaagctgaaaaagaattttcagcatataattttgaacatgcgaatgtagaaacacttttgaaaatgtttgaaatgcatgagtccgaggcaaaaactttggtagaaaaaaaaatttctttaccagcatatgatcaatgtttaaaggctagtcatgtgtttaatattttagatgcgagaggtgtaatcagtgttgcacaaagagctgattatattgccagaataagagatattacaaaatctgtagcaggcgtttggttagatagtcaaaaataa

SEQ ID NO: 298585 - DNA, 855 bp, Unknown
  Bacterial polypeptide expressing nucleotide sequence isolated from the Sargasso Sea
ttatttccaccctccagcgtttctgggcggatcagggatgcctggtgctgcagccttacgacaccgaaaaaggggccggcaccatgagcccccacacggtgttgcgtgccattggcccggagccctgggctgtggcctatgccgagccctgccgccggcctactgacggccgctacggcgataaccccaaccgggcccagcactatttccagttccaggtgttgatcaagccatcacccgatggcatccaggagacctacctgcgctccctggaagcactgggcatcaaggcggctgatcacgacatccgctttgttgaggacaactgggaatcccccaccctcggggcttggggggtgggctgggaggtgtggctcgatggtatggaggtgacccagttcacctacttccagcagtgcggcggcatcgattgcaagcccgtatcgattgagatcacctatggcctcgagcgtttggccatgtatctccaagacgtggagagcctgtgggagttgcagtgggatagcaagcgcaactacggcgatatctggcttccatttgagaaaggccagtgcacctacaacttcgaagcatccaacccggagcgcttgttcaagctctttgagatctatgaggcggaagctaaagacctctgcgagcagggcctggcggcacctgcccttgattgggtgctcaagtgcagccacaccttcaacctgctggaggcacgcggggtgatttcggtgaccgagcgcaccgccaccattggccggattcgcaacttggcccggcaagtggctgagtcgtggctggccgaacgcgaagccattggtttccccttgctgaagggttaag

SEQ ID NO: 298586 - DNA, 592 bp, Unknown
  Bacterial polypeptide expressing nucleotide sequence isolated from the Sargasso Sea
ttatctcattattcaaaagcgacctctgatatagaatacttatttccatggggatggggcgaattacaaggtatagcaaatagaaccgattttgatttaaaagcccatacaactcatagcggggtaagactagactattttgaccaagaaaacaatgaacattttactccatatgttattgagcctgcagtcggtgtggatagaatatttcttactcttttaattgatgcctatagggaagaagaaattaatgatgggaaagaaaaacgtacagttttaaagttagcaccacaaattgcaccaattcagattgctatacttcccctatctaaaaatgaaaaattagtaccaaaagcaaaagaaatattcactttactcaatcaaagctacagttgtgaatatgatgatgctcaaagtataggtaggcgatatcgaagacaagatgaaattggtaccccgttatgtataactgttgatttcgatacaattgaaaaggacaaccaagttactattagagatcgagatactatggaacaaattagagttcccattgaaaaattacaagatcatatacaaaatacattactttaaa

SEQ ID NO: 298587 - DNA, 808 bp, Unknown
  Bacterial polypeptide expressing nucleotide sequence isolated from the Sargasso Sea
atggtctctaaaataaaaaaaaaaactttatcttttcaagatacaatctttaatttgcaaaagttctggtctaaaaaaggttgtgtaatattacagccgtacgatctagaggtaggagctgggacattccatccagcaaccactctaagatcacttggcccaaaaccatggaaaaccgcatatgttcaaccatcacgcagacccactgatggaagatatggtgataatcccaatagattgcaacattactatcaatttcaagttttaattaaaccttcaccaaaagaaataaaaaagatgtatttaaatagtttgtcatcaataggcattaatcatgaggaacacgatataagatttgttgaagatgactgggaaagtcctacattaggagcggcaggtcttggatgggaagtttggtgtgatggtatggaagttacacagtttacctatttccaacaaatggcaggagttgaatgtaaacctgtttctgttgaaattacatatggactggagagattgtgcatgtttattcaaaataaaaaaagtgtttttgacttaatatggaatgatgaaggaattacttacaaagatgtttttcatcagtcagagaaagaattttcagcatataattttgaatatgccaatactgataatttatttaaaatatttgaaatgcttgaagaagaaacaaaattattagttgaaaaaaaaatttctcttccagcttatgatcaatgtttaaaatgcagtcatgtcttcaatattttagatgcaagaggtgtaattagtgtagcacaaaagggctgaa

SEQ ID NO: 298588 - DNA, 796 bp, Unknown
  Bacterial polypeptide expressing nucleotide sequence isolated from the Sargasso Sea
actgcactaagatcgttgggtcttaagccatgggcggtagcctatgtccagccttgtagaaggccaaccgatggtcgttatggagaaaatcccaaccgtttacagcactattatcaatttcaggtattaatgaaacccagtcctccggattttcaaaacctgtatttgggatcattggatgcaattggtattgatcgtcaattacacgatataaggtttgttgaagatgattgggagagtccaacgcttggagcatggggcttaggttgggaagtttggtgtgatggtatggaagtaagccaatttacatattttcaacaggttgggggtcatgactgcaatccagtttctggtgaattgacatacggcttagaaagactggctatgtatgtactaggtgtcgattacgtaatggatatgccatttaatgatcctagcgctagtatttcgcttaaataccgagatatttttcagcaaaccgaagaagaatattcaagatggaattttgatgttgctaataccgaaactcttttccggcaatttgatgaagctgagcagggttgtagagaaatattatcgcaagatgcgttagaccctaaatcaggaaaaaatattactatggttcatccagcctacgaccagtgtattaaagcgtctcatattttcaatattcttgacgctcgtggtgtcatatccgttacagagcggcaagcctatatcggccggattagagggttggcaaaacagtgcgccgatgcttttgttttaaccgccgccgggggaaacgttaagtgaa

SEQ ID NO: 298589 - DNA, 700 bp, Unknown
  Bacterial polypeptide expressing nucleotide sequence isolated from the Sargasso Sea
atggcctctaagaaaaataaaaaaaaaccaaaatttcaaactttccaagatacaattattaatttacaaaagttttggagtaaaaatggatgtgtaatattacaaccttatgatatggaagttggagctggaacatttcacccagctactactttaagatcacttgggcctaagtcatggaaagcagcttacgtccaaccttcacgaagacctacagatggaagatatggagataacccaaatagacttcagcattattatcaatttcaagttataattaaaccttctccattaaatattaaaaaactttatttaaatagtttgtcagtaataggaattaatcataaagaccatgatattagatttgttgaagatgactgggaaagtccaactctaggagctgcaggtcttggatgggaagtatggtgtgatggaatggaaatatctcaattcacatattttcaacaaatggcaggttttgaatgcaaacctgtttcagtagaaataacttatggtcttgagagaatttgcatgtttacccaacagaaaaaaaacgtttatgatttagtttggaataatgaaggtattgagtacagagaagtttttcatcaatcagaaaaagagttttcagcttataacttcgagcatgctaatacagaaaacttatttaagatatttgatatgcatgagaatgaggcaa

SEQ ID NO: 298590 - DNA, 594 bp, Unknown
  Bacterial polypeptide expressing nucleotide sequence isolated from the Sargasso Sea
gatgccaaaaaaaaataaaaaaaaaaataaagctttatcatttcaaaatttaatttttaatttacaaaaattttgggataaacaagggtgtattattttgcaaccttatgacttagaggttggtgcgggtacttttcatccagcaactactttgcgatctttaggaacaaaaccttggaaggcagcttacgttcaaccatcaagaagaccaacagatggaagatatggaaaaaatccaaacagattacaacattattatcaatatcaggtaattatcaaaccatctccaaaagatattaaacaactttatttaaaaagcttagttgcaattggaatagactctaaagatcacgatataagatttgtcgaagatgattgggagagcccgactttaggagcagcaggtttaggttgggaagtatggtgtgatgggatggaaataactcaatttacctattttcaaaagatgacaggaattgaatgtaaaccaatatcagttgagttaacatatggtttagagagaatttgtatgttcgtacaagaaaaaaaaaatgtatttgatatcgattggaatgatgacggagtaaaatataa

SEQ ID NO: 298591 - DNA, 957 bp, Unknown
  Bacterial polypeptide expressing nucleotide sequence isolated from the Sargasso Sea
tgtatatgattatggccctcttggaattgaactaaaaaataatatttcccaactctggtggaaagagatgacgcagcataatgaaaatattgtgggacttgatagtggtatattaatgcaccctaaagtctgggaggcttcggggcatattggagcatttaatgaccctttagtggattgtaaacagtgtaaatctaggtacagagctgatgaattctcagatgactttaattcccttgattggagcaaaatacagtgtccaaattgtggatcaaaagattgttttacagaaccaagacaattcaatttaatgtttaaaacaaacgtaggaccagtggaagattctggaaccgaagcatatttaaggcctgaaactgctcaaggtatatatgtaaactacctgcttgtccaaggtgccatgagattaaaaattccttttggaattgcacaacttgggaaagcattcagaaatgaaattgttgctcggaattttatatttcgtacaagagaattcgagcaaatggaaatgcaatattttgtgaaaccaggaactgacgatgacgcgatgcatgaatggaaagaaagtcgttttcaattttacacgcataatcttggaattactaaaaccaaacttagatttcaccagcatggagctaatgagctagctcattatgctaaagaggcatgggacattgaatatgaatttccatttggttggtcagaaattgaaggagttcataatagaactgattatgaccttgttcgtcatgaggaattttcaggaaaaaaactttcctattttgaccaattaaataatgaacgatttttaccatatattgttgaaacatctgctggattgaacaggatgcttttgaccgtcttagcagactcttactgggaggatgaagaaaataatcgcatagtcatgaaactacatccaagggctgcccctataaa

SEQ ID NO: 298592 - DNA, 553 bp, Unknown
  Bacterial polypeptide expressing nucleotide sequence isolated from the Sargasso Sea
tatggtctctaaaaaattaaaaaaaaaacaaaaaaaacaaaaaaaacaaaagtttcaaacttttcaggatacaattttaaatttacaaaaattctggagcaaaaatggatgtataattttacaaccttatgatattgaagttggagcaggaacttttcatccagcaacaactttaagatctctaggagcaaaaccttggaaagctgcttatgttcagccgtctagaagaccgacagatggtagatatggagacaaccctaacagacttcagcattattatcaatttcaagttataataaaaccttccccatcaaatattaaaaaactttatttaaatagtttatcagtgataggtattaatcctaaaaatcatgatatcagatttgttgaagacgattgggaaagtccaactttaggtgcagctggacttggatgggaagtttggtgtgatggtatggaaattacacagtttacctattttcaacaaatggctggtttcgaatgcaaacctgtttcggtagaaataacttatggtttagaaagaatttgtatg

SEQ ID NO: 298593 - DNA, 889 bp, Unknown
  Bacterial polypeptide expressing nucleotide sequence isolated from the Sargasso Sea
aaaacagcggccagcttaaacgtcagggcgcaaatggatgatgcgctgctggaagaagtgacttccttggtcgagtggccggtggtgctggtaggcagctttgaagaaagcttcctgcaggtgccggcagagccgttgatttctaccatgaaagacaaccagaagtattttccgctgctggataacaacggcaagctgcagaacaagtttatctttgtcgccaacattgccagcaaagatccgcagcagattatcagcgggaacgaaaaagtggtgcggccgcgtttatcggatgcccagttcttttttaacaccgaccgcaagcaaaagctggccgataggctggatagcttgaaaacggtattgttccagcagcagctgggcacgctggctgaaaagtcagagcgtatcgccaaagtggcggcttttgttgcagctaagattggcgctgatgccgccgccgctgagcgggccggtttgttatcaaaaactgacctgatgaccaatatggttggcgagttcccggaagttcagggcattatgggcatgcactacgcacggctggatggcgaaagcgaagcggtagcactggcactgaacgagcagtacatgccgcgttttgccggtgatgagctgccaagccggcttgaaggcgccgcggtcgctatagccgataaactggatacgctggtcggtattttcggtatcggtcaggcgccaaaaggtgataaagacccgtttgcactgcgccgtgctgccataggtgcactgcgtattatggtcgacaaacaactgccgctggatttggtggacgttattgcctttagccagcaaacctttggcagcaagctgagcaatgccaaagtggccgaagaagtactggagttta

SEQ ID NO: 298594 - DNA, 727 bp, Unknown
  Bacterial polypeptide expressing nucleotide sequence isolated from the Sargasso Sea
tatggtctctaaaaaaaaaattaaaaaagaaccattaacatttcaagaaacaatacttgctcttcaaaaatattggtctaaacaaggatgcgttatacttcagccttatgatttggaagtgggagctggaacttttcatccagctacaacacttagatcattaggtgataaaccatggaagacagcttatgtacaaccatctagaaggccaactgatggacgttatggtgataatccgaacagacttcaacattattatcaatttcaagtattaataaagccatcaccaagtaatataaaaaaattatatttgaacagtattgctacgataggtattgattatcatgaacatgatattagatttgttgaagatgattgggagagtccaaccttaggagccgcgggactgggatgggaagtatggtgtgatggtatggagattactcaatttacttattttcaacagatggcaggtatagaatgcaagcctgtttcggtagaaatcacttatggtcttgaaagactttgcatgtttattcaaaataaaaaaaatgtttttgatttaaaatggaataatgaagatgtttcctataaagaaatattttatcaagccgaaaaagaattttctgcatataattttgaatatgccaatacagatagtctatttaaaatttttgatatgattcagcaagaagctaaatctttaatagaaaaaaaagtatctcta

SEQ ID NO: 298595 - DNA, 904 bp, Unknown
  Bacterial polypeptide expressing nucleotide sequence isolated from the Sargasso Sea
cctcttgtagattgtaagtcttgtaaatctagatggcgagcagatcaattactagaaaataataaatgcccaaactgtaaatcagaggatctaactgatccaagaccgtttaatttaatgtttaagactgcaattggaccagttgatgatggttcttcttttgtatatttaaggccagaaacatgtcagcaaatttatactaatttcaaaaatattttagatgctacttctaggactgttccatttggaattgctcaaatgggaaaagcatttagaaatgaaataacacctcgtaattttatttttagagtaagagaatttgaacaaatggaattagaattttttgtagtacctggaacagatgataaatggcatgaatattggatagataaaagaataaattggtgggtagatcaaggaattaataaagaaaatttaaaaacaattgaagttgaaaaaaaagaacttgctcattattcaaaaagaacagttgatattaattatttatttcctcacggtgaagaggagctcgaaggtattgcaaatagaactgattttgacttagggtctcatactaaaaatcaaaatgaatttgaaattgactcagaagtcatgaaaaattcttcatctacaacaaaattggctgttcaaaatctagaagaaaagaaatggtatatcccctatgtgattgagccttcagctggtgttgataggggtgttcttgctttactaaatgaagcttataaggaagaaaatactgataaagataataaaagaattcttttatctctaaaaccgcatctttctccaattaaagctgctgttattcctcttaaaaaaaataacgacgaattagttaatttgtctaaagaaattaaatcaaatcttcaaaacttggattagg

SEQ ID NO: 298596 - DNA, 832 bp, Unknown
  Bacterial polypeptide expressing nucleotide sequence isolated from the Sargasso Sea
gagaccagcgttggccctatcgtagatgattcttctgttgcatatttacgaccagagaccgcacaacaaatttatatcaactttaaaaatgtcatcgatagtacatctagatcattaccgtttggcattgctcaaattggaaagtcatttagaaatgaaattacaccaaggaactttatctttagagttcgtgagtttgaacaaatggagctggaatttttcgtcactcctggtgaagatgaaaaatggcacaaactatgggttgatgagagagttaaatggtgggttgatcaagggataccaaaagataagcttgaacttcttactgtaactggcgacgacttagcacattattctaaggaaactgttgatatcatgtatcaatttccacatggctcagaagagctcgagggtattgcaaatagaacagattttgaccttggttctcatactaaaaatcaaaaagaattaaacataaatgcaaatgttatggaaaataaagactctaatacacgcttagccatacaagatgaaaataatgaatggatagttccatacgtaattgagccttcagcaggtgtagacaggggagttttagcaattattaacgaggcttttactattgagactcttccagataataaaaaaagaactgtattaaaattaaaaaaacatctctcgccaattaaagctgcagttatacctctaaagagaaacaatgaggatcttgtgaaacttgctcataacataaagaaatcattgcaaaagcatcaaatcgggagagtagtagttgagaacacaggaaacattggtaaaagttatagaaaacacg

SEQ ID NO: 298597 - DNA, 205 bp, Unknown
  Bacterial polypeptide expressing nucleotide sequence isolated from the Sargasso Sea
attgtcgcttgaaaaaccattacctctacccgcctatgagcaagtgatgaaagcctcgcatgccttcaacctgcttgatgcacgccacgccatttcagtgactgaacgtcagcgttatatcctgcgcgttcgtaccatggctaaagccgttgctgaatcctattatcaggcacgcgaagcgcttggcttcccaatgtgtaagtag

SEQ ID NO: 298598 - DNA, 394 bp, Unknown
  Bacterial polypeptide expressing nucleotide sequence isolated from the Sargasso Sea
catgaattttgaaaacttactcatcgagttaggcactgaagaactgccgccaaaggcgctgcgtaaactggcagagtctttcttagcgaactttaccgaagaattaaccaaagccgatttagcttttaaatcagctatttggtatgcagcaccccgtcgcctagccattaatgtgactgaactagcgattgctcaagcggacaaaatcgttgaaaaacgcggccccgctgtcagctcagcctttgatgccgaaggtaaaccaacgaaagccgcagaaggctgggcacgtggtaacggtattaccgttgacccagctgaacgtttggtggacgacaaaggcgaatggctggtttataacgccaaagtagaaggcgttgaaacaaaaagcttaatc

SEQ ID NO: 298599 - DNA, 280 bp, Unknown
  Bacterial polypeptide expressing nucleotide sequence isolated from the Sargasso Sea
aatggtctatgaattcccggaacttcaagggctcatgggtcggtattatgccgctgccgccggattgcccgatgaggttgcgcaggcctgcgaacagcattattcgccccttggtccttcggacgatgtgccggagggcgcggtcgcgcgcaccgtagctttggccgataaactggacacattgaccggcttttgggcgatcgacgagaaacccaccggatcaaaagacccctatgcgttgcgccgcgccgcgcttggcgtcattcgcatcattctgacc

SEQ ID NO: 298600 - DNA, 790 bp, Unknown
  Bacterial polypeptide expressing nucleotide sequence isolated from the Sargasso Sea
gatgcagggtctgtatgactatggtccattaggtgtagagctcaaaaacaaccttaaggatgcgtggtggtcgtcaatggtttacgatagggatgatgttgagggcttggacgcatcaatactaagcaagccctcagtcttaaaatattctggtcatgaggagacctttacagaccctttagtagactgcaaaaagtgtaaaggccgctggagagctgaccatatcaaaaataaagcatgccctggttgcgggtcgacagacctgacagagcctcggccgtttaatttaatgtttaaaaccagtgttgggccagttgatgacggcaaaagtttcgcttatcttaggccagaaaccgcccaacagatttttgttaacttcaaaaacgtgctcgactcaacctctaagtcaatgccttttggtatagctcaaattggaaaggcttttaggaacgaggtaaccccaagaaattttatctttaggaccagagagtttgagcagatggagcttgagttctttgttgagagaggcacagacgagaagtggcatgattattgggtaaaaaaacgacttagctggtggtgcgagcagggcataccagaaaatcgtttaaagctatttgatgtcccaaaagaggacctttctcattactcgaaaaagactgtggatataatgtatgcctttccacacggcgaagaagagcttgaggggattgctaacaggtctgattttgacctgggttcacacacaaaaaatcaggctggttttaaaatccatgcaaaggtttccgag

SEQ ID NO: 298601 - DNA, 163 bp, Unknown
  Bacterial polypeptide expressing nucleotide sequence isolated from the Sargasso Sea
ggcaagagatatagaaggcaagatgaaattggaacaccctactgtataacagttgactttgacacactagatgataagtctgtaacaataagaaacagagacacaatggagcaagaacgaatttcaattgaaaaccttcttgactatttcagtggcatctaat

SEQ ID NO: 298602 - DNA, 505 bp, Unknown
  Bacterial polypeptide expressing nucleotide sequence isolated from the Sargasso Sea
atggtttctaaaaaaaaaattaaaaaaaagaaattttattcatttcaggatactatcttgaatcttcaaaaatattggggcaagcaagggtgtataattttacaaccctatgatttagaagtcggagctggaacatttcatccagcaacgacgcttagatctcttggagaaaaaccttggaaaactgcttatgtgcaaccttcaagaagacctaccgatggaagatatggtgaaaatcccaatagactccaacattattatcagtttcaagttctaataaagccatcaccaaaaaatataaaaaaactttatttaaacagtctttcgtcaattggaattaaacataaagaacatgatataagatttgtagaggatgattgggaaagcccaacactaggggcagctggacttggatgggaagtttggtgcgatggaatggaagtgactcaatttacttacttccaacaaatggctggaattgaatgcaatcccagtatctgttgaa

SEQ ID NO: 298603 - DNA, 865 bp, Unknown
  Bacterial polypeptide expressing nucleotide sequence isolated from the Sargasso Sea
aacttaacagagcccagaccttttaatctaatgttcaaaacaagtctcgggccaatcgatgatggaagctcatttgcctatttgcgacccgaaacagcacaaaatatattcactaattttaaaaatgttctggattcatcaccgcgtcatctacccttcggaatcgctcaaataggtaaggcttttagaaacgaaattacgccaagaaattttatattcagagtaagagaattcgagcagatggagctagaattttttgttcagaaaggatctgatgatgaatggcacaaaaaatggacagatctcagagttcaatggtggttagatcagggtattaataaagataacattgaattattgagcgttaagggtaatgaactggcccactattccaaagccaccgtcgatattatgtataggtttccacacggattagaagaacttgaaggaattgcaaatagaactgactttgatcttggatctcacacaaaatttcaagaagatttaaatataaactcgaaagttaaacagaatactaaatcaaaaagtaggctagcaatacaagacagtaataataactgggaaatcccttatgttattgagccatccgcgggtgtagacaggggcgttcttgctgtcctcaatgaagcctatagaaaagaaattatcgataatggaaaagaaagggtggtattgtcgttcaagcctcatctggcccccatcaaagcggctgtgatcccgctcaaaagaaataatgaaaatcttgtagaagcggcctcacaattaaaatcagagctacaaaaaagaaaactaggcagagtgattctagagaatacaggaaatataggaaaaagttatagaaagc

SEQ ID NO: 298604 - DNA, 850 bp, Unknown
  Bacterial polypeptide expressing nucleotide sequence isolated from the Sargasso Sea
atggccaagacacacctcacgactgaggggctggatttccagtctatactcctaaatctacagctttattgggctcgcaaaggcgcggtcatcctgcagccctacgacatggaagtcggcgctggcacgttccaccccgcgacaacgttgcgggcgctcgggcctgaccatcattggcgtgctgcctatgtccagccgtcacgccgtccgaccgatgggcggtttggcgaaaacccgaacaggctgcaacactattatcagttccagacgattttcaaaccctcgccgccaaacagccaggagctgtatcttggcagtctgaaagccatcggccttgatccggcggcgcatgatatccgctttgtggaggatgattgggagtcaccgacgcttggcgcatgggggcttggttgggaggtctggtgtgatgggatggaagtctcgcaatttacctattttcagcaggttggcggcgtcgagtgcgctcccgttccgctggagttgacctacgggttagagcgtctggcgatgttcattcaagggatcgacaatgtctatgatcttgactgggatggcgtgccggctgaccagggtgggaaatgctatggcgatatttttcatcgtgccgaggtggagttttcccgctggaatttctaccatgctgaaaccgatatgctgctcacgcatttccgcgatactgaggctgaatgtggccgcctgctcgctctggagacaccgctggcactgccagcctatgaccaatgtatgaaggccagtcacctgttcaacctccttgatgcgcggggtgtgatttccgtaacggaacgcgctgcctatatggccgggtagg

SEQ ID NO: 298605 - DNA, 466 bp, Unknown
  Bacterial polypeptide expressing nucleotide sequence isolated from the Sargasso Sea
tatggaaaaactattgtctctatcgaagagaagaggatttgtatttcagagtagcgaagtttatgggggcttaagttccacttgggattatgggcccttaggtgttgaattaaagcgcaacgtaaaagaagcgtggtggaagagcgtggtcgtttctagagaggatgttgttggattagatgcggcaatactgatgcaaaggcaggtctgggaggctagtggtcacctagaaaacttcagtgatccactcgtggaatgtaagaattgtcacattcgtctgagagaagatcagatgcaaaccgaaatatgccctatggaaccctctaaaaatccagaggaatgttcgggagagttaactgatcccatgaatttcaatctgatgttcaaaacgtttcagggcccagttgaagaaaccgcctctgaaatattcttgcgtccagaaacagctcaaggaatatttgttaat

SEQ ID NO: 298606 - DNA, 574 bp, Unknown
  Bacterial polypeptide expressing nucleotide sequence isolated from the Sargasso Sea
tgttgaagatgattgggagagcccaacgcttggagcttggggcttgggatgggaagtttggtgtgatggtatggaagtaagccaatttacatattttcaacaagttgggggtcatgactgcaatccagtttctggcgaattgacatacggtttagaaagactggctatgtatatactaggtgtcgactatgtcatggatatgccatttaatgctcccaaagctagtattccgctaaaatacggagatatttttaaacaaagtgaggaagaatattccagatggaattttgatgttgctaataccgaaactcttttccggcaatttgatgaagctgaacaggattgtatagaaatattatctcaaaatgatttagatcctaaatcagggaaaaatattactatggttcatccagcttatgaccagtgtattaaagcgtctcatatcttcaatattcttgatgctcgcggtgttatatcagttacagaacgacaagcttatattggccgagttagaggtttggcaaaacagtgcgccgacgcttttgttttaaccgcagctggggggaaattttaa

SEQ ID NO: 298607 - DNA, 599 bp, Unknown
  Bacterial polypeptide expressing nucleotide sequence isolated from the Sargasso Sea
aatgacagcaagctcaatggaggaattagtctctttatgtaaaagaagaggttttatttttcaatctaatgacatttacggcggtattaaaggattgtatgattacggtcctatgggcgtagaattaaaaaataatttaaagcaggcttggtggaagtctatggtttacgaaagagacgacattgaaggattagatgcatcaattttaagtgctcctgttgtattgcaacaatcaggtcatgaagatacattttccgatccattggttgattgtaaaaagtgtaaagctaggtttagagctgatcaaatagaaaacaatgaatgccctgattgtaagtcaaaagatttgactgaggctagaccatttaatctaatgtttaaaacagcaattggacctgttgatgacggttcttcttttgcttatttaagaccagagacatgtcagcaaatttttactaactttaagaatattactgactcgacgagcagagtggttccatttggtattgctcaaattggaaaagcatttagaaatgaaattaccccaagaaattttatatttagagttagagagtttgagcaaatggagttggagtttt

SEQ ID NO: 298608 - DNA, 751 bp, Unknown
  Bacterial polypeptide expressing nucleotide sequence isolated from the Sargasso Sea
catgcgtgagtttgaacaaatggaaatgcaattttttgttaggccaggagaagaattggaatggtatgaaaaatggaaaaaagaacggttaaagtggcaccatgcaattggcatcgcaaaagaacgataccgttttcacgaccacaccaatttggcgcattatgccaatgctgccacagacatagaatatgaatttccgtttggctttaaagaattagagggcatccattcccgaactgactttgacttgaaaaagcatcaagaattttcaggaaaaaaattgcagtatttcgatcctgaaattggagagaattatgtgccttatgtggttgaaacttcaataggtttagaccgcatgtttcttgctgtattgtcccattcttatggacaagaaacacttgaagatggttctcaacgtatggtaatgcgcattcctcatttcttagcgccttataaagtagctgttttgccattgctcaaaaaggacggattgccggagaaagcgcgtgaagttttgggtgagttgaagttcgattacaactgccaatacgatgaaaaggatgctataggaaaacgctatcgacggcaagatgccattggcactcctttttgtattacagtggaccaccaaagtcttgaggacaataccgtcacactcagagaccgagacagcatgcaacaagaaagagtttcaattgcggtattgcaacaattgttacgagagaaagtaactgcacctaaactgaattaa

SEQ ID NO: 298609 - DNA, 626 bp, Unknown
  Bacterial polypeptide expressing nucleotide sequence isolated from the Sargasso Sea
gatgattgacctattaacctctctatctaagcaaagagggtttatttttcaaagtagtgaaatctatggtggacttggatctacatgggattacggcccactaggtattgagctgaaaagaaacatcaaagattactggtggaaatctatggtgacatcaagacagaatgtagttggtatggatgcatccattcttatgcatcctgatgtttggaaagccagtggacatattgataacttccatgatccattagttgataataaggaatcaaaaaaaagatatcgtttagatcacttacttgaagaccagccagatgaggtgattgatttctttacagataaattattatcagatatgtctaatataaaatctgaagaggatcgatttcaggctattgtatccgcattaattaatttagataaagatagtcaaagtgtactcaatgaaagtaagatgatagatcctgaaacaagaaaaccaggtgattggactaatataagacaatttaatttaatgtttaaaacgcacatgggacccattgaagattcaggatcaatagcatatctaaggccagaaactgctcaaggtatttttgttaattttcaaaatgtccaatctacatcac

SEQ ID NO: 298610 - DNA, 850 bp, Unknown
  Bacterial polypeptide expressing nucleotide sequence isolated from the Sargasso Sea
tcaaaaagctgaaaaaagatttaaagaaaaatttgataaaaatcagttccttgatactagtcctaaagttttagaaattcaaaaaaagattgatgaagttaaagctagaatggtctccgcatttgaaaaagatgatctgcaagaagtaaaaaaaataattgacgatatggaaattaaatgtcagatttcaggaacttgtaattggacggaagtcagacactttaatctaatgtttagcacgaagttaggagcatcagaagagtcaagtatggatttatatttaagacctgaaactgctcaaggaattttcttaaactatttaaatgttcaaaagacctcaagaatgaaaatcccttttggaattgctcagactggtaaggcctttagaaatgaaattgttgccagacaatttatctttagaatgagagaatttgagcagatggagatgcaatttttcattaaacctggaacccaggaaaattggtttaatcattggaaagataaaagacttagctggcatttaaatttaggtattgatccaagtttatttagataccatgatcatgataaacttgcacattatgctgacgctgcatgcgatattgagtttaattttccatttgggtttaaagaacttgaaggtattcattcaagaactgatttcgatcttaaaagccacgaggagctttcaggtaagaaaattcaatattttgatcctgaattagataagaactatacaccatatgttcttgagacatctattggtttagatagaatgtttcttgcaattatatctaactcatttaaagtagaaaccctagaagatggatctacaagaaatgttatgagt

SEQ ID NO: 298611 - DNA, 799 bp, Unknown
  Bacterial polypeptide expressing nucleotide sequence isolated from the Sargasso Sea
gtctaaacaaggttgtacaattttacaaccttatgacatggaagttggagctggaacgtttcatccagctactgctttgaatgttttagggccaaaccctttatggaaagttgcttatgtacaaccttgtagacgtccaacagatggcaggtatggggaaaatccaaataggcttcagcattattaccaatttcaagttattattcagccatctccagataatatacaagatttatatcttaaaagcttaaaagaaattaatttagatcatcttctccatgatattaggtttgttgaggatgattgggaaagtcctacattaggagcggctggtttaggctgggaagtttggtgcgatggaatggaagttactcaatttacttattttcagcaagttggaggtttcgaggtaaggcctgttgcggttgaaataacctatggacttgaaagattggcaatgttcattcaggagttagatgacgtatactcaattgattttaatggtcttcctaaatcatctggtggaaagagttacggggatattttcaaagatgcagaaaaagaatactcagaatataattttgaaaacgcaaatgttgataaattattcaatgaatttgataattgtgtcaaagaatgtaatgatttgataagctcagaaaaaccattagtaaaacctgcatatgatcaatgtatcaaggcaagccatatatttaatctattagacgccagaggtgttatttctgtctctgaaagacaagcttatatcctaaaagttagaaatatgagtaaaatgtgt

SEQ ID NO: 298612 - DNA, 655 bp, Unknown
  Bacterial polypeptide expressing nucleotide sequence isolated from the Sargasso Sea
tttgacagcaaaaacaatggatgaactcgtagctctttgcaaaagaaggggttttatatttcaatctaatgaaatctacggtggtcttcaaggattatatgattatggaccgttgggtgttgagcttaaaaataacctaaaacaagcttggtggagagatatagtctttgatagggatgatgttgaaggcctagatgctgcaattttaacaaagccaagtgttttaaagttttcaggtcatgaggatacgttttcggatccaatggtagattgtaaatcctgtaatcaacgtttccgcgctgatcaagttccagatcattgtaagaaaaaagatcttacagagccaagacagtttaaccttatgtttaagacagcagtcgggccaattcaggataaagattcttttgcatatcttagacctgagactgctcaaaatatatttacaaactttaaaaacgttgttgattctacttctaggaaggtcccatttggaattgcgcaaattggcaaagcatttagaaatgaaataacgccaagaaattttgtatttagagtgagagaatttgagcaaatggaacttgaatttttcgttgctcctggaacagatgatgactggcataataagtgggtagatgcccggcttaaatggtggaat

SEQ ID NO: 298613 - DNA, 563 bp, Unknown
  Bacterial polypeptide expressing nucleotide sequence isolated from the Sargasso Sea
gatggttgcgaacgctcctaagtcatttcaggatataatcctaaggctccaaaattattgggtggcacatggatgtgccttgatgcagccgtacgatatggaagttggagcaggaacttttcaccctgctaccacactaagatcgttgggccctaaaccatggtcggtggcctatgtccagccttctagaaggcccaccgatggtcgttatggagacaacccaaacagattacagcactattatcagtttcaggtgttaatgaaacccagtccccctgattttcaaaacctgtatttaggatcattggatgcaattggtattgatagtcaactacacgacataagatttgttgaagatgactgggagagcccaacgcttggggcatgggggttaggttgggaagtttggtgtgatggtatggaagtaagccaatttacatattttcaacaggttgggggtcatgactgcaatccaatttccggtgaattgacatacggtttagaaagactggctatgtatatactaggtgtcgactatgtaatggatatgccatttaatgatc

SEQ ID NO: 298614 - DNA, 759 bp, Unknown
  Bacterial polypeptide expressing nucleotide sequence isolated from the Sargasso Sea
tgggctacgggccaaacaggctggtgacattgtttgggaaaatgacatgatttccctcgctaacaatgtttcactcgatgatgcacttggcccagacgcatctgagcccggcacactcacacaaccccgtgagttcaatcttatgtttgaaacaaaaattggtgcactggcgagcgatgatgatgaccgggcatttcttcgacctgaaactgctcagggcattttcgtgaatttcaaaaatgtccttgatacctcgcgagtcaaagtaccgtttggcattggacaaatagggaaaagctttcggaatgagataacccccagaaactttacatttcggtcacgagaatttgagcagatggagattgagtttttctgttgcccaagtgactcaggcgactggtatcgatattggcgagaccgacgatggcaatggtatctcgatctgggcttgaccgagggtcgtcttcaacttcgtgagcatggaaccgatgaactttcgcattattcagttggtactgcagacatcgaatatgcgtttccttttcttgcggaaggagaattcggcgaactggaaggcattgctcatcgtggtgactttgatctccgcagccatatggaaggcaaactcattcgtcaggatggtcagctagttgttgaaactgattctactggtaaaccaactcatcgaggcagcggcaaagacctttcttattttgacgatgtcaaacgagaacgatttgttcctcatgtcattgagcc

SEQ ID NO: 298615 - DNA, 681 bp, Unknown
  Bacterial polypeptide expressing nucleotide sequence isolated from the Sargasso Sea
taattttaaaaccatcacctgataatgtagaagaactgtatctagactctctccaagcaattggaataaatccaatggaccatgatatacgatttgtggaagacaactgggaggcgccaactctcggtgcctggggactgggttgggaaatctggcttgacggtatggaaataactcagttcacctatttccagcaagttggaggtatagagtgccagccagtttctgctgaactgacctatggtcttgagagaatagcctcataccttcagaatgtggatgatgtttttgaactagaatactcaaaagggatcagttattcagccatattcaggcaaccagaatttgaacattcaaaatacacatttgaagtagcagatacagacatgttgttccggcacttcagtgattatgaaaaggaagcaaaccgagcacttgagcaaagactggtttttccagcatatgattatgtacttaaatgctcacacacctttaatcaactggatgcaactggagcaattagtgtctcagcaagggcatcatttatccggagggtacgaaacattgcccaatctatagccaaattattcctggaagagcgctgcaaattagcattcccactgatgaaagaccgtaaggctgcacaaaaatgggtgtatcagctaaagtcaaaaaaataat

SEQ ID NO: 298616 - DNA, 818 bp, Unknown
  Bacterial polypeptide expressing nucleotide sequence isolated from the Sargasso Sea
tatggcctctaaaaaaaataaaaaaatatcaaagtttcaaacttttcaagatacaattttaaatttacaaaagttttggagcaaacatggttgtattattttacaaccatatgatatggaagttggagctggaacgtttcatccggctacaactttaagatctcttggaccaaaaccatggaaagctgcttatgtgcaaccctctaggagaccaacagatggaagatatggagataatccaaatagacttcaacattattatcaatttcaagtaataataaaaccatctccatcaaacattaaaaaactttatttaaatagtttgtcagtgataggtattaatcataaagatcatgatattagatttgttgaagatgattgggagagtccgactcttggtgccgctggattagggtgggaagtttggtgcgatggaatggagataactcagtttacatattttcaacagatggcaggttttgagtgtaaaccagtatctgttgaactaacttatggtttagaaagaatttgtatgttcactcaacaaaaaaaaaatgtttatgatttaatttggaacaatgaaggtattgagtacaaggaggtttttcatcaagctgaaaaagagttttcatcatataattttgagtacgctaataccgaaaatctttttaagatttttgatatgtttgagagtgaagcattgtcattagttgaaaaaaaaatatctttaccagcttatgatcagtgtttaaaagcaagccatatatttaatgtgttagatgcaagaggtgtaattagtgttgcgcagagagcagaat

SEQ ID NO: 298617 - DNA, 902 bp, Unknown
  Bacterial polypeptide expressing nucleotide sequence isolated from the Sargasso Sea
caattaaatgataacatagttggaattgactcagctatttttatgcaccccaaaacatgggtcgcatctgggcatgttgatgctttcaatgatcctctaattgataataaagattcaaagaaaagatacagagctgatgtattaattgaggaacatattgaaaaattaaatttaaaaattcaaaaagaaataaataaagcagagaaacgattcacagaaaaatttgataaaaaacagtttatggaaactagttctagagttcaagaaatattatcctctgttgaagacattaagtcaaaaatggtatctgcatttgaaaatgataatttagcccaagttaaaaaccttatagatgagcttgaaatcaaatgccccatttcaggtacatgtaattggacagaagtaagacaatttaacctaatgttcaaaacaaagcttggtgcttccgaggattctagtatggatctctttttaagacctgaaacagctcaaggaatttttcttaattatctaaatgttcaaaaaacatctagaatgaaaataccatttggtattgctcaaactggaaaagcctttagaaatgagatagttgcccgacagtttatttttagaatgcgagaatttgagcagatggaaatgcaattttttattcaaccaggatcacaaggagagtggtttgatatatggaagaaaaagcgtcttgagtggcacctaaatattggaattgatgataattcattcaggtatcatgaccatgataaattagctcattatgctgacgctgcatgtgatattgagtttcttttcccttttggtttcaaggagcttgaaggtattcactccagaacagactttgacctgaagagtcatgaaaaactttctggaaaaaaaatacagtattt

SEQ ID NO: 298618 - DNA, 729 bp, Unknown
  Bacterial polypeptide expressing nucleotide sequence isolated from the Sargasso Sea
tatggtctctaaaagtaataaaaaaaaacctaaatttcaaacttttcaggaaactattttaaatttacaaaaattttggaataaacataattgcattcttttacaaccatacgacatggaagttggagctggaacttttcacccagctactactttaagatctcttggaccaaaaccatggaaagctgcttatgttcaaccttcaagaagacctacggatggtagatacggagacaatccaaatagacttcaacattattatcaatttcaagttattatcaaaccttctccatcaaacataaaaaaactttatttaaatagtttgtctgttattggtattaatcacaaggatcatgatattagatttgttgaagatgattgggaaagcccaactcttggtgcagcaggtcttggatgggaagtatggtgtaatggtatggaaattactcagtttacatattttcaacaaatggcaggttttgagtgcaaacctgtttcagttgaaataacttatggactagagagaatttgtatgtttactcaacaaaaaaaaaatgtttatgatctagtttggaacagtgatggtattgaataccgagaagtttttcatcaagctgaaaaagaattttcagcatataattttgaacacgctaatacaaataatctttttaagatttttgatatgtacgaaaatgaggctaaatctttagttgaaaaaaaaatatcttt

SEQ ID NO: 298619 - DNA, 946 bp, Unknown
  Bacterial polypeptide expressing nucleotide sequence isolated from the Sargasso Sea
ttcaggtttggttgaatggcccgttgcactgttgggtgaagtagatactgcattctctgatctaccggctgaagtgctccaagcgtctatgaaagaacatcagaagtttttttcgttaaagaattcgaaaactggtaaaattgaaagatttattacagttgctaatattgaagccgcagacaatggcgaaacgattttaaagggaaatcaaaaggtactttatgctagattatccgatgcaaaattcttttgggagaatgatatccgtttaattcaaaaagacggtcttgatgcttggctaggaaagctcgttaatgtgacatttcacaataaactgggaagtcaggcggataaggtaacgcgtgtttctgctctaacaaagatattggcaaagcgactcttttgcgacattgaagatgctgtaaagagcgcaaatatctgcaagagtgatttagcgtctgaaatggtctatgaatttccagagcttcagggtgttatgggcagatattacgctttaagcgcaggatattctcaagatgtagctaaagtatgcgaagaacactatgctcctaaggggccaaatgaccctgtgccaaaggcttcaatatccgtcgcggtttctcttgctgataaattagatacattacttggcttttggattattgatgaaaaacctactagttcaaaagatccatttgcactcagacgagctgcacttggggtcataagaataatccttgaaaatgatctggaactcgatttagtcgaactactcaatgctcatttagaacatttatctaagtttggtaatcatccagatgcagtatctgatgtgatgaattttattcgtgaaaggtttaagatttatctccgggataaaaatatccgttatgatgtggtcgatgcatgtttagctgttgggaaagtttggaatctaagctggtaa

SEQ ID NO: 298620 - DNA, 702 bp, Unknown
  Bacterial polypeptide expressing nucleotide sequence isolated from the Sargasso Sea
tttgacagcaaaaacaatggatgaacttgtagctctttgcaaaagaaggggctttatatttcaatcaaatgaaatttatggtggtcttcaaggactatatgattatgggcctttaggtgttgaacttaaaaataacttaaaacaagcttggtggagagatatagtctttgatcgagatgatattgaaggtttagatgcctcgattttaacgaagccaaatgtcttaaagttttctgggcacgaagaaacattttctgatccaatggtcgattgcaaatcttgcaatcaacgttttcgtgctgatcaagttccagattactgcaaggaagaagaccttacagaacctagacaatttaatctaatgtttaagactgcagttggcccaattgaagataaaaattcttttgcatatttaagacctgaaactgctcaaaatatttttacgaattttaagaacgttgttgattctacttctaggaaactcccatttggaattgcacaaattggtaaagcatttagaaatgaaataacaccaagaaattttgtatttagagtaagagagtttgagcaaatggaacttgaattttttgttgctccgggaacagatgatgaatggcacgaagcctggacagaagctcggcttaattggtggtatgaacaaggaataaacaaagataatattgaactatacgatgttcccca

SEQ ID NO: 298621 - DNA, 735 bp, Unknown
  Bacterial polypeptide expressing nucleotide sequence isolated from the Sargasso Sea
tttgacagcaaaaacaatggacgaacttgtagctctttgcaaaagaaggggctttatatttcagtctaatgaaatttacggcggtcttcagggattatatgattatggtccattaggtgttgagctaaaaaataacttaaaacaagcttggtggaaagacctagtttttgaccgagatgacgttgaagggttggatgcctcaatattaactaagcctgatgttctaaaattttcgggccatgaagacacttttactgatccattagtagattgtaaagattgtaattcgagatggcgtgctgaccagttgaagtcaaataaatgtccctcatgtggctccaaaaacttaactgacccaaggccttttaaccttatgtttaaaacatctgtaggccctgttgaagataacaattcatttgcgtacttgaggcctgaaactgcgcaaaatattttcacaaactttaagaacgttatagattcaacatctaaacaactgccatttggcattgctcaaataggcaaagcttttagaaatgaaattacgccgagaaattttgtttttagagtaagagaatttgagcaaatggaattagaattttttgttactccaggaacagatgatcaatggcatgaaacttgggtaaactcgagattaaattggtgggatcaacaaggcgtaagtaaagataatcttgaactttaccgtgtacctgaaaatgaacttgctcattattc

SEQ ID NO: 298622 - DNA, 775 bp, Unknown
  Bacterial polypeptide expressing nucleotide sequence isolated from the Sargasso Sea
gttccttttggtatcgcacaaattggcaaagcatttagaaatgaaataacacctcgtaattttatctttagagttagggagtttgagcaaatggaattagagttttttgttaaaccaggtactgatgatgaatggcatgaatactggataaataagagaatagaatggtgggttaatcaaggaataaaaaaagaaaatttaaaaaaaattgaagtagaaaaagatgaactagcacactactctaaaagaactgttgatatcaattatgtttttcctcatggagaagaggaactagaaggagtagccaatagaacagattttgacttaggttctcacaccaaaaatcaaaacgattttaaaattacatcagaagttatgaaaaactcttcttcaacgacaaaactagctgttcaagatttagaagaaaaaaaatggtatattccttatgttattgagccatcagctggtgttgatagaggagtactcgctttattaaatgaagcttatcgtgaagaaaatgtagataaagataacaaaagaattcttttatctctaaaacctcatctttcacctattaaagccgcaattattcctcttaaaaagaacaatgtggatctagttaatttatctaaagaaataaaatctaatctgcagaaattgggattaggtagagttgttttagaaaattcagggaacattggtaagaattatagaagacatgatgaaataggaacaccaatttgtttaactgtagattttgaaactctagaagata

SEQ ID NO: 298623 - DNA, 529 bp, Unknown
  Bacterial polypeptide expressing nucleotide sequence isolated from the Sargasso Sea
atggtttctaaaaaaaaaaagaaacagcctaaatttcaaacttttcaagatactattttgaatctccaaaaatactggagtaaacagggatgtataattttacaaccttatgatatggaagttggagcgggtactttccatccagcaacaacacttagatcattaggaccacaaccttggaaggcggcatatgttcaaccttcaagaagaccaacagatggtagatatggtgacaacccaaatcgattgcagcattattatcaatttcaagtaattattaaaccatcacctaaaaatattaaaaaactttatttaaatagtttaaatactataggaataaatcataacgaacatgacattcgttttgtggaggatgattgggaaagcccaacattaggcgcagcaggacttggctgggaggtttggtgtgatggtatggagattactcaatttacatattttcaacaaatggccggatttgagtgcaaacctgtttcagtagaacttacatacggtttagagagattgt

SEQ ID NO: 298624 - DNA, 835 bp, Unknown
  Bacterial polypeptide expressing nucleotide sequence isolated from the Sargasso Sea
atacttacaaacccattgattttaaagtattctggacatgaggatacgttttcagacccaatggttgattgtaaatcttgcaacttaagatttagagcagatcaagtgcctgatagttgtaaaaaagaggatttaacagagccaagacagtttaatctaatgttcaaaactaatgtagggcctatagaagatggatccacctatgcttatttgaggccagagacagctcaacaaatcttcacgaattttaaaaatgtcctagattcaacttctaactctcttcctttcggaatagctcaaattggaaaagcctttagaaatgaaattacgcctagaaactttatttttagagttagagaatttgagcaaatggaattagagtattttgttagtcctggtaaagatgaggaagctcataatttatgggtacaaaataggatagaatggtggaataatcaaggtgtacccacagaaagtattgagatttatgatgtacccaaagacgagcttgcacactactcaaagaaaacagtagatataatgtacaaatttccacatggtgttgaggagcttgagggaattgcaaataggactgattttgacttaggatcacactctaaaaaacaaaatgaactaaatataaaatctaaggtcacagttaataaagattctaatagtaaacttgccgttcaagatgacaatggagattgggttgttccttttgttattgagccttctgctggagttgaaaggggttttctagcaattttaaatgaagcatatacgaatgaagagcttgaagatggtaaaactagaatagtcttaaagctgaaac

SEQ ID NO: 298625 - DNA, 906 bp, Unknown
  Bacterial polypeptide expressing nucleotide sequence isolated from the Sargasso Sea
aataaatgtccttcatggtggttcagataatttaactgaccctaggccttttaatcttatgtttaaaacaacaattggacctgttgatgatggaactagttttgcatacttaagaccagaaaccgctcaacaaatttttacaaattttaagaatgtggttgattctacatcaagaacattacccttcggaattgctcaaattggaaaggctttcagaaatgaaataactccaagaaattttatttttagagtaagagaatttgaacaaatggaattagagttctttgttgaacctggcagtgatgaagaatggcatcaaaaatgggttgatgaaagagtcatttggtgggaacgacaaggagtggataaaagtaaattagaaattattgatgtcgataaagaagatttatcgcattattcaaaaaaaacagttgatataatgtatgaatttcctcatgggcttgaggaattagaaggtatcgccaatagaactgattttgatataggatcacataccaaaaatcagaaagattttgaaataaatgctgatgttataaaaaatgatgactcagtaacaaaattagcaattcaagataagattaataatacatggactataccttatgtaattgagccatcggcaggggttgatagaggatttttggctgtattaaacgaggcatataaaattgagaagctagaaaatggtaaagagagaactgttctatcgctaaaatcccatttgtcgcctataaaggctgcggttattcctttaaaaagaaataatcaagatttagttaacaaagcagtagagttaaaaaagcaattacagtcaatcggcttaggacgagtagtacttgataatgcaagcaatattgggaaaagttatagaagacatgatgaagt

SEQ ID NO: 298626 - DNA, 691 bp, Unknown
  Bacterial polypeptide expressing nucleotide sequence isolated from the Sargasso Sea
atgttcaccatcaagaagaccaacagatggaagatatggtgacaatccaaatagactacaacattactatcaatttcaagttttaataaaaccatctccaaaagaaattaaaaaactttatttaaatagcttaactgctattggaatagatcataaagatcatgatgttagatttgttgaagatgattgggaaagtccaacattagcagcggcaggtcttgggtgggaagtttggtgtgatggcatggaagttactcagtttacctattttcagcaaatggctggattagaatgtaatccaatttcagtggaaattacttatggattagaaagattgtgcatgtttatacaaaataaaaagaacgtttttgatttagcatggaataacgaaggaattctatatagggatgtttttcatcaatcagaaaaagagttttcagcatataactttgattacgctaatacagaaaatttattcaaaatctttgatatgttagagagtgaggcaaaatctttaattgaaaaaaaaatttctcttcctgcatatgatcagtgtttgaaatctagccatgtattcaatttattggatgcgagaggagtaataagtgttgcccaaagagcagaatatatagcaagggtcagagatcttacaaaggagattggtaaaatttggattgaaagtcaaagttga

SEQ ID NO: 298627 - DNA, 808 bp, Unknown
  Bacterial polypeptide expressing nucleotide sequence isolated from the Sargasso Sea
tttggagcaacatggttgtgtaattttacaaccttatgatatggaagtaggagctggaacatttcacccagcgactaccttgagatctctaggacctaaaccatggaaagctgcttacgttcagccttcaagaagacctacagatggcaggtatggggataatccaaatagacttcagcattattatcaatttcaagtaataataaaaccatctccatcaaatattaaaaaactttatttaaatagtttgtcagtggttggtatcaatcacaacgatcatgatattaggtttgttgaagatgattgggaaagcccaactcttggagcgtcaggacttgggtgggaagtgtggtgtgatggaatggaaattactcaatttacatattttcaacaaatggcaggtttcgaatgtaaacctgtttcagttgagataacttatggcttagaaagaatttgtatgttcactcaacagaaaaaaaatgtttatgatttgatttggaataatgatggtgtggaatacagagaagtttttcatcaagctgaaaaagaattttcagcatataattttgaacatgctaatacagaaaatctttttaaaatttttgatatgtttgaaaatgaggcaaagtctttagtagaaaaaaagatatctttaccagcatatgatcagtgtttaaaagcaagtcatatttttaatgtgttagatgcgcgaggtgcaattagtgttgcacaaagagctgaatacattagcagaataagagaaattacaaaatcggcagcatctatttggattggtacgcaagtatag

SEQ ID NO: 298628 - DNA, 757 bp, Unknown
  Bacterial polypeptide expressing nucleotide sequence isolated from the Sargasso Sea
aatgccagctaaaaaaaaagttaaacaaaaactaaattttttatcttttcaagaaataattatgaaccttcaaaatttttggggaaaaaacggatgtgtaattttacaaccctatgatatggaagttggtgcaggcacttttcacccagcgacaactctaagatcacttggccctaaaccttggaaggctgcttacgtacagccatccagaagacctacagatggcaggtatggtgaaaatccaaatcgactacaacattattatcaatatcaagtaattataaaaccctctccaaaaaatattaaacaactttatttaaaaagtttagaagctataggtattgatgtaaaaaatcatgatattcgttttgttgaagatgattgggaaagtccaaccttaggagcagcaggattaggatgggaagtttggtgtgatggaatggagataactcaatttacttactttcaacaaatgacaggtatagagtgtaaacctgttccagttgaaattacctatggtctagagagactatgtatgtttgttcaaggaaaaaataatgtttttgatctggactggaataatgatggcgtgaaatataaagaagttttttttcaagccgaaaaagaattttctgcttataattttgagtttgctaacacagatactttactaaaaagttttgaaaatatcgaaaatgagtgtaaatccttactcgaaaaaaatctctcattaccggcttatgatcaatgtctaaaa

SEQ ID NO: 298629 - DNA, 885 bp, Unknown
  Bacterial polypeptide expressing nucleotide sequence isolated from the Sargasso Sea
aaaaataaattaaagaaaaaaaaaggaaaacctaccccagtatattttcaagaaacaattttaaatttacaaaagttctggggaaactacggatgtgtaatacttcaaccttacgatattgaagtaggtgccggaacattccatcctgcaacaacattacgttcactaggaacaaaaccttggaaagctgcatacgttcagccatcgagacgacctacggatggtaggtacggaaaaaatccaaatcgtttacaacattactaccagtttcaagttataatcaaaccctctccagacgaaataaaaaaagtttttttaaaaagtttgtcaacaataggaataaatcatagagaacatgatataagatttgtcgaagacgattgggaaagcccaactcttggagcagcagggcgtggctgggaggtatggtgtgatggtatggaaattactcaattcacttattttcaacaaatggcaggaatggaatgcaaaccagtttcagtcgaactcacatatggattagaaagaatatgcatgttcacacaaggaaaaaataatgtttttgaactcatttggaataatgagggaataaaatataaagatatttttcatcaagctgagaaagaatattcagcttataattttgagtttgccaacacagaatcattactaaagaattttgaaattgcagaagcagaatgtaaagctttgctagaaaaaaatatacctttaccagcctatgaccaatgtttgaaagccagtcatatttttaatctactagatgcaagaggtgttataggagtcgcacaaagaacagaatatatttctagaataagagagttagccaaaggttccggagaaagttgggtagaaagtcaaaaataa

SEQ ID NO: 298630 - DNA, 754 bp, Unknown
  Bacterial polypeptide expressing nucleotide sequence isolated from the Sargasso Sea
atgagctcaaaaaacattaaaactgatttccaatctattatcttaaatttacaatattattggtcagagaatgggtgtgtaatattgcaaccatatgataaagaagttggtgctggtacttttcaccctgcaacaactttaagaagtttaggtcctgaagaaaattggaatgttgcctacgtgcaaccttctagacgtccaactgatggaagatacggggatagtccaaatagagcacagcattattatcagtttcaaacaattatgaagccttcgcctgaagatagtcaggccctttatctaggaagcttagaagcaataggattaaatcttaatgatcacgatatcaggtttgttgaagatgattgggaaagtccaaccttgggtgcttggggtttaggatgggaagtgtggtgtgatggtatggaaatttctcaatttacatattttcaacagatgggtgggatagaatgttccccaattccgctagagctaacatatggtttagaaagattagcaatgttcattcaaaatgttgaaagcatatttgatattatttggtcacaatcatcaacaaaacaagttttttataaagatattttcttaaaaaatgaaatagaattctcttattataattttgaaaaagctgatattaacattttgtatagacaatttgaaatggctcaagaagagtgtaaaaatttacttaataatgatagacccttacctttaccagcctacgacctgtgttaaa

SEQ ID NO: 298631 - DNA, 837 bp, Unknown
  Bacterial polypeptide expressing nucleotide sequence isolated from the Sargasso Sea
aaataaattaaataaacaaaaaggtaaacctactccagtaaattttcaggacacaatattaaatttacaaaaattttggggaaaatatggatgtgttatattacaaccttatgatattgaggtcggagcaggcacttttcatccagcaactacattgcgttcgttaggaccgcaaacttggaaggctgcttatgttcaaccttctagaagaccaacagatggaagatatggaaaaaatcctaatcgattacaacattattatcaatttcaagtaataataaagccttcaccaaacaatattaaaaaaatttttttaaaaagtttaaatactgtaggtattaatcacaaagaacacgatataagatttgttgaagatgattgggaaagcccaactttaggagcggcaggcagaggctgggaagtttggtgcgatggtatggaaattactcaatttacatattttcaacaaatggccgggatagaatgtaaaccagtttcagtagagcttacatatggtttagaaagactttgcatgtttacacaaggaaaaaaaaatgtatttgaactcatttggaatgatgagggaataaaatataaagatatatttcttcaagcagaaaaagaatattcaacttataattttgaatatgccaacacagattttttgcttaaaaattttgaaattgctgaaagtgaatgtaaatttttattagaaaaaaaacttcctttacctgcgtatgatcaatgcttaaaagcaagtcatatatttaatctacttgatgccagaggagtaataggagtagctcaaagaactgaatatatttctagaataagaga

SEQ ID NO: 298632 - DNA, 580 bp, Unknown
  Bacterial polypeptide expressing nucleotide sequence isolated from the Sargasso Sea
tatgcagccatatgattctgaaaagggtgctggtacaatgagtcctcatacttttttgagggcaattggacccgaaccttggtctgttgcatatgctgagccatgtagaagacccacagacggaagatttggtgataaccctaatcgtgcacaacattattttcaatatcaagtaataattaagccttccccagatgggatccaagaaaaatatttgaaatctctggaatctcttggaatagaggctaaaaatcatgacataagatttgttgaagataattgggagtcgccaactcttggagcttggggcgtaggttgggaagtatggctagacggaatggaagttactcaattcacttattttcaacaatgcgggggagttgattgtcaaccaataccaattgaaattacatacggtttagagagaattgcaatgtttttgcaggataaagaaagtatctgggacttaaattggaataaagatctgaaatacagcgatatttggcttgaatttgaaaaagatcaatgttcatataatttctctgaatcaaatcctgaaaatctcagaaaattattttga

SEQ ID NO: 298633 - DNA, 712 bp, Unknown
  Bacterial polypeptide expressing nucleotide sequence isolated from the Sargasso Sea
atgtattttcaagatattattttaaatcttcaaaactattgggcatcccacgagtgcgctatacatcaaccctatgatattgaggttggagcaggcacgttcaatccctgcacttttttcagggtgttgggtccagaaccttataatgctgcttatgttgagccgtcccgtcgtccaacggatggtaggtatggggaaaaccctaatcgtctgcaacattattatcagtttcaggtcattcttaaaccctctccacaaggtgtgcaggatcagtatttagaaagtctcactgttttgggcgtggaccctatcaagcacgatattagatttgtcgaagatgattgggaatcccctactttgggagcttggggattaggctgggaagtatggttggacgggatggagatcactcagtttacttatttccaacaagttggaggcatagatttaaaaccagttactgcagagttgacgtatggattggaacgtattgccatgtacctgcaaaacgtggaaaacgtatatgatttaaagtggaatgaagaactattgtatggtgatgttcaccttgaaacggaaaaacagttttcccgttacaattttgaagtttccaataaagaccgtctgttcgagtggtttgatatgtatgagctggaagcgaaagaattatggaaaaagaacttgttctccctgcatatgattacacattgaa

SEQ ID NO: 298634 - DNA, 859 bp, Unknown
  Bacterial polypeptide expressing nucleotide sequence isolated from the Sargasso Sea
aaaaaaaaaaattaaaaaaaaattaaaaaagaataattttcaaactttccaagatacaattttaaatctccaaaagtattggagcaaacaagggtgcgtaattttacaaccttatgatatcgaagttggtgcaggaacatttcatcctgctactactcttaggtcgttgggatcaaaaccttggaaaacagcgtatgtgcaaccatcaagaagacctactgatggaagatacggagaaaatcctaaccgacttcaacactattatcagtttcaagttttaataaaaccttctccaaaaaatattaaaaagctttatttaaatagtttaagatccattggaattaataatttagatcatgatattcgttttgttgaagatgactgggaaagtccaacattaggagcttcagggttaggttgggaagtatggtgcgatggaatggaaattacacaatttacttattttcaacaaatggcaggaattgaatgtaaaccagtatctgttgaactaacctatggtttagaaagaatatgtatgtttacacaacaaataaaaaatgtatttgatttaagttggaacaatgaaggcataaaatatagggaggtttttcaccaagcagaaaaagaattttcagcatacaattttgaatatgcaaatactgagaatttattcaaaatttttgagatgttagaaaatgaaacaagatccttattagaaaaaaaaatttctttacctgcctacgatcaatgtttaaaggcaagtcatgtttttaatattttagatgcaaggggagttataagcgtagctcagcgagccgagtatatatcaaagatacgagaacttacaaaaaatgtagga

SEQ ID NO: 298635 - DNA, 886 bp, Unknown
  Bacterial polypeptide expressing nucleotide sequence isolated from the Sargasso Sea
aataatattaaaagcgcctggtgggaagcaatggtgtatgagaatgatgatattgagggacttgactcatctattcttacaaacccacttgttctggggtattcaggccatgaagacacattttcagatccaatggtcgattgtaaatcatgtggtcttagatttagagctgatcaagtaccaaaagagtgcaaaccagaggatctaactgaacctcggcaatttaacttaatgtttaaaacgaatgttggtccgatagacgatggttcaagttttgcatatctaaggcctgaaacagcacaacagatattcacaaactttaaaaacgtaatagattcaacatccaaaccggttccatttggaattgcacaaattggcaaagcatttagaaatgaaataacaccgagaaattttatttttagagtcagggaatttgaacaaatggaattagaatattttgttatgccaggtgaagacgaaaaatctcatgatacatgggtacaaaaaagactagaatggtggaaaaaacaaggtgtacccacagaaagtattgagctttacgatgtacccactgaagaactagctcattattctaaaaaaactattgatttaatgtataaatttcctcatggtcttgaagagcttgaagggattgcaaacagaactgattttgatttaggctcacactctaagaaacaaaatgaattgagtattgggtcatctgtaaaggaaaataaacactcaaatagtaaaatggcagtacaagataactctggtaaatgggttgtgccatttgtaatcgaaccatcagcaggtgtagaaagaggctttttagcaatattaaatgaagcttattttgttgaggatctagaagatgacaaaacta

SEQ ID NO: 298636 - DNA, 881 bp, Unknown
  Bacterial polypeptide expressing nucleotide sequence isolated from the Sargasso Sea
tagttcaaaaaagaaaaaaggaaaaccaacacctgttaattttcaagatacaatattgaatttacaaaaattttggggaaattatggatgtgtaattttacaaccatacgatatagaagttggagctggaacttttcatccagcaaccactcttcgttcattagggccgaaatcttggagggctgcttatgtccaaccatcaagacgaccgacagatggaagatatggaaaaaaccctaatcgcttacaacattattaccaatttcaagttattattaaaccttcacctgatgatattaaaaaagtttttttaaagagtttatcaacgataggaataaatcataaagagcatgatataaggtttgtagaagatgattgggaaagtccaacactcggagcagcaggacgtggctgggaggtttggtgtgatggaatggaaattactcaatttacttattttcaacaaatggcagggattgaatgcaaacctgtttcagttgaacttacatatggactagaaagaatatgcatgtttacccaaagtaaaaataatgtatttgaattattatggaataattctggaataaaatatagagaagttttttaccaagcagaaaaggaattttcagcttataattttgagtttgctaatactgaaaacttattaagaaactttgaaattgcagagtcagaatgtaaatctttgctagaaaaaaaactcccattgccagcttatgaccaatgcttgaaagctagtcacatttttaatctattagatgcacgtggagttataggagttgcacaaagaacagaatacatttctagaataagagagctagctaagggttcaggacaaagttggctagaaagtcaaaaataaa

SEQ ID NO: 298637 - DNA, 376 bp, Unknown
  Bacterial polypeptide expressing nucleotide sequence isolated from the Sargasso Sea
aatgaataaaaaaaatattagctttgaaaatattatagttagactgcaggaattttggcagagcaaaggttgtattttaatgcaaccaattgatatggaagtaggagccggtactttccatccagccactttattaagaagtatagggtcaaaagcatggaagtgcgcatatgttcaaaattgtcgtagaccaactgatggacgttatggagaaaatccaaatagaatgcagcaatattatcagtatcaggtattactaaagccatctcctgaaaatatgaaaaaactttatattgaaagcttgctatatttgggaatagatggagataataatgatattaggtttgtagaaatgattgggaaagtcctactttag

SEQ ID NO: 298638 - DNA, 373 bp, Unknown
  Bacterial polypeptide expressing nucleotide sequence isolated from the Sargasso Sea
aatgccagcaaaaaaacaagtaaaaaaaaaattacctataaaattaaattttttatcttttcaagacataataatgaatcttcaaaaattttggggaaaacatggatgtgttattttacaaccatatgatatggaagttggagcaggaacttttcacccagcaacaacattgagatcgcttggcaccaaaccatggaaggctgcttacgtacaaccatcaagaagaccaacagacggtaggtatggggaaaatccaaatcgattacaacactattatcaatatcaagtaattattaaaccttcaccaaaaaatattaaacaactttatttaaaaagcttagctactatcggtattgatgtaaaaatcatgaca

SEQ ID NO: 298639 - DNA, 662 bp, Unknown
  Bacterial polypeptide expressing nucleotide sequence isolated from the Sargasso Sea
tatggtttttaaaaaaaaaaacaaaaaaaaatcaaaagttaaatatcaaacttttcaagatacaatattaaaccttcaaaaatattggagcaaacaaggttgtgttatattacaaccttatgatatggaagttggagcaggtactttccatccagcaacaacacttagatctttaggagaaaaaccttggaagacagcatatgttcaaccttctaggagacctacagatggaagatatggtgaaaatccaaaccgtcttcaacattattatcaatttcaagtattaataaaaccttcaccaaaaaatattaaaaaactttatttaaacagtttaaaaagcattgggattaatcatttagatcatgatgtaaggtttgtagaagatgattgggagagtcctaccttgggagccgcaggattaggctgggaagtttggtgcgatggaatggaaataactcagtttacatattttcaacaaatggcaggtgttgagtgtaaaccagtatcagtagaattaacttacggcttagaaagaatatgcatgtttactcaggaaaagaaaaatgtgtttgatttagattggaataatgaaggaataaaatatagagaagtttttcaccaagcagaaaaagaattttctgcttataactttgaacatgcaa

SEQ ID NO: 298640 - DNA, 388 bp, Unknown
  Bacterial polypeptide expressing nucleotide sequence isolated from the Sargasso Sea
atggtttctaaagcaaaaaaagaaaaaaaaaaaattcaaacattccaagatacaattttaaatcttcagaaattttggagtaaaaaaggatgcattattcttcagccttatgatatggaggttggtgcaggaacttttcatccagctactaccctaagatcacttggaaataaaccatggaaagcagcttacgtgcaaccatcaagaagacctacagatggaagatatggagataatccaaacaggttgcaacactattatcaatttcaagttttaattaaaccttcccctgaaaatataaaaaaactttatttaaatagtttatctactataggaatagatcataatgatcatgatataaggtttgtgaagatgactgggaaagtcc

SEQ ID NO: 298641 - DNA, 670 bp, Unknown
  Bacterial polypeptide expressing nucleotide sequence isolated from the Sargasso Sea
atggtttctaaaacaaaaaagaaaaaaattaaatttcattcatttcaagatacaatattaaatttacaaaaatattggagcaagcatggttgtgtaatattacagccctatgatatagaggttggcgcaggaacgtttcatccagcaactactctaagatctttaggacctaaaccatggaaagctgcatatgttcaaccatcacgaagacccacggatggacgttatggagaaaacccaaaccgacttcaacattattatcaatttcaagttattataaaaccctctccaagcaatattaagcgactttacttaaatagcctttcttcaattggaattaatcatctagatcatgatatcagatttgttgaggatgattgggaaagcccaactttaggtgccgcaggattaggttgggaagtatggtgcgatggaatggaaattactcaatttacttacttccaacaaatggctggatcagaatgtaaccctgtgtctgtagaattgacatatggacttgaacgattgtgtatgtttactcagtataagaaaaatgtatttgatttagtttggaacaatgatggaattttttatagggatgtttttctccagtcagaaaaagaattttctaaatataattttgaattagcaaatactggacaacctatta

SEQ ID NO: 298642 - DNA, 700 bp, Unknown
  Bacterial polypeptide expressing nucleotide sequence isolated from the Sargasso Sea
aatgccagctaaaaaaaaagtaaaaaaaaaaataacaaatatttcttttcaagacattataatgaatttacaaaagttttggggaaaaaatggttgcataattttacaaccatatgacttagaagttggcgcaggaacttttcatccagctaccacattaagatctcttggccctaaaccatggagggctgcttatgttcagccttctcgaagaccaacggatggtagatatggtgaaaacccaaatcgtttacaacactattatcaatatcaagtaattattaaaccatccccgagcaacattaaacaaacatatttaaaaagtttagcttctattggtattgatataaaaaatcatgacatccgtttcgttgaagatgattgggaaagtccaaccttaggggcggcaggattaggatgggaagtctggtgtgatggaatggagattactcaatttacttattttcaacaaatgaccggtatagaatgtaagcctgttccagttgaaattacttatggtcttgaaaggctatgtatgtttgttcaagaaaaaaataatatttttgatctggattggaataatgatggtgtgaaatataaagaagttttctttcaagccgaaaaagaattttctgcttataattttgaatttgcaaatactgatatcttactaaaaagttttgagaatactgaaaaatga

SEQ ID NO: 298643 - DNA, 809 bp, Unknown
  Bacterial polypeptide expressing nucleotide sequence isolated from the Sargasso Sea
agctcttggtggagtgcaatggtttttgaaagagacgacattgagggtcttgatgcatccatattgtcgaaaaaggagttattcaaatactctggccacgaagatacattttcggaccctttggtagattgtaaatcctgtaaatcaaggtggagagaggacctgattgaaggcggaaaatgcccaggctgcggttcatctgaattaacagaggcaagaccatttaacctgatgtttaaaacaccagttggcccggtagaaaacgaagaaagttttgcgtacctgaggcctgaaaccgcacaacatatttttgcaagttttaaaaatgttaaagactcgacatcgagacaagtcccatttggaatagcacaaattggcaaggcttttagaaatgagatcaatccaagaaatttcatatttaggttaagagagtttgagcaaatggagttggaatattttgtcaagcccggggaagatgagaccgctctagagtattggaaaaaggaaaggttagagtggtgggaacgccaaggcattgatcttacaaatattgaaatctatgatgtgcctgaaaacgagcttgcacattattccaaaaggactcttgatatcatgtaccgatttccacatggtcttgaggaactagagggcattgccaatagaacagattttgaccttggttcacacaccaaaaaccagaaggatttatctctaagctcagcagttgttgaaaatgatgagtcaaccatgcgtcttgcggtacaagaccttgaaaccaatgagtggtatgtcccatatgttatagagcc

SEQ ID NO: 298644 - DNA, 769 bp, Unknown
  Bacterial polypeptide expressing nucleotide sequence isolated from the Sargasso Sea
gatccaatggtagattgtaaatcttgtaatcaacgttttcgagctgatcaggtaccagatcattgtaaagaagaagatcttacagaacccaggcaatttaatctaatgtttaaaacatcggtcggaccaattgaagacaaagattcttttgcatatttaagacctgaaactgcacaaaatatctttacgaactttaaaaacgttgtagattcaacctctaggaagatcccatttggaattgcacaaattggcaaagcatttagaaatgaaataactccaaggaactttgtctttagggtgagagagtttgaacaaatggaacttgaattttttgttgcccctggaacagatgataagtggcataaggcatgggtcgacgcgagacttaagtggtgggaagaacaaggagtaagcaaagaaaatattgagttatacaatgttccatcagatgagcttgctcattattccaaagcaacggttgatatcatgtataaattccctcatggtcttgaagaattagaaggcattgctaatagaacagattttgatttaggttcacacagcaaaaatcaaaaagatcttgatatacattcaaaagtaaatgaaaacaatgaatcaaatgcaaggcttgctcttcaagacccagaaacaaaaaaatggtctgttccatacgttattgagccctcagctggagtagatcgaggtgtacttgcagttttaaatgaagcatacgaaatagagaaattagaagataataaaacaagaacag

SEQ ID NO: 298645 - DNA, 283 bp, Unknown
  Bacterial polypeptide expressing nucleotide sequence isolated from the Sargasso Sea
tatggcctctaaaaaaaaaacaaaaaaaaaaattcaaacttttcaagacactatattaaatcttcaaagatactggagcaaaaatggttgtataattttacaaccttatgatatggaagttggggctggaacttttcatcctgcaactacactaagatctttaggacccaagccttggaaggcagcatacgtccagccttcaagaaggcccacggatggaaggtacggagataatccaaacagacttcaacactattatcaatttcaagtgttaataaaacct

SEQ ID NO: 298646 - DNA, 880 bp, Unknown
  Bacterial polypeptide expressing nucleotide sequence isolated from the Sargasso Sea
ccagtcaagaatgaaaattctgctgtttatttaaggcctgaaactgcccaaggtatatttgttaactttgaaaatgttttgcgtacaatgagagcgaaaatcccatttggaattggaaatataggaaagtcatttagaaatgaaatcacaccgggacaatttatttttagaaccagagaatttgaacaaatggagattgagttcttttgtgatgaaagtgaagaagataaatggtttgattactggatagaaaacagattaaattggtacagaaatcttggtattccagaaaataaattaagagttagagatcatgacaagtcagaacttgctcattacgcaaaaaaaacatcagacattgaatttgaatacccctggggatggggtgagcttgaaggaattgcaaatagaggcaactttgatttgaacgctcatcaagaaaatagcggtaaggatttaaaatattttgatcctaataatgaaataaaatacatcccatcagttatagagccagcaggtgggttaactaggacactttttgctgttttgctgtctttatatgaagaggaagaattagaaaaagaaacaagaactatttttagattcaattttgatcttgcaccaattcaaattgggatacttccattaagcaaaaaagacgaattaattacgttttgtgatgagattaatgccacacttagatcaatgtttagaacagaaattgatattacccaatctattggtaaaagatatagaagacaggatgaaataggaactccttattgtataacagtagattttgaaactttagaggataaatctgtaacagttagaaatagagatacaatgcaacaagagagaattaaaatcgatgattaag

SEQ ID NO: 298647 - DNA, 388 bp, Unknown
  Bacterial polypeptide expressing nucleotide sequence isolated from the Sargasso Sea
accgacggcccgttcggcaccgtgacctacggcgacgtgttccatcagaacgaggtggagcagtccacctacaacttcgagcacgccaacgtcgagaagctgttcgagctgttcgatttctacgagagcgaagccaaccgcctgatcgaactggagctgccgctgccgacctacgaaatggtgctcaaggcctcgcacaccttcaacctgctcgacgcccgccgcgctatttcggtgaccgcgcgccagcagtacatcctgcgcgtgcgcaccctggcccgtgcggtagcgcagagctacctgcaggcacgcgccaagctcggcttccccatggccacccctgaactgcgtgacgaagtactggccaagctggaggcgcaagcatgag

SEQ ID NO: 298648 - DNA, 596 bp, Unknown
  Bacterial polypeptide expressing nucleotide sequence isolated from the Sargasso Sea
agcgctcgctggtgatgatgacgaccgcgcttttcttcgaccagaaacggctcagggtatatttctgaacttcaagaatgtgctcgacacgtcgcgagtgcgcgtgcccttcgggatcggccaaattggtaaaagttttcggaatgagattactcccaggaatttcacatttcgttcgcgcgaatttgaacagatggaaattgagtttttctgtcgaccggatgattctcggaagtggtatcagttctggagagatcgccgttggcagtggtacctgaaccttgggctcacagaaggccgcctgcaactgcgagaacatcatgaggcagagttagcacactattcatgtggaacggctgatattgagtatgccttcccgttccttgccgatggcgaatacggagagcttgaaggcattgctcatcgaggtgactttgaccttcgtagtcacatggagggcaagcttgttcgtgaagatggaaaactggttcttgaaactgactccaatggaaaaccaaagcaccggggaagtggccgtgacctttcctactttgatgatgtgacccgggagcgttttgtgccgcacgttattgagc

SEQ ID NO: 298649 - DNA, 538 bp, Unknown
  Bacterial polypeptide expressing nucleotide sequence isolated from the Sargasso Sea
aatgatcatgatataagatttgttgaagatgattgggaaagtcccacactaggtgctgctggattaggctgggaagtatggtgtgatggaatggaaattactcaatttacttatttccaacaaatggctggatttgattgtaaacctgtatcggttgaaattacttatggtttagaaagaatttgtatgttcactcaacaacaaaaaaatgtctacgaattactatggaatgatgaaggcataaaatatagtgaagtttttcatcaagctgaaaaagaattttcagcatataattttgaatacgcgaatgtagaaacacttttaaaaatgttcgaaatgcatgagtcagaagcaaaagctttagtagagaaaaaaatttctttgccagcatacgatcaatgcttaaaagccagtcatgtttttaatattctggatgcaagaggtgcaattagtgttgcacaaagagcaggttatattgccagaataagagatattacaaaatctgcagcaggtgtttggttagatagtcaaaaataat

SEQ ID NO: 298650 - DNA, 430 bp, Unknown
  Bacterial polypeptide expressing nucleotide sequence isolated from the Sargasso Sea
atgccaaaaaagaaaaaaattaaaaaaaataaaaattttttatctttccaagatattataatgaatttgcaaaaattctggggaaaatttggatgtattattctacaaccttacgatcttgaggtaggagctggaacatttcatcctgcaacaaccttgagatccttgggaacaaaaccttggaaagctgcatatgttcagccatcaagaagaccaactgatgggagatacggtgaaaatccgaatagacttcaacattattatcagtttcaagttattataaaaccttctcctaataatattaaacaaatttatttaaaaagtttaacatcaataggtatagatgtgaaaaatcacgatattagatttgtagaggatgattgggaaagtccaactttaggggccgcaggtcttggttgggaagtatggt

SEQ ID NO: 298651 - DNA, 648 bp, Unknown
  Bacterial polypeptide expressing nucleotide sequence isolated from the Sargasso Sea
tatggtttctaaaaaaaaaagaaaaaaaaaaccaaagtttcaaacttttcaagacactatactaaatctccaaaagtattggagcaaacatggatgtattattttacagccttatgatgtagaagttggtgctggaacttttcatccagctactacattaagatctttaggacttaaaccttggaaagtagcttacgttcaaccatcaagaagacccacagatggaagatacggggataaccccaacagacttcaacattattatcagtttcaagttctaattaaaccttcaccaaaaaatataaaacaattatatttaaatagcttgagcgctataggaattaaacatcaggaacatgacataagatttgtagaagatgactgggaaagcccaacacttggagcagccggcttaggctgggaagtctggtgcgatggtatggaaattactcaatttacatattttcaacaaatggctggtgttgattgcaatccaatttctgttgaactaacttatggactagaaagaatttgtatgtttacacaagaaaagaaaaatgtttttgatttagtttggaataatgaaaatgttttatataaagaagtatttcaccaggcagaaaaggaattttcggcatataattttga

SEQ ID NO: 298652 - DNA, 781 bp, Unknown
  Bacterial polypeptide expressing nucleotide sequence isolated from the Sargasso Sea
atggttgctaaaaatatggatgacttagtttctctttgtaaaagaagaggatttatatttcagtcaaatgatatttatgggggaataaaaggtttatatgattttggaccaatgggaattgaattaaaaaataatttaaaacatagttggtggagatcaatgatttatgaaagagatgatattgagggtttagacgcaactatcttaacttctcaagatgtgatgaagttttccggacatgaagaaacattctctgatcccttggttgattgcaaatcttgcaaatcaagatggagggaagatcaattagaaaatcaaagctgccctgactgtaaatctaatgatttaacagattcaaggccatttaatttaatgtttaaaacttctattggccccgttgatgatggaagttcttttgtatacttaagacctgaaacagctcaacaaatttttacaaattttaaaaatgtgatttcttcaactagtagatcaattccttttggaatagctcaaataggtaaagcttttagaaatgaaataacccctagaaattttatttttagagtaagagaatttgaacaaatggaattagaattttttgttgaacctggaacagatgacgactggcacaactattggattgatttaaggttaaattggtggattaaacaaggaattgataaaaaaaatttatcactaattaaggttgaaaaagaagaattatctcattattccaaagcaactacagatataatgtataattttcctacatgggaaagaa

SEQ ID NO: 298653 - DNA, 874 bp, Unknown
  Bacterial polypeptide expressing nucleotide sequence isolated from the Sargasso Sea
tatgactgcacaaacaatggaagagttagtttctctttgtaaaagaagaggttttctatttcaatcaaatgacatttatggtggtattaaggggttatatgattatggaccaatgggcgttgagttcaaaaataatcttaaacaagcttggtggaaatcaatggtatatgaacgagatgataccgaaggtttggatgcctcaattttaagttctcctgtagttttaaaacattcaggtcatgaagatacttttaccgaccctttagttgattgtcgagcatgtaaatcaaggtggagagcagatcaattattggaaaataataaatgcccaaattgtaaatcagaagatcttactgagccaagaccttttaatttaatgtttaaaactgcaattggtccagtagatgatggttcgtcattcgcatatttaagaccagaaacgtgtcagcaaatttttactaattttaaaaatatattagattcaacttctagaactgttccttttggtatcgcacaaatgggaaaagcatttagaaatgaaataacacctcgtaattttatctttagagttagagagtttgaacaaatggaattagagttttttgttaaaccaggtactgatgatgaatggcatgaatattggataaataagagattagaatggtgggttaatcaaggcataaaaaaagaaaatttaaaaaaaattgaagtagaaaaaaatgaactagctcactactcaaaaagaactgttgatatcaattatgtgtttcctcacggtgaagaagaactagaaggggtagccaatagaactgactttgacttaggttctcatactaaaatcaaaacgattttaaaattacatcagaagttatga

SEQ ID NO: 298654 - DNA, 352 bp, Unknown
  Bacterial polypeptide expressing nucleotide sequence isolated from the Sargasso Sea
catgacgacgaaacacgacgtaaaaacatttcagggtttcattctaaccctacaggaatattgggcgcagcaaggctgtgcaatcgttcaacctctagatatggaagtcggtgcgggtacattccacccacaaactttcctacgctctttagggcctgagccaatgagcagtgcctatgtgcagccatcgcgccgccctaccgacggccgttacggtgaaaacccaaaccgtctgcagcactactaccaattccaagtcgtgttaaaaccgtcaccggataatatccaagaactctatttaggttctctgcaggcccttggtattgatacacaaatccatgatatccgtttt

SEQ ID NO: 298655 - DNA, 544 bp, Unknown
  Bacterial polypeptide expressing nucleotide sequence isolated from the Sargasso Sea
aaaacaccaagaacacgatattaggtttgttgaagatgattgggaaagtccaacattgggcgcttctggcttagggtgggaagtatggtgcgatggcatggaaattacacagtttacttattttcaacaaatggcaggaatagaatgcaaaccaatttcggttgaattaacttatggactagaaagaatttgcatgtttacacaagaaaaaaaaaatgtttttaatttaatttggaatgatgaaggtgttttatataaagaagtatttcatcaagctgaaaaagaattttcggcgtacaattttgaacatgcaaacatagaaaatctttttaaaatttttgaaatggttgaaatagaagcaaaactattaatagataaaaaactttcactacctgcgtacgaccaatgtttaaaagcaagccatgtatttaatttacttgatgcaaggggagcaataagtgtggcacaaagagcagaatatatttcgaaaataagggaattaacaaaatctattggtcaaatttgggttaacagccaaaaataa

SEQ ID NO: 298656 - DNA, 361 bp, Unknown
  Bacterial polypeptide expressing nucleotide sequence isolated from the Sargasso Sea
atgccagtaaaaaaaaaagtaaaaaaaaaattacctttaaaattaaattttttatcatttcaagatataataatgaatcttcaaaaattttggggaaaacatggatgcgttattttacaaccatatgatatggaagttggagcaggaacttttcatccagcaacaacattgagatcgcttggcacgaaaccttggaaggctgcttacgtacaaccatcaagaagaccaacagacggtaggtacggtgaaaatccaaatcgattacaacactattatcaatttcaagtaattataaaaccttctccaaaaaatattaaacaactttatttaaaaagcttagcgaccatcggtatagatgtaa

SEQ ID NO: 298657 - DNA, 599 bp, Unknown
  Bacterial polypeptide expressing nucleotide sequence isolated from the Sargasso Sea
ttctccatcgaatattaaaaaactttatttaaatagtttatctgtcataggtattgatcctaaaaaccacgatataagatttgttgaagatgattgggaaagtccaactttaggtgcggctggactaggctgggaagtttggtgtgatggtatggaaattactcagttcacatattttcaacaaatggccagttttgaatgtaaacctgtttcagttgaaataacttacggtttagaaagaatttgtatgtttacccagcagaaaaaaaatgtttatgatttaatttggaataacgaaggagttgaataccgagaagtttttcatcaagcagaaaaggaattttcagcttataattttgaacatgcaaatactgaaaatctttttaagatttttgatatgttcgaaaatgaagcaaaatcattaatagaaaaaaaaatatccttaccggcatacgatcaatgtttaaaagcaagtcatatttttaatgtattagatgctcgaggggccataagtgttgctcagagagctgaatacattggaagaataagagaaataacaaagtcagtagctgagatctggataaatacacaagtttaaa

SEQ ID NO: 298658 - DNA, 750 bp, Unknown
  Bacterial polypeptide expressing nucleotide sequence isolated from the Sargasso Sea
catttcatccggctactacacttagatcgcttggaccaaaggcttggaaagcagcatatgttcaaccatcaagaagaccaacagatggaagatatggagataatccgaacagacttcaacattattatcaatttcaagttttaataaaaccttcgccaaacaatataaaaaaattatatctcaatagtttgtctgttataggtattgatcataatgatcatgatattagatttgttgaagatgactgggaaagtccaacactaggagcagcaggcttaggctgggaagtttggtgtgatggaatggaaataacacaatttacatactttcaacagatggcaggtcatgaatgtaaacctgtttcggtagaaataacttatggcttagaaagaatatgtatgtttactcaaaaacaaaaaaatgtttatgatcttttatggaatgatgaaggagtaaaatatcgagatgtttttcatcaagcagaaaaagaattttcatcatataattttgaatatgctaatacagataatttatttaaaatgtttgacatgcatgaattagaagcaaaaaatctggttgaaaaaaaaatatcattacctgcatatgatcaatgtttgaaagcaagccatgtatttaatattttagatgcaagaggtgctataagtgtggctcaaagagctggatatattggaagaattagagatattacaaaagcggctgctagaatttggctagatagtcaaagttaga

SEQ ID NO: 298659 - DNA, 730 bp, Unknown
  Bacterial polypeptide expressing nucleotide sequence isolated from the Sargasso Sea
gttaagatctctaggccctaaaccatggaaagctgcttatgttcagccctcaagaagaccaacggacggcagatatggtgaaaacccaaatcgtttacaacactattatcaatatcaagtaattattaaaccatccccaagtaacattaaacaaacatatttaaaaagcttagcagctattggtatagatgttaaaaatcatgatatccgttttgttgaagatgattgggaaagtccaaccttaggggcagcaggattaggatgggaagtttggtgtgatggaatggagattacccaatttacttattttcaacaaatgacaggtatagaatgtaaacctgttccagttgaaattacttatggtcttgagaggctatgtatgtttgttcaagaaaaaaataatgtttttgatctggattggaataataatggtgtgaaatataaagaagttttctttcaagcagaaaaagaattttctgcttataactttgagtttgcaaatactgatgctttacttaaaagttttgaaaatactgaaaatgaatgtaaatctttacttcaaaaaaatctttcattaccagcttatgatcagtgtttaaaagctagtcatatatttaacttattagatgcccgaggagttataggtgtagcagaaagaactggttatatcacaaggataagagagcttgcaaaaggatgcggctcactatggttaagctctcaaagttaa

SEQ ID NO: 298660 - DNA, 832 bp, Unknown
  Bacterial polypeptide expressing nucleotide sequence isolated from the Sargasso Sea
tatgaataatacctcaatggaagacttagtctctttatgtaaaagacgaggtttcatatatcaatccaatgaaatttatgggggtctacaaggcctttatgactatggtcctttaggagtagaacttaaaaataatttaaaaaaatcttggtggaaatccatgatatatgaaagagatgatatagaaggaatagactcatccatattaaccaatcctctagtcttaaaatattctggacatgaaaatacctttactgatcctttggttgattgcaaatcctgtggtgaaagattcagagcagatcaagtaccagattattgtaagaaagaagatttaacagagccacggcagttcaatctaatgttcaaaacgaatgttgggccaattgaagatggaaattcttttgcctacttaagacctgaaacagctcaaaatatctttacgaattttaaaaatgttcttgattctaatcctcaccctcttccatttgggattgctcaaatggggaaagcatttagaaatgagataactccaagaaactttatattcagagtgcgcgaatttgagcaaatggaactggaattttttgtgaagccaggtgaagatgagaaatggcataaaaagtggactgatttgagactgcagtggtgggaagatcaaggggtaagcaaggagagtttaaagatatatcatgttcccgatgacgagttggcacactactctaaagctactgtggacattatgtataactttccacatggtctagaagaactggaaggaatagctcataggacagattttgatctaggatcgcatactagggggccaaaa

SEQ ID NO: 298661 - DNA, 830 bp, Unknown
  Bacterial polypeptide expressing nucleotide sequence isolated from the Sargasso Sea
tatggcctctaaaaaaaataaaaaaactccaaagtttcaaacctttcaagacacaatttttaatttacaaaaattttggagtaaacatggttgtgtaattttacaaccttatgacatggaagttggtgctggtacatttcacccagctactacattgagatctcttggacctaaaccatggaaagctgcttatgttcaaccttcaagaagaccgacggatggcaggtatggagataacccaaatagacttcaacattattatcagtttcaagttataataaaaccatctccatcaaatataaaaaaactttatttaaatagtttgtcagtcataggcattaatcacaaagatcatgatattaggtttgtagaagatgattgggaaagcccaactcttggagccgcaggacttggatgggaagtatggtgcgatggaatggaaattacccagtttacctattttcagcaaatggcaggttttgaatgtaaacctgtttctgttgaaataacttatggtttagagagaatttgtatgtttactcaacaaaaaaaaaatgtttttgacttgatttggaatagtgaagacgtgaaatacggagaagtttttcatcaagctgaaaaagagttttcagcatacaattttgaacatgcaaatacagaaaatctttttaagatttttgatatgttcgaaaatgaagcaaaatcattagttgaaaaaaagatatctttaccagcatatgatcaatgtttaaaagcaagtcatattttcaatgtgttagatgcacgaggagcaattagtgtagcacaaagagctgaatatattagtagaa

SEQ ID NO: 298662 - DNA, 852 bp, Unknown
  Bacterial polypeptide expressing nucleotide sequence isolated from the Sargasso Sea
aatcaagatggaaagcagatcaaatcaatttaaatgaatgtccaaactgcaaatcaaaagatctaaccgatccaagaccttttaatttgatgtttaaaactgcaattgggccagttgatgatggaagttcttttgcatacctaagacctgagacttgccaacaaatttttacaaactttaaaaatattttagactcaacaagtagaactgttccatttggcatagctcaaattggtaaggcttttagaaatgaaataactcctagaaattttatttttagagttagggagtttgaacaaatggaattagaattttttgtagagccaggggacgatgacaaatggcataaacattggataaataaaagattacaatggtggattgaacaaggcataagtggagaaaatcttaaattgctaaatgtagaaaaaaatgaactttcacactattctaaagcaactgtcgatattatgtataaatttcctcatggaaatgaagaattagaaggtatagctaatagaacagatttcgacttaggttcacataccaaaaaccaagctgatttttcaattacttcaaatgttactaaaaatgaacattcaactacaaaactttgtgttcataatcttgaaaaaaagaatttttatattccttatgtaattgaaccatcggcaggtgtagatagaggtgttttggctttgctaaatgaggcatatagagaggaaaagattgataatgaaaacagtagaattgttctttctttaaaacctcatttatcaccaattaaagctgctgtaattccattaaaaaaaaataatgaaaaaattgttaatttatcaaaaagaaattaaa

SEQ ID NO: 298663 - DNA, 773 bp, Unknown
  Bacterial polypeptide expressing nucleotide sequence isolated from the Sargasso Sea
aagcagagtagtgccattcggtattgctcaaattggtaaagcttttagaaatgaaattactccaagaaattttatctttagagttagagaatttgaacaaatggaattagaattttttgttgaaccaggatctgatgataaatggcataaatattgggtagataaaagaattgaatggtgggaaatgcaaggtgtaagtaaaaaaaatttacatcttgtagaagtagagcaaagtgaattatcacattattcaaaagcaacggtagatattatgtatgaatttcctcatggtaaagaagagcttgaaggaattgcaaacaggactgattttgatttaggctcacacactaaaaatcaaaaagattataatattagctcagatgttaaaaaaaataaacattctacaaccaaattaggagtgcaaaatctggaagaaaaaacctcttatatcccatatgtgatcgagccttcagctggagttgatagagggttacttgctattttgaatgaagcttatacaatagaaagcatagaaaatggtaatgtaagaacagttttgaaattaaaaccacatttatcacctattaaagcggcagttatacctttgaaaaaaaataatgaagaaattgtagctaaggcaaaagctattaaaaatgaactacaaaatctgggaatgggcagagtgattctagaaaattctggaaatattggaaaaaattacagacgtcatgatgaaattggaactcccgatttgtattactgtagattttgaa

SEQ ID NO: 298664 - DNA, 811 bp, Unknown
  Bacterial polypeptide expressing nucleotide sequence isolated from the Sargasso Sea
agacactttttcagacccaatggttgattgtaaatcttgtggattacgttttagagcagatcaagtgccaaaaagctgcaaaaaagaagaccttacagagcctcgacagtttaatttaatgttcaaaacaaatgtagggccaatagatgacggaagcaactatgcttatttaaggccagaaacagcacagcaaatatttacaaattttaaaaatgttgtcgatgctacttcaagaagcttgccttttggtattgctcaaataggtaaagcatttagaaatgaaattacgccaagaaactttatatttagggtaagagaatttgaacaaatggagcttgagtattttgtcgctcctggttcagacgatgatgctcacgactcatgggtacaaaaaagaattgaatggtgggtaaaacaaggtgtacccatggaatctattgaattatatgacgtacccacggaagaacttgcccattattcaaaaaaaactattgatttgatgtacaagtttcctcatggtctagaggagctagagggtatagcaaatagaacagactttgatcttggttctcactctaaaaaacaggaagagttaaatatagtatctaaagtaaaaaagaataaagattcaaatagcaagctaagtattaatgataatgagaagggtatggtggtgccctatgttattgagccaagcgcaggagttgaaagaggaatgcttgcgattctaaacgaagcttatactgttgaggagcttgaagataaaaaaactaggattgttttaaaactaaaaccacatcttgccccgata

SEQ ID NO: 298665 - DNA, 802 bp, Unknown
  Bacterial polypeptide expressing nucleotide sequence isolated from the Sargasso Sea
tatgcaggacataataatgctgctaaatgtgtactggcacaaacagggctgtatactcacatccccttatgatgttgaaactggagctggaacaatgaacccaatgactacacttagaactttggggccggaagaatggaatgtagcatatgttgaaccatcaaggcgaccagctgacggtcgttatggtgaaaatccaaatcgtctatatcaacatcatcaataccaagtaattttaaaaccatcacctgataatgtagaagaactgtatcttgaatctctcaaagcaatgggtataaatccactagaccatgatattcgttttgtagaagacaactgggaagccccaactctaggcgcatggggactgggttgggaaatctggcttgatggtatggaaataactcagttcacctactttcaacaggtaggtggtatcgagtgtaatccagtttctgctgaactaacctatggtcttgagagaatagcctcatacctgcaagatgtggataatgtctttgatatagaatacacaaaaggggtcagttattcagccatattcaagcaacctgaatttgaacattcaaaatatacatttgaagtggcagatacagaaatgttgtttcagcactttaatgattatgaaaaggaagcaaatcgagcacttgatcaaagactggtctttccagcatatgattatgtacttaaatgctcacatacctttaaccaactggatgcaaccggtgcgattagtgtctcagcaagggcatcatttataagaagggtacgaaacattgcccaa

SEQ ID NO: 298666 - DNA, 861 bp, Unknown
  Bacterial polypeptide expressing nucleotide sequence isolated from the Sargasso Sea
tatggtctctaaaaaaaaaaaaaataataaagaacctttaacattccaagaaacaatacttgctcttcaaaagtattggtctaaacaaggatgtattatactccaaccttatgatttagaagtgggagcaggaacttttcatccagcaacaactctgagatcattaggagataaaccatggaagaccgcctatgtacaaccatctagaagaccaactgatggacgttatggtaataatccaaatagactgcaacattattatcaatttcaagtgctaataaaaccatctccaactaatataaaaaaattatatttaaatagtattgccgcgataggcattaatcatgaagaacatgatattagatttattgaagatgattgggagagcccaactttaggtgctgcaggactagggtgggaggtctggtgtaacggtatggaaattacacaatttacttattttcaacagatggcaggtatagaatgcaatcccatttctgttgaactcacttacggacttgaaagactttgcatgtttatccaaaataaaaaaaatgtttttgatttaaaatggaatgatgaaggagttttatataaagaagttttttatcaatctgaaaaggaattttctgcatataattttgaatatgcaaatacggataatttatttaaaatttttgatatgattgaagaagaagctgaatctttagtcgaaaaaaaaatatctttgcctgcttatgatcaatgtttgaaagcaagccatatatttaacatactggatgcaagaggagttattagtgtagctcaaagagctgagtatatttccaaaattagagatctaacaaaagcaataggcaaagt

SEQ ID NO: 298667 - DNA, 822 bp, Unknown
  Bacterial polypeptide expressing nucleotide sequence isolated from the Sargasso Sea
gaaatgcccaaactggcaaagcatttcgaaatgaaattgtagcacgccagttcatctttagaatgagagaatttgaacaaatggaaatgcaatttttcatccctcctggcactcaaaaagagtggtatgagcactggaaaaataatagattaaaatggcatttagcattgggtatgggagaggataagtatcgttttcatgatcacgaaaaattggcacactatgcagatgctgcttcagatatcgaatttctttttccttttggatttaaggaacttgaaggcatccattccaggacagactttgaccttgcaaatcatgaaaaatttacaggtaaaaaattacagtattttgatccggaacataataataattatataccatttgtgatagagacatcaattggtttagatagaatgtttcttgccgtattatcaaatgcattaactgaagaaaacctagagaatggagcttctagaacggttttaaaattaccgcccgctcttgctcctacaaaagttgcagttttacctttagtcaaaaaagatggtttaccagaactggctagaaaaattatagagcaattaaaatgggatttaactactacctatgacgaaaaagatgctattgggaggcgctatcgaagacaagatgcattgggaactccgttttgtattactgtggatcatcaaagtttaaatgacaaaacagtgactttcagagatagagattctatgaagcaagagcgattttcaatagattctttaaacaatatggtggcagaaaaagtttcaattaattctcttctcaaaaaactttaga

SEQ ID NO: 298668 - DNA, 874 bp, Unknown
  Bacterial polypeptide expressing nucleotide sequence isolated from the Sargasso Sea
atgccaactaaaaaaaaattaaaatttttatcctttcaagagatcataatgaatttgcaaaaattttggggaaaatatggttgtataatcttacaaccttatgatctagaagtaggggcaggaacttttcatccagcaacaactttaaggtctttaggatctaaaccatggaaagcagcttatgtgcaaccttcaagaagaccaacagatggaaggtacggagaaaatccaaatcgattacaacattattatcagtatcaagttataattaaaccttcacctgataatattaagcaaacttatttaaaaagtttatccacaattggtattgatgttaaaaatcatgacatacgtttcgtcgaagatgattgggagagtccaacattaggtgcagcaggattaggttgggaagtttggtgtgatggtatggagataacacaatttacttattttcaacagatgacgggattggaatgtaagcctgttccagttgaaatgacttatggtttagaaagactatgtatgtttgttcaaggaaagaaaaatgtattcgatcttgattggaataatgaaggagtaaaatacaaagatgtattttttcaagcagaaaaagaattttctgcatacaattttgaatttgccaataccgaaactttattgaaaaattttgaatcaacggaagctgaatgtaagtctttattagataaaaaactttctttgcctgcttatgatcagtgtttaaaagcaagtcacatatttaatttacttgatgctagaggagtaattggtgttgcagaaagaactggttatataaacagaataagagaactagcaaaagggtgtggagcactttggttaagtacacaaatttaat

SEQ ID NO: 298669 - DNA, 842 bp, Unknown
  Bacterial polypeptide expressing nucleotide sequence isolated from the Sargasso Sea
ccttactgaacctagaccgtttaatctgatgtttaaaacaaacattggccctgttgctgacgatgaatcttatgcatatttaagacctgaaacagcccaacaaatatttactaacttcaagaatgtagttgattcaacatcaaaatctataccttttggtattgcccaaattggtaaagcctttagaaatgaaattactccgagaaactttatttttagagtgagagagtttgagcagatggaattagagttctttgttaaaaaaggtgaagatgaggattggcacaaatactggattgaagaaagaataaattggtgggtccagcaaggagttaataaagagaaaattgaaattttgaatgttccacaagaagaactatcacactactctaaagcaactatagatctaatgtatgaattccctcatggtgtggaggagttagaaggaattgcaaatagaactgattttgaccttggttcacattcaaaaaaccaacaagatcttgatatagaagctaatgtcttaaaaaataaggattcaaacgcaaggctagctattcaaaatattgattcaaaggaatgggaagtaccatatgtaattgaaccatcagcaggtgtagataggggtgtgctggccatattgaatgagtcgtataaggaggaaacccttgaaaatgggaaaaatagagttgtattagctttaaaacctcacctctcaccaatcaaagctgcagttataccaataaaaaagaatgattcgacaattgtcgaattttcaaaacaaatcaaggataacttgcagaaattgggcttaggtagggttgttttggaaaatacaggaa

SEQ ID NO: 298670 - DNA, 378 bp, Unknown
  Bacterial polypeptide expressing nucleotide sequence isolated from the Sargasso Sea
tatggtttctaaaaaaaaaattaaaaaacctaattttcaaacttttcaagatactatcttgaacctacaaaagtattggggcaaactaggttgtgtagttttacaaccttatgacatagaagttggggctggcacttttcatcctgcaactacactaagatctttaggaccaaattcatggaaagctgcatatgtacaaccatcaagaagaccgactgatggaagatatggaaataacccaaatagacttcaacattattatcaatttcaagttttaataaaaccatctccaaaaaatattaaaaaattatatctaaatagcctatctacaattggaataagttataaagatcatgatattagatttgtagaagatga

SEQ ID NO: 298671 - DNA, 407 bp, Unknown
  Bacterial polypeptide expressing nucleotide sequence isolated from the Sargasso Sea
aatgccaaaaaaaattaaaaataaaaaaaacttttttacatttcaagatgttgtttttaatttacaaaaatactggagcaaatacggttgtgttatattacaaccttatgatttagaagtcggcgcaggaacttttcatccggcaacaactttacgttcactcggaccaaaaccatggaaagcagcttacgttcaaccatcaagaagaccaacagatggaagatatggaaaaaatcctaatagacttcaacattattatcaattccaagttataatcaaaccctctccaaaaaatattaaacaaatttatttaaaaagtttgtcatccataggaataatagccaaggatcatgatattagatttgtagaagatgattggggaaagcccccactctcgtgcagctggg

SEQ ID NO: 298672 - DNA, 453 bp, Unknown
  Bacterial polypeptide expressing nucleotide sequence isolated from the Sargasso Sea
tatggtctctaaaaaaaaaaagaaaccgaattttcaaacttttcaggatacaatttttaatttacaaaagtactggagtaaacatggttgtataattctacaaccatatgatattgaagttggggctggaacatttcatccagcaaccacattaagatctcttggaccaaaaccttggcaggcggcttacgttcaaccttcaagacgaccaactgatggtagatacggagataatccaaatagacttcaacattattatcaatttcaagttataattaagccctctccaacaaatattaaaaaactctatttacagagcttatcagtaattgggataaatcataaagatcatgatataagatttgttgaggatgactgggaaagcccaactcttggtgctgcaggacttggatgggaagtttggtgtgatgggatggagattactcaatttac

SEQ ID NO: 298673 - DNA, 897 bp, Unknown
  Bacterial polypeptide expressing nucleotide sequence isolated from the Sargasso Sea
tgtagagcttaaactaaatttaaaatcagcatggtggaaatcaatggtctatgaaagagacgatgttgaaggactggactccactattttgacttcacctactgttttgaaatattctggtcatgaggatacattttcggatcctttggtcgattgtaagaaatgtaaatcaagatggagagcggatcaatttgaagatggtaaatgtcctaattgcaaatcaactgacttaactgatcctaggccttttaatttaatgtttaaaactgcgataggcccagttgatgatggtagttcatttgcatatttaagacctgaaactgctcaacagatttttgtaaacttcaaaaatgttgttgactcaacaagtagagtacccccttttggtatagctcaaattggaaaagcatttagaaatgaaatcacaccaagaaacttcatctttagagttagagagtttgaacaaatggagctagagtattttgtaaaacctggttctgatgaagattggcataaatattgggtagataaacgtctaaattggtgggctgaacaaggagtcaaatcagaaaagttaaaattacttgaggttgagaaaaaagatttatctcactattcaaaagctacattcgatattatgtatgactttccccacggtcttgaggaacttgagggtattgccaatagaactgattttgacttaggatctcactctaaaaatcaaaaagattttaatatcaaagctaatattcaagaaaacaaaaactctacaacaaaattagctattcaagatttagaaaataaagagtggtttataccttttgttatagaaccttctgcaggagtagagagaggtgtcttggctgttttgaatgaggcttatactattgaggaggc

SEQ ID NO: 298674 - DNA, 550 bp, Unknown
  Bacterial polypeptide expressing nucleotide sequence isolated from the Sargasso Sea
tatggtctctaaaaaaaaaaaaattaaaaaagagccattaacatttcaagaaacaatatttgctcttcaaaaatattggtctaaacatggatgcgttatacttcaaccttatgatttagaggtgggagctggaacttttcatccagcaacaactcttagatcattaggtgaaaaaccatggaagactgcatatgtccaaccatctagaagaccaactgatggacgctacggtgaaaatccaaatagacttcaacattattatcaatttcaagtattaataaaaccatctccaagcaatataaaaaaattatacttaaatagtattgcaacaataggcattaatcataatgaacatgatattagatttgttgaagatgattgggagagtccaactctaggtgctgcgggattaggatgggaagtttggtgtaatggtatggagattacacaatttacttatttccaacagatggcaggcatagaatgcaagcctatctcggtagaaattacttatggtctcgaaagactttgtatgtttattcaaaaataa

SEQ ID NO: 298675 - DNA, 703 bp, Unknown
  Bacterial polypeptide expressing nucleotide sequence isolated from the Sargasso Sea
aaagcagcatatgtacaactttcaagaaggcctacagacggcaggtatggagaaaatcaaaatcggttacaacattattatcagtatcaagtaataatcaaaccttctcctgaaaacattaaaaaaatttatcttaaaagtttatcagctattggtatagatgttaaaaaacatgatattagatttatcgaagatgattgggaaagcccaactctgggtgcagcaggactaggctgggaagtttggtgcgatggaatggagattactcaatttacatattttcagcaaatgactggaatagaatgtaaaccagttcctgtagaattaacttatggcttggagaggctatgtatgtttgtgcaaggtaaaaaaaatgtatttgatttagactggaataatgaaggtgtaaaatacagagaggtatttttacaagcggaaaaagaattttctgcctacaattttgaatttgctaatactgaaacattgttaaaaagttttgaagtatgtgaaacagaatgcaaatcactgttagataaaaaactttctttaccagcttacgaccaatgcttaaaagctagccatttgtttaatttacttgatgctagaggagttattggtgttgcagagagaactggttatataaacagaataagagaactttcaaaaggttgcggggcactttggctaagcactcaaatttaaa

SEQ ID NO: 298676 - DNA, 687 bp, Unknown
  Bacterial polypeptide expressing nucleotide sequence isolated from the Sargasso Sea
aatgcctgcaactaatattgaagatcttatagctctttgtaaaagaagaggctttatatttcaatccagtgaaatatatggtggcactcagggtttatatgactatggtcctttaggtgtcgaattaaaaaataatattaaaaattcttggtggaaatcaatcgtgtatgaacgtgatgatgttgaaggacttgatgcagcaatactcacaaagcaatcagtactaaagtattctggtcatgaagaaacttttaccgatccattagtggattgtaaatcctgtggtgaaagatttagagctgatcaggtccctgattattgtaaaaaagaggatttaactgaacctcgtcaatttaatttgatgtttaaaacaaacataggtccagttgacgatggcaaaacatttgcctacctaaggcctgaaacagctcaacaaatttttacaaactttaaaaacgttgttgactcaacttctagaaatgtaccattcggtattgctcaaataggaaaggcttttagaaatgaaattacattaaaaagtttcatcttcagagtaagagaatttgaacaaatggaattagaattttttgtagttcctggtacagatgaagattggcataaaaaatgggttgagttaagaattaattggtgggagaaacaaggagtttctaaaaaaagcttagaact

SEQ ID NO: 298677 - DNA, 407 bp, Unknown
  Bacterial polypeptide expressing nucleotide sequence isolated from the Sargasso Sea
aatgccaaaaaaaataataaataaaacaaaaaactacataacttttcaagatctagtttttaatttacaaaaattctggagcagatatggttgtgtaattttgcaaccctatgatttagaagttggagcaggtacgtttcatccagctacaacgctacgctcacttggtcccaagccgtggaaagcagcttatgttcaaccttcaagaagacctacagacgggagatatggcaaaaatccgaatcgtttacaacactattatcagtatcaagtaattataaaaccatctccccaaaatattaaacaagtatatttaaaaagtttagctgctataggaatccaagcaaaagatcatgatattagatttgtagaagatgattgggaaagcccaacactaggggcagcag

SEQ ID NO: 298678 - DNA, 513 bp, Unknown
  Bacterial polypeptide expressing nucleotide sequence isolated from the Sargasso Sea
gatgccagcagaaaaaagggatgaaatccgaactgattttcagtctatcataatgaatttgcagcgctattgggctcaacaaggggcggtcgttcttcaaccgtatgatatggaggttggcgctggtacttttcacccggctacagttttgcgctccctcggtccagatgacgtttggcgtgcggcttacgtccagccgtctcggcgcccagctgatgggcgttacggtgaaaatccaaaccgtttgcaacactattaccagtttcaggtggtccttaaaccttcgcctgtccactctcaggccgtttatctcgggtctttaaaagctataggacttgatcccaatctccatgatatacggtttgttgaggacgattgggaatctccaacattgggtgcctggggtctaggctgggaagtttggtgtgacggtatggaaatatctcaatttacttattttcaacaagttggtggcgtggagtgtaatccggttccccttgaattaacatatgg

SEQ ID NO: 298679 - DNA, 310 bp, Unknown
  Bacterial polypeptide expressing nucleotide sequence isolated from the Sargasso Sea
atggtttctaaaaaaaagaaaacaaaaaaacctcgtctcctatcttttcaggatacaatcttgaatttacaaaagtattggagcaaacaagggtgtgttttagttcaaccttatgatatggaggtgggcgctggtacattccatcctgctactaccttaagatcattagggccaaaaccatggaaagttgcttatgtacaaccgtcaagaagaccaacagatggaagatatggagataatccaaatagattacaacattattaccaattccaggttttgatcaaaccatcaccagacaatattaaaaaat

SEQ ID NO: 298680 - DNA, 835 bp, Unknown
  Bacterial polypeptide expressing nucleotide sequence isolated from the Sargasso Sea
atcgatcaaggttgtgttttattacaaccgtatgacttagaagttggtgcaggtacattccaccctgcaactgtacttcgagttttaggtccagatccaatttggaaagcagcatatgttcaaccgtgccgaagaccaactgatggaagatatggtgaaaatcctaatagacttcagcactattatcaatttcaggttattattcaaccatctccagaagatatacaaaatttatatctagagagtttaaatttcattggcctaaaccctaaaaatcatgacatcagatttgtagaggatgactgggaaagcccaactcttggtgcatcaggtttaggttgggaaatttggtgtgatggaatggaaataagtcaatttacgtatttccaacaggtaggtggtattgaggtaaaacctgtcgctagtgagatcacttatggtcttgagagattagctatgtttattcaaaaaattgaaaatgtttatgatttagattgggatggtatcgaaaaaaataaaggtggtaaaacttatggtgatatttttttacagcaagaaaaagaattctctagatataattttgaaaaagctgatacatcctttttatttaagcaatttaatgatgccgaaactgagtgcaaaaatttgttagatgataagaaaaatcctttagctcttcctgcatatcatcaatgtattaaagcaagtcatattttcaatttattagatgcaagaggcgttatttctgtttcagagagacaatcatacatcttaagagttagaaatatggctagatcttcttgtcttgcttggatgggtaaattaaatgaataat

SEQ ID NO: 298681 - DNA, 672 bp, Unknown
  Bacterial polypeptide expressing nucleotide sequence isolated from the Sargasso Sea
aatgccagctcaatcaatggaacaattagtatctttgtgtaaaaggagagggtttatttttcaaacaaatgaaatttatggcggtcttcagggtgtctatgattatgggcctttaggtgttgagttaaaggaaaacttaaagaggtcttggtgggcggcaatggtctactcgagagatgatgttgaaggtcttgatgcctctatacttactaataaaaaagttcttaaatattcgggtcacgaggatacctttacagacccactagttgattgtaaggactgtaataatcgcatgagagcagatcatttaaaagatagtaagtgcttacattgtgggtcaacaaaccttactgaacctagaccgtttaatctaatgtttaaaacaaacattggccctgttgctgacgatgaatcttatgcatatttaagacctgaaacagcccaacaaatatttactaacttcaagaatgtggttgactcaacatcaaaatctataccttttggtattgcccagattggtaaggcttttagaaacgaaattactccgagaaactttatttttagagtgagagagtttgagcagatggaattagagttctttgttaaaaaaggtgaagatgaggattggcacaaatactggattgaagagagaataaattgggtgggttcagc

SEQ ID NO: 298682 - DNA, 670 bp, Unknown
  Bacterial polypeptide expressing nucleotide sequence isolated from the Sargasso Sea
atctgatggtagatatggagataatcctaatagacttcaacattactatcaattccaagtgatagtaaagccttcaccatcaaatataaaaaaactttatttaaatagtttgtcagtaattggtataaattataaagaccacgatattagatttgtcgaagatgactgggaaagtccaactttaggtgctgctggattgggatgggaagtatggtgcgatggaatggaaattactcaatttacatattttcaacaaatggcaggatttgaatgtaaaccagtttcggtagaactcacatatgggttagagagaatttgtatgtttactcaacaaaaaaaaaatgtttacgacttagtttggaataatgatggggtggaataccgtgaagtttttcatcaagcagaaaaagaattttctgcttacaattttgaacacgcgaacacagaaaaccttttcaagatttttgatatgtttgaaaatgaagcaaagtcattagttgagaaaaatatatctctacctgcctatgatcagtgtttaaaagcaagtcatgtttttaacatattagatgcgcgtggtgcgatcagtgttgctcaaagagctgagtatataggcaaaataagagaaatcacaaaatcagtcggtgaaatttggattgattcacaaaaatag

SEQ ID NO: 298683 - DNA, 653 bp, Unknown
  Bacterial polypeptide expressing nucleotide sequence isolated from the Sargasso Sea
ccagtggtatctcgacctaggatccccagaagaacagctccgactgagagcacacgacgacgacgaactcagccactactcatcaggtaccagtgacgtcgaattcctgtttccttggggttggggtgaactcgagggtgtagcgaacagaggcgatttcgacctactgcaacacgctgaacactcaggccaaaaactcgaatacttcgatcaaggcaccggcgaacgatatgtaccccactgcatagaacccgccgcgggcgcgactcgttcgatgatggcgttcctcatggctgcctacgacgaagaacaagtgaatgacgaaacccggacagttcttagactgcacccccgactagctccctacaagatcgcagtgctacctctgtctaagaaagacacgctgttacccaaagctgaagaagttctcgcgctcctacaaccgcacttcatgtgtgattacgacatcacccaagcaattggtaagcggtaccgacgtcaagacgaaatcggcaccccatattgcgtaaccatcgacttcgactccctaaaagacgacgcagttaccgtccgagaacgcgactccatggaacaagaacgagtcgccaccgacgagcttgtctcatacctcactgaacagttagctctgtaat

SEQ ID NO: 298684 - DNA, 390 bp, Unknown
  Bacterial polypeptide expressing nucleotide sequence isolated from the Sargasso Sea
aatgcaaaagccagagtgttttcaacaaatcatattgatgctacagaatttttggtctgataagggttgtgtgatactccagccttacgaccttgaggtgggagccggaactttccatccagctacaactcttaggagtttaggcccagatcattggtcagccgcttatgtacaaccttgccgacgacccactgatggccgttatggagatagtccaaaccgattacaacattattatcagtttcaagttgttatgaagccttcacccactacgttaaaagaaatgtatttggaaagcctaagcgtattgggtatagataaccgggttcacgacatcagatttgtagaggacgattgggaaagtcccactcttggagcatgggggctggg

SEQ ID NO: 298685 - DNA, 727 bp, Unknown
  Bacterial polypeptide expressing nucleotide sequence isolated from the Sargasso Sea
atgccagctaaaaaaaaattaaaatttttatcttttcaagagatcataatgaatctgcaaaaattttggggcaaatatggttgtataattttacaaccttatgacttagaggtaggggcaggcacatttcaccctgcaacaactttaagatctttaggacctagaccgtggaaggcagcttatgttcaaccttctagaagaccaactgatggaagatatggagaaaatccaaatcgattacaacattattatcagtatcaagttataatcaaaccatctccagataatattaagcaaacttatttaaaaagtttgtctgcaattggtattgatgtaaaaaatcatgacatacgttttgttgaagatgattgggaaagtccaactttgggcgctgctggtttgggctgggaagtctggtgcgatggtatggagataactcagttcacttattttcaacagatgacaggattagaatgtaatccagttccagttgaaatgacttatggtttagaaagattgtgtatgtttgttcaaggaaaaaagaatgtatttgatttggattggaataatgaaggagtaaaatataaggaagttttttttcaagctgaaaaagaattttctgcatataattttgagtttgctaataccgaaactttattaaaaagctttcaatcaattgagatcgaatgtaaatctttattagataaaaaactttctttacctgctt

SEQ ID NO: 298686 - DNA, 745 bp, Unknown
  Bacterial polypeptide expressing nucleotide sequence isolated from the Sargasso Sea
gatgggtatgcactatgcccgtttagacggcgagccagaagctgtagccgtagcgctaaacgagcaatacaagccacgttttgccggcgacagcctgccaagccagcttgaagcttgtgctgtagccatcgccgataaaatggattcgctggtcggtatctttggtataggtcaggcgccaaaaggcgacaaagacccgttcgccttacgccgtgctgccattggtgcactgcgtattatggtggaaaagcagttacctttggatctgcttgaactgattgaattcagtaaaaccacctttggtgacaagctgactcaacaaagcgtttcggacgaagtgctggactttatgctgggccgtttccgcgcctggtacgaaggcgaaggttttggtgtagacgtgatccaggctgtattagcccgccgtccaaccaatccggccgacttcgaccgtcgtgtgaaagctgtagcagaattcctaaaactggacgccgctttagctttagccgctgccaataagcgagtcgcgaatattctggccaaagtgaccgaagctattccacaaagtatcaacagcgctctgctgagcgaagaagccgaacaagctctgtataaagctatagtggccgaacaggcgtatcaggccactgtaagcagctacgctgaaggtttaagccatctggccgccatgcgcgatgtagtagaccagttcttcgacaaagtaatggtaaacgccgacgatgca

SEQ ID NO: 298687 - DNA, 636 bp, Unknown
  Bacterial polypeptide expressing nucleotide sequence isolated from the Sargasso Sea
aacattattatcaatttcaagttataataaaaccttcagtagataatattaaaaaactctatttgaatagtttatcattaattggaattgatcattctgttcatgatattagatttgtagaagatgattgggaaagtccaactttgggagcagctggtttaggttgggaggtttggtgtgacggtatggagataacacaatttacatatttccaacaaatggcaggttttgaatgcaaaccagtgtctgttgaaattacttatggtttagaaagaatttgcatgtttacacaacaaaaacaaaatgtttatgaactaaactggaatgacgatggtatcaaatatcacgaagtatttcatcaatcagaaaaagaattttcaaaatataattttgaatatgcaaatacggatgatttatttaagatttttaatatgcatgagactgaagcaatgtctctgtcaaaaaatgctatttcattaccagcctatgatcaatgtttaaaagcgagtcatgtttttaatatattagatgcaaggggtgccataggtgttgcggaaagagcagaatatattagtagaataagaaatatagttaaattagcagctgaagtttggatagaaactcaaaaagtttaaa

SEQ ID NO: 298688 - DNA, 373 bp, Unknown
  Bacterial polypeptide expressing nucleotide sequence isolated from the Sargasso Sea
tagtatttacgatttaatatggactgacggtccgctaggtaaagttacctatggtgatgttttccatcaaaacgaagtagaacagtctacctttaactttgaacatgccaatgtcgatgcattgtttagaacattcaatgaatgtgaagcgcaaagtaacgttttaattgaaaacaacctgccacttcctgcttatgaacaggtaatgaaagcatctcatgcatttaacttgttagacgcgcgatacgcaatatctgttactgaacgtcaacgttatattttacgagtacgcacgttggcaaaagcctgtgcagaaagttattaccaagctagagaagcattaggctttccactttgcagtaaggaggcatag

SEQ ID NO: 298689 - DNA, 877 bp, Unknown
  Bacterial polypeptide expressing nucleotide sequence isolated from the Sargasso Sea
ctaaaaaaaaataaaaaaaataaatttcaaacttttcaagatacaattttaaaccttcagaaatattggagtcttcaaggttgtgttatattgcaaccatatgatatggaggttggggcaggaacttttcatccagcaaccactttaaggtctctaggacctaagccatggaaaactgcctatgttcagccatcgagaagaccaacagatggtagatacggagacaatcctaatagacttcaacattactatcaatttcaagttcttatcaagccttcgccaaaaaatataaaaaaaatgtatttaaaaagtttgtcagctattggcataaaacacacagagcatgacataagatttgtggaagatgattgggagagtccgacacttggagcagctggactaggatgggaagtttggtgtgatggcatggaaataactcagtttacatattttcaaaaaatggctggaatagaatgcaaaccaatatctgttgaattaacttatggtctcgaaagaatttgtatgtttactcaacaaaaaaaaaatgtatttgaattagcctggaataatgagggaattaaatatagagatgtatttcatcaagctgaaaaagaattttcagcatataattttgagcatgctaatactgataatctttttaaaatttttgatatgctagaaaaagaaagcaaatctttattagaaaaagaattatctttgccagcttatgatcagtgcttaaaagctagtcatgtttttaatatattagatgcaagaggtgcaattagcgttgcacaaagagcttcttatatagcaagaatcagagaaattacaaaatatgttggcgaaatttggttaaaaagccaaactaaataat

SEQ ID NO: 298690 - DNA, 890 bp, Unknown
  Bacterial polypeptide expressing nucleotide sequence isolated from the Sargasso Sea
ttgcatatttaagaccagaaaccgctcacaaatttttacaaattttaagaatgtagttgattcaacatcaagaacattaccttttggaattgctcaaattggaaaggctttcagaaatgaaataactccaaggaattttatttttagagtaagggaatttgaacaaatggaattagaattttttgtagagcctggtagtgatgaggaatggcatcaaaaatgggttgatgaaagagtcagttggtgggaacgacaaggcgtggataaaagtaaattagaaattattgacgtcgataaagaagatttatcgcattattcaaaaaaaacggttgatataatgtatgaatttcctcatgggcttgaggaattagaaggtatcgcaaatagaactgattttgatataggatcacatactaaaaatcagaaagattttgaaataaatgctgatgttataaaaaatgatgactcagtaacaaaattagcaattcaagataagattaacaatacatggactataccttatgtaattgagccatcggcaggagttgatagaggatttttagcagtattaaacgaggcatataaagttgagaagctagaaaatggtaaagagagaactgttttatctctaaaatctcacttatcgcctataaaggctgcggttattcctttaaaaagaaataatcaagatttagttaacaaagcagtagaattgaaaaagcaattgcagtcaattggcttaggaagagtagtgcttgataatgcaggcaatattggtaaaagctatagaagacatgatgaagttgggacaccaatgtgcataacaattgactttgaaacattagatgataattctgttacagtaagagatagagatactatggagcaaa

SEQ ID NO: 298691 - DNA, 643 bp, Unknown
  Bacterial polypeptide expressing nucleotide sequence isolated from the Sargasso Sea
caatagactccagcattattaccaatttcaagtaataattaaaccatctccatcaaacattaaaaaactttatttaaatagcttgtcagtgataggtattaatcataaagatcatgatattagatttgttgaagatgattgggagagtcctacacttggtgccgctgggctaggttgggaagtttggtgtgatgggatggagataactcagtttacatattttcaacaaatggcaggttttgagtgtaaaccggtatctgttgaacttacttatggtttagaaagaatttgtatgtttacccaacaaaaaaaaaatgtttatgacttagtttggaataatgaaggaattgagtacaaagaagtttttcatcaagctgaaaaagagttttcatcatataattttgagcacgctaatactgaaaatctttttaaaatttttgatatgttcgagagtgaagcaatttcattagttaaaaaaaaaatatctttaccagcctacgatcagtgtttaaaagcaagtcatatatttaatgtgttagatgccagaggtgtgattagtgtggcgcagagagctgaatacattagcagaataagagaaataacgaaatcagcagcagcaatttggattgaaacacaaaaatag

SEQ ID NO: 298692 - DNA, 700 bp, Unknown
  Bacterial polypeptide expressing nucleotide sequence isolated from the Sargasso Sea
acaaaacctaattagttgtgcagtagccattgcagataagtttgatacgctggtgggtatttttggtataggccaagcaccaaaaggtgataaagacccatttgcacttcgtcgtgctgctattggtgcactgcgtattatggtagaaaaagagttacctcttgatattttagacctagtagcaaaagcacaaacattgtttggcgataagctaactaatctaaatgtatcaaccgacgtatttgaatttatgcttgggcgtttccgtgcatggtatcaagacgaaggtattgaagtagatgttattcaagctgtgttagcacgtcgtccaactaaaccagttgattttgaccgtcgtgttaaagccgtaagccacttccgtactttagacgcagcagaagcccttgcagccgcaaataaacgcgtaagtaacattcttgctaaaaacgatatcacaagccaaggtaatgttgatgagagcttattaagcgacgacgctgaaaaagtattagcatcacaagtggcaaaatttgcaactgagcttgcaccactttatgccgatggaaactaccaagaagcgcttagccaattggctggcattcgtgaaagtgttgataacttttttgacaacgtaatggttatggccgacgatgaagctgttaagcaaaatcgccttgcgctattaagtcagttaagtagt

SEQ ID NO: 298693 - DNA, 673 bp, Unknown
  Bacterial polypeptide expressing nucleotide sequence isolated from the Sargasso Sea
ccaactgacggcagatatggaaataacccaaacagattacaacattattatcaatttcaagtactaatcaaaccatcaccaaaagatattaaaaaactttatttaaatagtattgctgccattgggattaattatgaggaacacgatatcagatttgttgaggatgattgggaaagcccaactttaggagcagcaggtcttggatgggaagtttggtgtgatggaatggaagtctctcaatttacttactttcagcaaatggcaggaactgaatgtaatccaatatcagtagaaattacatatggattagagagattatgtatgtttattcaaaacaaaaaaaatgtttttgatataatttggaataatgagggaattttgtataaagatgtatttcatcaatctgaaaaagaattttcagcatacaattttgagcatgccaacaccgaatatctttttaaaatttttgatatgctcgagcaagaggctaaatcattaatagaaaaaaaagtttcacttcctgcatatgaccaatgtttaaagtctagccatgttttcaatatcctagatgcaagaggagttataagcgttgctcaaagagcagaatatatagcaaggataagagatcttacaaaagaaataggaaaagtttgggtagaaagtcaaagttaaa

SEQ ID NO: 298694 - DNA, 811 bp, Unknown
  Bacterial polypeptide expressing nucleotide sequence isolated from the Sargasso Sea
tgcaaaagaagaggatttatatttcaatcaagtgatatttatggaggagtaaaagggttatatgactatggtccaatgggtgttgagcttaaaaataatttaaaaaatgcttggtggaaatctatggtttatgaaagagatgatattgaaggattagatgctgcaatattaagttcaccaatggtctttaagcaatcaggacatgaagatacttttacagatcctttaatcgactgtaaatcttgcaaatctagatggagagcagatcaattacaaaatcaaacatgtccaaattgcaaatcaactgatttgactgaaccaagaccatttaacttaatgtttaagactgctatcggacctgttgatgatggaaaaacttttgcttatttaagaccagaaacatgccaacaaatatttacaaattttaaaaatattttagattctacaaataaaacagttccttttggaatagctcaaataggaaaagcctttaggaatgaaattactcctagaaatttcatttttagagtaagggagtttgagcaaatggagctcgaattttttgttgagcctggaagtgaagaagtttggcataaatattgggttgagcacaggctaaaatggtggatcagtcaaggaattgataaaaaaaatattaaattattaagtgttccaaaagaagacttgtctcactattcagaatcaacaatagatataatgtataattttccgcatggacaagaagaattagaagggatagcaaatagaactgattttgatttaggatctcatacaaaaaatcaaaaagatt

SEQ ID NO: 298695 - DNA, 595 bp, Unknown
  Bacterial polypeptide expressing nucleotide sequence isolated from the Sargasso Sea
atgccagctcaatcaatggaacaattagtatctttgtgtaaaaggagagggtttatttttcaaacaaatgaaatttatggtggtcttcagggtgtctatgattatgggcctttaggtgttgagttaaaggaaaatttaaagaggtcttggtgggcggcaatggtctactcgagagatgatgttgaaggtcttgatgcctctatacttactaataaaaaagttcttaaatattctggtcacgaggatacctttacagatccactagttgattgtaaggactgtaataatcgcatgagagctgatcatttaaaagatagtaagtgcttacattgtgggtcaacaaaccttactgaaccaagaccgtttaatctgatgtttaaaacaaacattggccctgttgctgacgatgaatcttatgcatatttaagacctgaaacagcccaacaaatatttactaacttcaagaatgtagttgactcaacatcaaaatctataccttttggtattgcccaaattggtaaggcctttagaaatgaaattactccgagaaactttatatttagagtgagagagtttgaacagatggaattagagt

SEQ ID NO: 298696 - DNA, 910 bp, Unknown
  Bacterial polypeptide expressing nucleotide sequence isolated from the Sargasso Sea
atgtcagcacaatctatggaacaactagtctcactttgcaaaaggcgaggtttcatttatcaaactaatgaaatttatggtggtctccaaggaatgtatgattttggtccctatggtgtagagttaaaaaataatctgaaaaatgcttggtggagtgaaatggtctatcaaagagatgatgtagaaggaatagatgcttcaattcttacaaataggctagtgcttaaatattcaggtcatgaagagacttttactgacccattagtagattgtaagagttgtggagagaggttcagagcagatcaagttcctgattattgtaaagaagaggaccttactgaaccaagacaatttaacttaatgtttaaaactagtgtcggacctgtagaagatgaaaataattatgcatatctaagacctgaaaccgcacaacaaatttttacaaatttcaaaaatgtcttgaattcaaatcctaagaaaattccatttggtattgcacaaattggtaaggcatttagaaatgaaataactccaagaaatttcatctttagagtaagagaatttgaacaaatggaattagaattctttgttaaaaaaggtgatgatgaggaatggcacaaatattggctggaaaaaagaatagagtggtggggcaaacaaggggttaccaaagataaaataaaaatacttaatgtaccggaaaacgagctgtcccattattcaaaagggacctatgacttaatgtatgaatttccacatggtgttgaggaattggaaggtatcgcaaacagaactgattttgatttagggtctcactctaaaactcaagaagattaccaaattgatgcaaaagtaatcaaaaacaatgaatcaaatgaaaaacttgtttttactgatagtgagacaaacg

SEQ ID NO: 298697 - DNA, 530 bp, Unknown
  Bacterial polypeptide expressing nucleotide sequence isolated from the Sargasso Sea
tatggtttctaaaaaaaaaaataaaaaatctaaacatcaatcatttcaagatacaatcttgaatttacaaaaatattggagcaaatatggatgcgtaattttacaaccatatgatttagaagttggagcaggaacgtttcacccggccacaacacttaggtctttaggaagtaagccatggaaaacagcctatgttcaaccttcaagaagaccaacggacggaaggtatggagaaaacccaaatagactccaacactattatcaattccaagttttaattaaaccttccccaaaaaatataaaaaaactttatttaaatagcctttcatcaattggtattaaacataaagaacacgacataagatttgtcgaagatgactgggaaagcccaacattaggagctgcaggacttggatgggaagtttggtgtgacggtatggaagtaactcaatttacttattttcagcaaatggctggtatcgaatgtaatcctatttctgtagaattgacatatggattagaaagacttt

SEQ ID NO: 298698 - DNA, 844 bp, Unknown
  Bacterial polypeptide expressing nucleotide sequence isolated from the Sargasso Sea
gacgcctcagtactgacaaaagagctagttcttgattattctggacatacagacactttttcagaccctatggtcgattgtaagtcgtgtggattaaggtttagagaagatcaagttccaaaaacatgtaaaaaagaagatctaacagaaccaagacagtttaatcttatgtttaaaacaaatattgggccaattgatgacggtagtagttatgcatatttaagaccagaaacagcacaacagatatttactaattttaagaacgttgttgattctacatcaagctcattaccatttggaattgcacaaataggtaaagctttcagaaatgaaattactccaagaaattttatatttagagtgcgagagtttgaacaaatggaacttgaatattttgtagtgcctggtgaagatgatgaagcgcatagttcatgggtacaaaagagactaaattggtgggaaaaacaaggtgtacccataaatacaatagagttatacgaagtacccatggatgaacttgctcattattctaaaagaacagtagatctaatgtataaatttccacatggtttagaggagctggaagggatagcgaatagaacagactttgatctaggctcacactcaaaaaagcaaagtgaattaaatataaatgccaaggtaaagttaaataaagattcgaatagtaaattatcaataaaaaataatgaaaatggcatggttgtaccttatgtaatagaaccaagtgctggagttgaaagaggcatgcttgctgtacttaatgaagcatttacaattgaaagtctacctgaaaacaaaagcagaatagtgcttaaattaaaac

SEQ ID NO: 298699 - DNA, 614 bp, Unknown
  Bacterial polypeptide expressing nucleotide sequence isolated from the Sargasso Sea
ggttgatttaatgtataaatttcctcacggcgtagaggaattggaaggcattgctaacagaactgactttgacttaggctctcacagtaaaaaccaaaacgaactaagcataaatgctaaaacaaaggaaaataagcattctaacgctaaattagctgttcaaaacgaagataactcctggagcgtgccctatgttattgaaccctcagccggagttgataggggctttttagctattttaaatgaagcttttattgaggaagagcttgaaaatggctcaaaaagggttgttttggccttaaaaccacatctagcaccaattaaagcggctgttattcctttaaagaagaataatgaagaattagtaattttggctaaaaaattaaaagatcagctacaaaaccatagattgggaagagttttgttagaaaatactggaaatatcggaaaaagctatagaaaacacgacgaaattggaaccccaatatgcattaccgtagattttgatagccttgagaagaatacggttacagtcagagatagggacacaatggagcaagaaaccatcccaatagatgacttatcgaaaaagtaccgcgattccattctttaat

SEQ ID NO: 298700 - DNA, 361 bp, Unknown
  Bacterial polypeptide expressing nucleotide sequence isolated from the Sargasso Sea
atggcctctaaaaaaaataaaaaaaaaccaaaatttcaaacttttcaagatacaattattaatcttcaaaagttttggagtaaaaatggatgtgtaatcttacaaccttatgatatggaagttggagctggaacatttcacccagctactactttaagatcacttgggcccaagccatggaaagcagcttatgttcagccttcacgaagacctacagatggaagatacggggataatccaaatagacttcagcattattatcaatttcaagttataataaaaccctctccactaaatattaaaaaactttatttaaatagtttgtcggtaattggaattaatcataaagaccacgatatta

SEQ ID NO: 298701 - DNA, 643 bp, Unknown
  Bacterial polypeptide expressing nucleotide sequence isolated from the Sargasso Sea
atgccagctaaaaaaaaagtcaaaaaatctaatattctttcatttcaagatatcattatgagtcttcaaaagttttgggggaaaaatggatgtataattttacaaccttatgatttagaagttggtgctggaacttttcaccccgccactacattaagatctttaggtcctcaaccatggaaagccgcatatgtacaaccttcaagaagaccaacagacggaaggtacggtgaaaatcctaatcgcctgcaacattattatcagtatcaggtgataataaaaccatctcccaaaaatattaagcaaacatatttaaaaagtttggcagctattggaattaatgtaaaaaatcacgacatccgtttcgtcgaagacgattgggaaagcccaactctcggtgcatcaggattaggatgggaagtctggtgtgatggtatggaaattactcagtttacttattttcagcaaatgactgggcttgaatgtaagcccgttccagttgaaataacttatgggttagagagactttgtatgtttgttcaaggcaagagcaatgtttatgatcttgattggaatagtgaaggagtcaaatataaagaagtttttcttcaagctgaaaaggaattttcagcttataatttga

SEQ ID NO: 298702 - DNA, 790 bp, Unknown
  Bacterial polypeptide expressing nucleotide sequence isolated from the Sargasso Sea
atggtagcaaaaactatggaagaattagtttctttatgtaaaagaagaggttttatatttcaatctaatgatatttatggaggagttaaaggtttatatgattatggaccaatgggagttgaattaaaaaataatttaaaacaatcctggtggaaatcaatggtttatgaaagggatgatatagagggattagatgcaagtatattaagctcccctgttgctttaaagcaatctggtcatgaggatacatttactgatcctttggtagactgcaaatcatgtaaatcaagatggcgatcagatcaattaattgaatcaaaatgtccaaattgcaaatcaaaagatttaactgatccgcgacctttcaatttaatgtttaaaactgctattggaccagtagatgatggcagttcttttgcatatttaaggccagaaacttgtcagcaaatatttataaattttaagaatattatagattctactaataaatctatacctttcggaatagcgcaaattggtaaagcatttagaaatgagattactccaagaaattttgtatttagagtaagagaatttgagcaaatggaattagaatttttcattgaaccaggaagtgaagataaatggcatagttattgggttgataaaagggtagaatggtggattaatcaaggagtaagaaaagataatataaaaatagaaaatgttgctaaagacgatttagctcattactcttctaaaactatagatattatatatcaatttcctcatggcgatgaagaattagaag

SEQ ID NO: 298703 - DNA, 775 bp, Unknown
  Bacterial polypeptide expressing nucleotide sequence isolated from the Sargasso Sea
atgccagctaaaaaaaaagtcaaaaaatctaatattctttcatttcaagatatcattatgagtcttcaaaagttttgggggaaaaatggatgtataattttacaaccttatgatttagaagttggtgctggaacttttcaccccgccactacattaagatctttaggtcctcaaccatggaaagccgcttatgtacaaccttcaagaagaccaacagacggaaggtacggtgaaaatcctaatcgcctgcaacattattatcagtatcaggtgataataaaaccatctcccaaaaatattaagcaaacatatttaaaaagtttggcagctattggaattaatgtaaaaaatcacgacatccgtttcgtcgaggacgattgggaaagcccaactctcggtgcatcaggattaggatgggaagtctggtgtgatggtatggaaattactcagtttacttattttcagcaaatgactgggcttgaatgtaagcccgttccagttgaaataacttatgggttagagagactttgtatgtttgttcaaggcaagagcaatgtttatgatcttgattggaatagtgaaggagtcaaatataaagaagtttttcttcaagctgaaaaggaattttcagcttataattttgaatttgccaacacggaaagtcttttaaaaaattttgaaaatacagaaattgaatgtaaatctttacttgaaaaaaaactttctcttccggcatacgatcaatgtttaaaagcaagtcatatttcaatctatg

SEQ ID NO: 298704 - DNA, 1279 bp, Unknown
  Bacterial polypeptide expressing nucleotide sequence isolated from the Sargasso Sea
atggcagctaaaacaatggaagaactggtttctctttgtaaaagacgaggttttctatttcaatcaaatgatatctacggtggtattaaaggcctttatgactatggtcctatgggtgttgagctaaaaaataatcttaaacaagcttggtggaaatcaatggtttatgaacgtgatgatactgaaggactagatgcaagtattctgagcgctccagttgttttaaaacattctggtcatgaagatactttttcggatccattggtagattgtaagatttgtaaatctagatttagagctgatcaactagaaaatagtgattgcccaagaggagggcttttgtctgactgtaaagtaaaagatttaactgaaccaagaccgtttaatttaatgtttaagactgcgattggaccagttgatgatggttcttcttttgcatatttaagaccagaaacatgtcagcaaatttttactaattttaaaaatattttagattctacttctaggactgttccatttggaattgctcaaatgggaaaagcatttagaaatgaaattacacctcgtaattttatcttcagagtaagagaatttgaacaaatggaattagaattttttgtagtacctggaactgatgataaatggcatgaatattggatagataaaagaataaattggtgggtagatcaaggaattaaaaaagaaaatcttaaaacaattgaagtcgaaaaaagtgaacttgctcattattcaaaaagaacagttgatattaattatttatttcctcacggtgaagaggaacttgaaggtattgcgaatagaactgattttgacttaggatctcatactaaaaatcaaaatgaatttaaaattgagtcaaaagtcatgaaaaattcttcatccacaacaaaattggccgttcaaaatttagaagaaaagaaatggtatataccatatgtgattgagccttcagctggtgttgataggggtgttctcgctttactaaatgaagcttataaggaagaaaatactgataaagataataaaagaattcttttatctttaaaaccacatctttccccgattaaagctgctgttattcctcttaaaaagaataaatacgaattagttaatttgtctaaagaaattaaatcaaatttgcaaaaacttggattagggcgagtggtattagaaaattcagggaatattggaaaaaattatagaagacatgatgaaattggaactcctatttgtattactgtagattttgaaacataga

SEQ ID NO: 298705 - DNA, 698 bp, Unknown
  Bacterial polypeptide expressing nucleotide sequence isolated from the Sargasso Sea
tgcttatgttcagccctcaagacgaccaacggatggaagatatggagataatcctaataggttacaacattattatcaatttcaggttttgattaaaccatctccaaaagagattaaaaaactttatttaaatagtttagcttcaattggaataaactataaagaacatgatataagatttgttgaggatgattgggaaagcccaacacttggtgcagcaggtttaggatgggaagtctggtgtgacggaatggaaataacacaatttacatattttcaacaaatggcgggaatagaatgtaatcctatttcagttgaaattacttatggattagaaagattatgcatgttcatacaaaataaaaaaaatgtttttgatttagtatggaatgatgatggtattttatatagagatgtattttatcaatcagaaaaggaattttcagaatataactttgattatgctaatacagacaatctgtttaaaatatttgatatgctagagagtgaagccaaatctttgattgaaaaaaaaatttcacttcctgcatatgatcaatgtttaaaatcaagccatgtatttaatttgttagatgcgagaggagttataagtgtagctcaaagagctgagtatataggaaggataagagatttaactaaagaaattggaaaaatttggatagaaagccaaaaataaa

SEQ ID NO: 298706 - DNA, 858 bp, Unknown
  Bacterial polypeptide expressing nucleotide sequence isolated from the Sargasso Sea
tatggcttctaaaaaaaaaaataaaaaaattaaatttcaatcatttcaagatacaatcttgaatttacaaaaatattggagcaaacatggatgcgtaattttacaaccatatgatttagaggttggagctggaacatttcaccctgctacaacacttagatctttaggaagtaaaccatggagaacagcttatgttcaaccttcaagaagaccaacggacggaagatatggagaaaatccaaatagacttcaacattattatcaatttcaagttttaattaaaccttcaccaaaaaatataaaaaaactttatttaaacagtctttcaacaattggcattaaacataaagaacacgatataagatttgttgaggatgattgggaaagtccaacattaggagctgcaggccttggttgggaggtttggtgcgatggcatggaagttactcaatttacttattttcagcaaatggccggaattgaatgtaatcctatttctgtagaattgacatacggattagaaagactttgcatgtttactcaaggaaaaaaaaatgtttttgatttagaatggaataacgatggagttttatatcgagatgtatttcatcagtcagaaaaagaattttcaaaatataattttgaattagccaatactgataatttatttaaaatatttgatatgatagagaaagaatctaaatccttgatagaaaacaaactctccttgccagcttatgatcaatgtttaaaagctagtcatatttttaatatattagatgccaggggagtaataagcgttgcgcaaagagctgagtatatagcaaggattcgagatcttgcaaaaagcgtgggtca

SEQ ID NO: 298707 - DNA, 874 bp, Unknown
  Bacterial polypeptide expressing nucleotide sequence isolated from the Sargasso Sea
atggcttctaaaaaaaaaactaagatacaaacttttcaagatacaatttttactctacaaaaattttgggcaaatcacgggtgtgtaattttacaaccatatgatttagaagtaggtgccggaacttttcatccagctacaactctgagatcacttggaccaaaaccttggaaatcagcttatgttcaaccatctagaagaccaactgatggaagatacggagaaaatccaaatagattacaacactactatcagttccaagtaataataaaaccatcacccaaaaatataaaaaaattatatttgaacagcttagaaaacctgggcattaaacatagtgaacatgatattagatttgtagaagatgattgggaaagtccaaccctaggtgctgctggattgggctgggaggtttggtgtgatggcatggaagtaactcaatttacttattttcaaaaaatggctggcatggattgtaaacctatttcagttgaaattacatatggactagaaagactttgcatgtttacccaacagaaaaaaaacgtgtttgatttagtttggaataacgaaggtattctttatagggatgtttttttacaatcagaaaaagaattttcagcttataattttgaatttgcaaacgtagataatctgttcaaaatttttgatatggttgaacaagaaacaaaattattactagaaaaaaaactgccattacccgcttacgatcaatgtttaaaggcaagtcatgtttttaacgttttagatgcaagaggagcgattagtgttgctcaaagagcagagtatattgcaaagataagagatatgacaaaaagcgtagggcaagtttgggtagataatcaaaaataaa

SEQ ID NO: 298708 - DNA, 2056 bp, Unknown
  Bacterial polypeptide expressing nucleotide sequence isolated from the Sargasso Sea
atgagtgctcaagatttcctggttgaactgggcaccgaagagctgccacccaaggcactcaataccctggccgatgcgttcctggccggtatcgaaaaaggcctgcagactgccggcctgaagtttgaagccaaaaaagtctacgccgcgccgcgccgtctggctgtgctgctgaccgcgctggaaacccagcagccggaccgcaacatcaacctggacggcccaccgcgtcaggcagctttcgatgccgacggcaacccgacccaggccgcccttggctttgccaagaagtgtggcgtagagctgagcgagatcgaccaaagtggcccgaaactgcgtttcagccaggtcatcaccggcaagccgaccgccagcctgttgccgaccatcgttgaagactccctgaacgacctgcctatccccaagcgcatgcgctggggtgcgcgcaaggaagagttcgtgcgtccgacccaatggctggtgatgctgctcggtgaccaggtcatcgattgcaccatcctcgcccagaaggccggtcgtgagtcccgtggtcaccgcttccatcatccagaaagcgtgcgtatcacttcgccggccaactacctcaacgacctgcgcgctgcttatgtgctggccgacgccaatgagcgtcgcgagctgatcagcaagcgcaccgaagaattggcccgcctgcaggaaggcaccgccatcgtgccgccaagcctgctggacgaagtgaccgccctggtggaatggccggtgccgctggtgtgctcgttcgaagagcgtttcctcgatgtgccgcaagaagccttgatcaccaccatgcaggacaaccagaaatacttctgcctgctggatgtggacggtaagttgttgccgcgttttatcaccgtcgccaacatcgaaagcaaagacccgcagcagatcatcgccggtaacgaaaaagtcgtgcgcccgcgcctgaccgacgccgagttcttcttcaagcaagacaagaagcagaagctggaagacttcaacctgcgcctgcaaaacgtggtgttccaggaaaaactcggcagtgtctacgacaaggccctgcgggtttccaagctggcagcctacattgctccacgcatcggcggcgacgcagcctgggctgcccgtgccggcttgctgtccaagtgcgacctggccaccgaaatggtcggcgagttccctgagatgcaaggtgttgccggttactactacgccctcaacgacggcgagccggacgatgtcgccctggccctgaacgagcagtacatgccacgcggtgccggtgcagaactgccgaccaccctgacgggtgccgctgtggccatcgccgacaagctcgatacgctggtgggtatcttcggtatcggcatgctgcccaccggcagtaaagacccgtatgccctgcgccgtgcggccttgggcgtgctgcgtatcctgatcgacaagaagctggacctcgacctgacccaggccgtggtattcgccgtcggccagttcggcaccaaggtcaagcaagccggcctggccgagcaagtgctggagttcgtgttcgaccgcctgcgtgcgcgttatgaagacgaaggcgtggacgtttccgtctacctgtcggtacgtgccctgcaaccgggttcggcactggacttcgaccagcgtgtacaagccgtgcaagcgttccgcaagctgccggaagccgatgccctggccgccgtgaacaagcgcgtgtcgaacctgctgagcaaggccgataacctcggcaatgccgaagtcgaccctggcctgtttgccgacgccaaggagttctcgctgaactcggccatcgccaaggcagagaacgccgtgaagccgctgatcgccgagcgtgactacgcgcaagcgttggcgcgcctggcgtctctgcgtgaaccggtagacgcgttcttcgaagcggtgatgatcaatgccgacgatgccggcgtgcgcaaaaaccgctacgcgatgctcgcgcgcctgcgtggtttgttcatcaatatcgccgacatctccgtactgggctgac

SEQ ID NO: 298709 - DNA, 1034 bp, Unknown
  Bacterial polypeptide expressing nucleotide sequence isolated from the Sargasso Sea
tatggaagaaactaacagagaattatttgaaaaagtagtaaaggtcgcacaagcaagaggatttgtttttaatgcgtcttctatttatggtggtctcagaagctcctatgattacggacctcttggtgttttacttaaaaataatatatctaaatattggtggaaagacattgataatgacagcgaaatatctatttttcctgttgatacagctattattcaaagttctgaagtgtggaaagcttcaggtcatttagctgaattctcagatcctatggttgatcataaaccaactggtgaaagatatagagctgatcaagtaccagacgatatagacaaaaaagatcttactgagcctcggcaatttaatcttatgtttgaaacaagcattggtccggtacaaaatgaaaactcaactgtttacttaaggccagaaacagcacaaggtatatttgtaaattttgagaatgttttaagaacaatgagagcaaagattccttttggaattgcaaatattggaaaatctttcagaaatgaaataacacctggacagtttatttttaggactagagagtttgagcaaatggagattgaattcttctgtaaagaagaagatgaaaataaatggtttgattattgggtaaaaaagagaatggaatggtataaatctattggaataccagataccagccttcgacttagagagcatagtgacaatgaattagctcattatgcttcaaaaactgttgatattgagtttttgtacccatggggatggggagagcttgagggaatagcaaatagaggcacctttgatctttcatctcatgaaaaagcaagtgggaaagatatgtcttactttgaccccgaaaccaatgaaaaaataacacctaccgtaatagagcctgcgggaggattaactagaacattatttgctctactttgttcttgttatgatgaagaagaagtgaatgacacaacaagaacactttttcgttttgattttaatattgcgccaatacaaatttggaata

SEQ ID NO: 298710 - DNA, 671 bp, Unknown
  Bacterial polypeptide expressing nucleotide sequence isolated from the Sargasso Sea
tatggtttctaaaaaaaaaaattttctaacattccaaaatacaatttttaatcttcaaaaatactggagtggaataggatgtgtaattttacaaccatacgatttagaagttggtgcaggaacttttcatccagctactacactcagatctttaggacctaaaccttggaaagctgcttatgtgcagccatctcgaagacctacagatggaagatacgcacaaaatccaaatagattacaacactattaccaatttcaaacaattatcaaaccatctcctgataatattaaaaaattatttttaaatagcctttcagttgtcggtatcgaacataataaacacgacattagatttattgaagatgactgggaaagtcctacgcttggggcagcaggtttggggtgggaggtttggtgcgatggtatggaaattactcaatttacatattttcaacaaatggcaggtatccaatgtaatccaatttcagtggaaataacctatggattagagagaatatgcatgttcactcaacaaaaaaaaaatgtttttgatcttatttggaatgatgaaggaacaacttataaagatatattttataagtcagaaaaagaattttctaagtataattttgaattagcaaatacggaaagtcttttaactaaattcgaaa

SEQ ID NO: 298711 - DNA, 907 bp, Unknown
  Bacterial polypeptide expressing nucleotide sequence isolated from the Sargasso Sea
catgacgacgaaacacgacgtaaaaacatttcagggtttcattctaaccctacaggaatattgggcgcagcaaggctgtgcaatcgttcaacctttagatatggaagtcggtgcgggtacattccacccacaaactttcctacgctctctagggcctgagccaatgagcagtgcttatgtgcagccatcgcgccgccctaccgacggccgttacggtgaaaacccaaaccgtctgcagcactactaccaattccaagtcgtgttaaaaccgtcaccggataatatccaagaactctatttaggttctctgcaagctctaggtattgatacacaaatccatgatatccgttttgtggaagacaactgggaatcaccaacgctaggcgcttggggtctaggttgggaagtctggttaaacggcatggaagtgactcagtttacttacttccaacaagtcggcggcttagagtgtagccctgtcacgggtgagattacctacggtttagagcgtctcgccatgtatatccaaggtgtggatagcgtgtacgacctcgtatggaccgatggtccaatgggtcgcatcacctacggtgatgtgttccaccaaaacgaagttgagcaatcgacctataactttgagcacgcagacgtcgactttatgtttgccctgttcgatcaatgcgaaaaaatgtgtcagcacttattgtcgcttgaaaaaccattacctctgccagcctatgagcaagtgatgaaagcctcgcacgccttcaacctgctcgatgcacgccacgccatttcagtgactgaacgtcagcgttatatcctgcgcgttcgtacaatggctaaagccgttgctgaatcctattatcaggcacgcgaagcgcttggcttcccaatgtgtaagtag

SEQ ID NO: 298712 - DNA, 883 bp, Unknown
  Bacterial polypeptide expressing nucleotide sequence isolated from the Sargasso Sea
atggtctctaaaataaaaaaacaaaaaaaaaaaatacaaacatttcaagaaacaatatttaatcttcaaaagttctggagtaaaaaaggttgtgtcgttttgcagccatatgatatggaagttggggcaggcacatttcatccagccaccacacttaggtctcttggccctaagccatggagagctgcttatgtacaaccatcaagaagacctacagatggaagatatggagataatccaaatcggttacagcattattatcagtttcaagttttgataaaaccttcaccggaaaatataaaaaaattatttctcaacagtttatcagtaattggcattgatcataatgaacatgatattagatttgttgaagatgattgggaaagtccaactcttggtgcagctggtttaggttgggaagtttggtgtgatggtatggaaataacacaatttacatattttcaacaaatgggaggttatgaatgtaaacctgtttctgtagaaatcacttatggtttagagagaatatgtatgtttactcaacaacaaaaaaatgtttatgatctattatggaatgatgaaggggtacagtataaggaagtatttcatcaagcagaaaaagaattttcagcatacaattttgaacatgcaaatatagacaacttattaaaaatgtttgacatgcatgagtcagaggctaaatctcttgttgaaaaaaagatatcattacctgcatatgatcaatgtttaaaagcaagtcatatatttaatattttagatgctagaggagcaataagtgtagctgaaagagctggatacattggtagaattcgtgacattaccaaagcggttgcaggaatttggttagatagtcaaagctaga

SEQ ID NO: 298713 - DNA, 952 bp, Unknown
  Bacterial polypeptide expressing nucleotide sequence isolated from the Sargasso Sea
cctgcaacagtactgggctgaacagggctgtgtcgttgtgcagccgctggatatggaagtaggcgcgggacttttccacccctccactttcctgcgcgccattggcccggaaaactggaacagtgcctatgtgcagccctcccgccgacccaccgatggtcgctacggggaaaacccgaaccggctgcagcactattatcagttccaggtggtgctgaagccatcgccagacaatattcaggagctctatctgggctcgctgcgtatgctgggctttgatccactggtgcacgacatccgtttcgtagaagacaactgggaatcgcccacgctgggcgcctggggcctgggctgggaagtgtggctgaacggcatggaagtcacccagttcacctattttcagcaagtgggcggtatcgactgttatccggtcaccggtgaaattacctatggcctggaacgcttggccatgtacatccaaggcgtggattccgtctacgacttggtgtggtcagatggccccttcggcaaggtgacctacggtgatgtgttcctgcaaaacgaagtggaaatgtccaccttcaacttcgaacacgccaatgttgacgagctattcaagcagttcgacctgtttgagggcgaatcctccaagctgattgacgcgggcctaccgctgccggcctacgagtacgttctcaaagcctcccatacctttaacctgctggatgcccgcaaggctatttctgtcaccgagcgtcagcgctttatcttgcgtgtgcgcacactggcacgggcggtggcccaggcctacttcgacaagcggcgtgcgctgggcttccccatggcggatgacaccgttcgcgaggaagtaatggcagagctgcaaaagcaggatgacaaggccgccaagcaggcccagaaagacggccaaaagaaaaaggggaagcaataa

SEQ ID NO: 298714 - DNA, 857 bp, Unknown
  Bacterial polypeptide expressing nucleotide sequence isolated from the Sargasso Sea
agcgcaaataggaaaagcattcagaaatgaaataactcctagaaattttatatttagggtaagggaatttgaacaaatggagttggagttctttgtaaagcctggtgaagatgagaaatggcataaagaatggacggaaatgagacttaaatggtggcaagaccaaggcttaagttcggacaatatagagctgtatcacgtctctgaagatgaattggctcactattctaaagctactgtagacatcatgtatagatacccccacggattagaagaacttgagggtatagccaataggacagattttgacttaggttcgcatactaaaggacaagaccaattgagcattttcagcaaggttgctgaaaatacacaatcaaatgccaaattagccgttcaagatcttaaaactaaagaatggtttttgccttatgtaatagagccttctgcaggggttgataggggatttttagcaattttaaacgaagcttatgaagaagaggctttagaaggtggcaaaacaagaatagttttacatcttaaacctcacctttcccctataaaagcagcagttataccgcttaaaagaaatgactctaatattgttgaaaaggctgtaaacctaaaaaataaacttcaaaggacaatttcagggaaagttttattggaaaataccggtaatatcggtaaaaactacagaaaacacgatgaaataggcacacctgtatgtatcaccgtcgattttcaaagtttagatgatgacacctttacagtaagggacagggatagtatgcaacaagaaagggtgagtttagaagaaattagacactttttagaagaaaattacgaaatttaag

SEQ ID NO: 298715 - DNA, 709 bp, Unknown
  Bacterial polypeptide expressing nucleotide sequence isolated from the Sargasso Sea
ccatggaaaacagcatatgttcaaccatctagaagacctacagatggaagatatggagaaaatccaaataggctccagcactattatcaattccaagtattaataaaaccttctccaaaaaatataaaaaaactttatcttaatagcattgcatcaattggaataaaacacgaagagcacgatataagatttgtagaggacgactgggaaagccctactttaggagcagctgggcttggatgggaagtctggtgtgatggaatggaagtaacacagtttacttactttcaacaaatggcaggagttgaatgtgatcctatttctgttgaaattacttatggattagaaagattatgcatgtttatacaaaacaaaaaaaatgtttttgaacttgattggaataatgatggaatcttttataaagatgtcttccatcaagctgaaaaggaattttcagcatacaattttgaatacgcaaatactgaaaaactttttaaaatgtttgatatgttagaaagtgaggcaagatcgatgattgaaaataaaatttctctccctgcttatgatcaatgtttaaaatcgagtcatgtatttaatatattagattccagaggcgttataagtgttgcgcaacgagcagaatatatctcaagaattcgagatttaaccaaagagattggaaaaatttggatagaaagtcagagttaaa

SEQ ID NO: 298716 - DNA, 769 bp, Unknown
  Bacterial polypeptide expressing nucleotide sequence isolated from the Sargasso Sea
tatggtttctaaaaaaaaaacattaaaatcaaaaaaatttttaaagccaaaatttaaatcttttcaagagacaattatgaatcttcaaaactattggggaaaaaacggctgtgttattttacagccatacgatatagaagtcggggcaggaacttttcatccagcaactactttaagatcattaggtcctatgccttggaaaacagcatacgttcaaccttcaagaagaccaactgatggaagatatggaaaaaatcctaatagacttcaacactactatcaatttcaagtattaataaaaccatcaccaaaaaatattaaaaaactttatttaaatagtttaaaatctatagggataaatcatttaaatcatgacattcgatttgttgaagatgattgggaaagcccaactttaggagcggctggattgggctgggaagtttggtgtgatggaatggaaattactcaatttacatactttcaacaaatggctggaatagaatgcaaacctgtttctgttgaattaacttatggtttagagagaatatgtatgtttacacaaggtaaaaaaaatgtatttgatctggattggaacaatgaaggaataaaatatagagatgtattttatcgagctgaaaaagaatattctgcctataattttgaatatgctaatactgataatctttttaaaatttttgatatgcttgaaaatgaaacaaaatctttattagataaaaaactttctttacccgcttatgatcaatgttaa

SEQ ID NO: 298717 - DNA, 688 bp, Unknown
  Bacterial polypeptide expressing nucleotide sequence isolated from the Sargasso Sea
atggataagacaatagaaaaaatagtttccttgtgcaaaagaagaggattcattttccagagctcggatatttacgggggtttttcggcagtttatgattacggtcctcttggtattgaactaaaaaacaatatttcaaacctctggtggaaagaaatgacccaagtccatgaaaatattgtgggcctagacagtggtatacttatgcatccaaaaatttgggaagcctcaggacatgtgggagcatttaatgatcctttagtagattgtaaacaatgtaaatcgagatatcgcgctgatgagttttcagaaaattatagttcaatcaattgggaagaaactaagtgccctaattgtggttcagttggtattcttactgagcctagacaatttaatctaatgtttaaaacacacgtcgggcctgtggaagaaactggaaccgaggcttttttaagacccgagactgcgcaagggatctatgttaactaccaattagtccagggtgcaatgagaatgaaagtcccatttggcatcgcacaaattggaaaagcttttcgtaatgaaatagttgcaaggaattttattttccggacgcgagaatttgaacaaatggagatgcaatactttgtaaaacctggtactgacaatgaagcttttagtcaatggaaagacaagcgactaaattttt

SEQ ID NO: 298718 - DNA, 886 bp, Unknown
  Bacterial polypeptide expressing nucleotide sequence isolated from the Sargasso Sea
tatggcttctaaaataaaaactaagaaacctaaatttcaatcttttcaagatacaatcttgagtctgcaaaaatattggagcaaacaaggatgtgtggttttacaaccttatgatatggaagttggagctggaacctttcatcctgcaactacattaagatctttaggaactaaaccatggaaggctgcatacgtacaaccatcaagaagaccaactgatggaaggtacggagacaatccaaatagacttcagcattattatcaatttcaagttttaattaaaccttcaccaaaaaatataaaaaaactatatttaaacagtttgtcaacaattggaattaaccataaggatcacgatattagatttgtcgaagatgattgggaaagtccaactttaggtgcggctggattaggttgggaagtatggtgtgatggtatggaaattacacaatttacttattttcaacaaatggctggatttgaatgtaagccagtttcagttgaacttacttatggtcttgagagaatttgcatgtttacacagcaaaagaaaaatgtttttgatcttttgtggaacactgaaggaataaaatacaaagatgtttttcaccaagcagaaaaagaattttcagcatataattttgaacatgcgaacacagataatttatttaaaatttttgatatgttagaattagaggcaaaatctttaacagaaaaaaaaatatctttacctgcatatgatcaatgtctaaaggcaagtcatgtctttaatattttggatgccaggggggtaataagcgttgctcaaagagcagaatatattggaaggataagagatataaccaaaggtgttgctggggtttggttgaaccatcaaacaaaataa

SEQ ID NO: 298719 - DNA, 871 bp, Unknown
  Bacterial polypeptide expressing nucleotide sequence isolated from the Sargasso Sea
aatgttttttcaggatatagttcaaaatttaaataatttttggtcagaagaaggttgtttgattatgcagccatatgataccgaaaagggtgcagggacaatgaatccgcatacttttttaagggctattggaccagagccttggagtgttgcatatgcagagccatgtagaagacctacagacggacgttttggcgataacccaaatagggcgcaacattactttcaatatcaggtaattattaaaccttcaccgcaaggaatccaagaaaaatatttgaaatctctagagtctcttggaattaagcctagaaatcatgacataagatttgtggaagataattgggagtctccaacacttggagcctggggtgtaggttgggaagtttggttagatggcatggaagttactcaatttacttacttccagcaatgtggggggatagattgtaatccaatcccaattgaaattacttatgggctagagaggattgcaatgtttttgcaggataaggaaagtatctgggacttaagttggaacaaagatttgaaatatagcgaaatttggcttcaatttgaaaaaagtcaatgctcttataattttaccgaatctaatgcagacaatctcaggaaattatttgaaatttatcaagttgaggcaatttctttaacagaaaagaaattaacttaccctgcgcttgattttgttttgaaatgtagtcatacatttaatcttcttgatgctagaggtgtgatttcggttacagatcgggcacaatatattgaaaagattcgaaaattagcaagagaagttgctgcatcatgggtagaggaaagagaatctcttaactttccattaataaaaaaataa

SEQ ID NO: 298720 - DNA, 1063 bp, Unknown
  Bacterial polypeptide expressing nucleotide sequence isolated from the Sargasso Sea
atgagtaaaaaacatttagataaaattgtatctctttgtaagcgtaaaggttttgtatttcctaattctgaaatttatggaggattaaaagcatcttacgattatggcccacttggtgttgatttaaaaagagcaatatctgaaaaatggtggaaggcaatgactcataattcgaatattgttggtttagatagttcaataatggtccatcctgatgtctgggaagcaagtggtcatgtagccaatttcaatgatcctatgacggacaataaagataacaaaaagcgttatagggttgatgatttattattgcagcaaaaaaacaaagttattgatgctctctgtgaaatgatgtcaatcgaaaataataacgataatgacacaattgataaaattagtagtacactattaaatgacgcaaataaatataacgatgctttagagtctgcgggggttattgatccattttctggaaatgttggtaaatggacacaagctacccaatttaacttaatgtttaaaactaatgctggcccctctgaaaaaactggtaaaagtgtttacctaagacctgaaacagctcagggtatttatattaattacctcttagttcaaaattctatgcgtttgaaggtgccttttggtattgctcaaactggaaaagctttcagaaatgaaatcattgcaaggaattttatttttagaaccagagaatttgaacagatggaaatgcaatattttgtgcatccttccgaagatgagtcttctatgaacttttggaaaaaacaaagaatggatttttattcctcagaacttggcataagtaatgaaaatttaaaatttcatcaacattcaaaagatgcattggcacattatgctaaagatgcatttgatattgaatataactttccatttgggtggggtgaagttgagggaattcataatagaacagattttgatttgaaagaacatgaaaagttatctggtaaaaacatgatgtactttgatgccattaaaaacgaaaaatatcatccttatataattgaaacatctactggttgaa

SEQ ID NO: 298721 - DNA, 604 bp, Unknown
  Bacterial polypeptide expressing nucleotide sequence isolated from the Sargasso Sea
aatgccagctcaatcaatggaacaattagtatctttgtgtaaaaggagagggtttatttttcaaacaaatgaaatttatggtggtcttcagggtgtctatgattatgggcctttaggtgttgagcttaaagagaacctgaagaagtcttggtgggcagcaatggtctactcgagagatgatgttgaaggtcttgatgcctccatactcactagtaaaaaagttctaaaatattcaggtcacgagaaaacttttacagacccgctagttgattgtaaagtatgtaaaaatcgcatgagggcagatcatttaaaagatagtaagtgcttacattgtggttcaaaaaatcttactgatcctagaccgttcaatctaatgtttaagacaaatatagggcctgttgcagacgatgaatcttatgcatatttaagacctgaaacagcacaacaaatatttactaatttcaagaatgtagttgactcaacatcaaaatccctaccctttggtattgcacaaattggtaaggcctttagaaatgaaatcactcccaggaactttatatttagagtgagagagtttgaacagatggaattagaattctttgtt

SEQ ID NO: 298722 - DNA, 1522 bp, Unknown
  Bacterial polypeptide expressing nucleotide sequence isolated from the Sargasso Sea
ttttaaagttaaagactttgaagatataaaaagaaagttaagagatgcttatgtaatcctagatcataaggaacgagctgagataattctaaacgacgcaaataacttggcgtttgctcatggattagatttaatccatgatgatgctttattagaagaagtttcaggtttggttgaatggcctgtcacactgttgggcgaagtagataatgcattctctgatctgccggctgaagtgctccaagcgtctatgaaagaacatcagaagtttttttcgttaaaaaattcgaaaactggtaaaattgaaagatttattacagttgctaatattgaagctgcagacaatggcgaaacaattttaaagggaaatcaaaaggttctttatgctagattatccgatgcaaaattcttttgggagaatgatatccgtttaattcaaaaagacggtcttgatgcgtggctaggaaagctcgatgatgtaacatttcacaataaactgggaagtcaggctgataaggtaacgcgtgtttctactctaacaaagatattggccaagcaactcttgtgcgacatagaagacgctgtaacgagcgcaaatatctgcaagtgtgatttagcgtctgaaatggtctatgaatttccagagcttcagggtgttatgggcagatattacgctttacgcgcaggatattctgaagatgtagctaaagtatgcgaagaacactatgctcctaaggggccaaatgaccctgtgccgacggcttcaatatccgtcgcggtttctcttgctgataaattagatacattacttggattttggactattgatgaaaagcctactagttcaaaggatccatttgcacttagacgagctgcacttggagtcataagaataatccttgaaaatgatgtggaactcgatttagtcgaagtgctcaatgctcatttcgaacatttatctaaatttggtaatcatccacatgcagtatctgatgttatgaattttattcgtgataggtttaagatttatcttcgggataaaaatatccgttatgatgtagtcgatgcatgtttagcagttggaaaagttggaaatcttaagctggttaaaaagcgaattaatgcacttgcaaaccttttaagtagtgatgaagccgaggactttttccaaggatttaaacgagcaaataatattttggcaaaagcagagcaaaaagacggtgtagaatattcttttggagccgatataaaatatatggaagttgatcctgaaaaggaattatttaatgccttgaaggaacagcactcagttgttgaacaggcagtttttgaagaagcctttcaaaaagctattttagccgttacagatcttaggcagccgatagatgatttttttgaatgtgttcaggttaattctgagaatgacattgtaaggcggaacaggcttaatttactcggccaaattagggccacttgcaatttagtagccgatcttagcaaaatcgaaggtcaatctggttag

SEQ ID NO: 298723 - DNA, 1363 bp, Unknown
  Bacterial polypeptide expressing nucleotide sequence isolated from the Sargasso Sea
atggcagctgaatctatggataaattagtagctctttgtaagaggagaggctttattttccagaccaatgaaatctatggtgggctgcaaggggtttatgattacggacctctgggagtcgagctaaaaaataacttgaaacgttcttggtggaatgcaatggtctatgaaagagatgacatagagggtattgattcttctatattgactaatccattggtcttaaaacaatcaggtcatgaagaaactttttcagacccgctagtagactgtaaaaattgtaaagcacggataagggctgaccacctgaaagatggaaagtgtcccgaatgcggctcggatgatttaactgacccaaggccattcaatttgatgtttaaaacgaacgttggtcccatagaagatggatcgtcgtttgcctatttaagaccagaaacggcccaacaaatattcactaactttaaaaacgttcttgactctactccgcatcatctgccttttggtattgcgcaaattggtaaagcatttagaaatgaaattactccaagaaactttatttttagggttagggaattagagcaaatggaaatggagttctttgttagaccaggagaagatgaaaagtggcataaaacttggacagatttaagggtagcatggtgggaaaaacaaggcataaataaaaaaagcatcgaactactagatgttcctaagaatgaattagcgcattattcaaaagcaacgatagatattatgtataaatacccgcatggtttagaagagcttgaagggatagcaaatagaacggactttgatctgggttcacatactagagaccaatcaaaattaaagattgcagcaaaagttgataaaaatactaaatctaatgcaaaaatggccgttcaagatcctgaaaccagggaatggatagttccttacgttatcgagccagccgcaggtgtagaaagaggtgttttggctgttctaaatgaagcttataaagttgaagagctagaagatggcaaagaaaggactgttttgtccttaaagccccacctttctccaattaaggcagctgttatacccttaaaaaagaataatgaagacctagttaaaaaggcaaaagaattaaaaaatgcactacaaagtttaggcttgggaagagttttgcttgaaaattcagggaatataggcaaaagctataggcgccatgatgaaataggaacgcccatgtgcataaccgtagactttgaatctctagaagatggaactgttaccattagagatagagactctatggaacaaagtagactggatgttgcctcagtttctgatcatttcaaaaaaactatagataattaga

SEQ ID NO: 298724 - DNA, 1351 bp, Unknown
  Bacterial polypeptide expressing nucleotide sequence isolated from the Sargasso Sea
atgaataatgcctcaatggaagacttagtctctttatgtaaaagacgaggtttcatatatcaatccaatgaaatttatggaggtcttcaaggcctttatgactatggacctttaggagttgaacttaaaaataatttaaaaaaatcttggtggaaatccatgatttatgaaagagatgatatagaaggaatagactcgtccattttaaccaatcctctagtcctaaaatattctggacatgaaaacacgtttactgatcctttggtcgattgcaaatcttgtggtgaaagattcagagcagatcaagtaccagattattgcaagaaagaagatttaacagaaccaaggcaattcaaccttatgttcaaaacgaatgttgggccaattgaagatggaaattcctttgcctacttaagacctgaaacagctcaaaatatctttacgaattttaaaaatgttctagattctaatcctcaccctcttccgtttgggatagctcaaatgggtaaagcatttcgaaatgagataactccaagaaactttatatttagggtacgcgaatttgagcagatggaactcgaattttttgtaaaaccaggtgaagatgaggaatggcataaaaagtggactgatttaaggctgcagtggtgggaagatcagggggtaagcaaggagagattggagatatatcatgttcccgatgatgagttggcacactactctaaagctactgtggacattatgtataactttccgcatggtctagaggaactggaaggaatagccaataggacggattttgatctaggatcccacactagaggccaaaaggaccttaatatagatgcaactgttgcagaaaatactcaatcaaatgcaaaacttgctatacaagacctagaaactaagcaatgggtggttccatacgtaattgagccttctgctggtgttgatagaggatttttagctattctcaacgaagcatataaggttgagagccttgaaaataataaagaaagaacggttttatctctaaaaccacatcttgcacctataaaaattgctgttattcctctaaaaagaaatgaaaattcgatagtaatgacatcagtagatctaaaaaatgacttacagcgaacaattgaagggcgagttcttctagaaaacactggtaacatcggcaaaaactacagaaaacatgacgaaattggtacacctgcttgtatcaccgtcgattttcaaactcttgaagacaatacggtaactataagagatagagatacaatggatcaaacaagattgaaaatagacgaagttagaacctttttagcgcaaaattataagatttaga

SEQ ID NO: 298725 - DNA, 1258 bp, Unknown
  Bacterial polypeptide expressing nucleotide sequence isolated from the Sargasso Sea
tatggtcctcttgggggtagaacttaaaaataatctaaaaagctcctggtggagtgcaatggtttttgaaagagacgacattgagggccttgatgcatccatattgtcgaaaaaggagttattcaaatactctggccacgaagagacattttcggaccctttggtagattgtaaatcctgtaagtcaaggtggagagaggacctgattgaagacagaaaatgcccaggttgcggttcatctgaattaacagcggcaagaccatttaacctaatgtttaaaactccagttggtccagtagaaaacgaagaaaattatgcgtacctgaggcctgaaaccgcacaacatatttttgcaagttttaaaaacgttaaagactcgacatcgagacaaatcccttttggaatagcacaaattggtaaggcttttagaaatgagatcaatccaagaaatttcatatttaggttaagagagtttgagcaaatggagttggaatattttgtcaagcctggggaagatgagagcactctagagtattggaaaaaggaaagattagagtggtgggaacgccaaggcattgatctttcaaatattgaaatctacgatgtgcccgaaaacgagcttgcacattattccaaaaggactcttgatatcatgtacagatttccacatggtcttgaggaactagaggggattgccaatagaacagattttgaccttggttcacacacaaaaaaccagaaggatctatctctaagctcatcagttgttgaaaacgatgagtcaaccatgcgtcttgcggtacaagaccttgaagccaatgcgtggtatgtcccatatgttatagagccttctgctggtgtagacaggggtgttttggcaatcttaaatgaggcatacacgaatgaagatattggtgaaggcaaacagagggttgtgctaaaactaaaacctcacctgtcccctattaaagcagctgtaattccgcttaagaaaaacaaagatgagcttgtgtccatggcaaaagaaataaaacaatcacttcaatcgctcggtttgggtagagtctttttagaaaacactggaaacatcggtaaagcatataggaggcacgatgaggttggcaccccagtctgtattacggttgactttgatagtcttgaaaacaatacagttaccataagagacagggacacaatggaacaaagcagggtagatatttctgaactaaagcaatcctacctcagtattttaaagtag

SEQ ID NO: 298726 - DNA, 1360 bp, Unknown
  Bacterial polypeptide expressing nucleotide sequence isolated from the Sargasso Sea
atggcctctaataacatggaagacctcgtttcattatgtaaaagacggggatttatttttcaatcaagtgaaatttatggtggcttgcaaggaatatatgactatggtccactcggagtagaattgaaaaataaccttaaatcctcgtggtggaaatcaatgatctatgatcgagatgacgttgaaggacttgatgcatcaattttaacaagtaggcatgtattaaaatattcaggccatgaagatactttctctgatcctttagtcgactgcagaaattgtaaaaatagatttagatctgaccaggccacggatggaaaatgtccagcatgtgggtctagcgatctaactgaacctcgaccatttaatcttatgtttaaaaccacagttggtcctgtagatgatggcagtaattatgcttacctaagacctgaaaccgcacagcaaatttttacaaattttaaaaatatattggactcaacaagtaagactattccttttggaatcgcgcagataggcaaagcttttagaaatgaagtcactccaggcaaattcatattcagagttagagagtttgaacaaatggaattagaatttttcgttgaaccaggtaaagatgacgagtggcataaatattgggtagacaagaggtattcatggtggattgatcaaggcatatctgaaaaaagattaaaaaagctagatgttgaagatgctgacctatctcactactcaaaagctactgtagatcttatgtatgaatttccacatggacttgaagagttagaaggtatagcaaacagaactgatttcgatcttggctctcacactaaaaatcaaaatgactttaaaatatccgcagatgtaatgaaaaataaccaatcaacaacaaaattgagtattcaaaatttagaaagtaaagaatggtacatcccgtatgttatagagccctcagctggtgttgatcgaggtgtatttgcgctactcaatgaagcttacaaggaggaggatctagaaaacggaaataaaagaattgtattaagtttgaaaccgcatttgtctccaattaaagcggccgtaattcctctaaaaagaaataatgaggatttagtcaataaagcaagcaagattaagaatgatcttcaagcactaggtatgggaagggtcattttagaaaactctggtaatattggaaaaggttatagacgtcatgatgagataggtacacctatttgtataacagttgactttgaaacaatcgaaaatgatacagtgactgtaagagatagagatactatgtcacaaaaaagagtttcatctcaagacttaaatcatgaatataaaaaagtttttaattaac

SEQ ID NO: 298727 - DNA, 664 bp, Unknown
  Bacterial polypeptide expressing nucleotide sequence isolated from the Sargasso Sea
atgtcagctaaatcaatggatgaattagtctctttatgcaagagaagaggattcatttttcaatctagtgaaatctatggtggcttacaaggtatgtatgactttggtccgcttggagttgaattaaaaaataatttaaaaaatgcatggtggaaatccatggtttatgaaagagatgatattgaaggattggatgcgtcgatcttaacaaatcaacttgtattaaattattctggccatgaagatacttttacagatcctttggttgactgtaaaagttgtaagtcgagatggagagcagatcaaattgaagatgcttgcccgaattgcggcagtaaagatttgactgatcccagaccttttaacttgatgttcaaaacaaacgtgggccctcttgaagatgaaggatccattgcgtatctcagaccagagactgcgcaacagatttttacaaactttaagaatatagttgattcaacatcaagagctttaccttttggtattgcgcaaattggaaaagcttttcgaaatgaaataactccgagaaattttatttttagggttcgtgaatttgaacaaatggaattggaattttttgtacagccaggagaggataatctctggcatgagaaatggattgaggaaagatcaaagtggtgggaga

SEQ ID NO: 298728 - DNA, 886 bp, Unknown
  Bacterial polypeptide expressing nucleotide sequence isolated from the Sargasso Sea
atggtttctaaaaaaaaaacaaaaaattcaaaatcatttatttcttttcaggatacaattttaaatcttcaaaagtactggtcaaaaaaaggttgcgttattttacaaccttatgatttagaagttggagcaggaacatttcacccagcaacaactctaagatcattaggttctaaaccatggaaaacagcttatgttcaaccatcaagaagaccaacagatggaagatatggagaaaatcctaatcgtttacaacattattatcaatttcaagttttaataaaaccttcaccaaaagatattaaaaaaatgtatcttaatagcctttcatcaataggtattaaatacgaagagcacgatatcagatttgtagaggatgattgggaaagtccaaccttaggtgctgctggtcttggatgggaagtatggtgtgatggtatggaagttactcaatttacttattttcaacaaatggcaggtatggaatgcaatccaatatctgttgaaattacttatggtttagagagattatgtatgtttattcaaggtaaaaaaaatgtttttgatttaatttggaatgatgagggagttttatacaaagatgtttttcatcaagctgaaaaagaattttcagcctataattttgagtatgcaaacacagataaattatttaaaatttttgatatgctcgaagaagaagcaaaatcattaattgaaaagaaaatttctcttccagcatatgatcaatgtttaaaatcaagtcatgtgttcaatattttagatgctagaggagttataagtgttgctcaaagagcagaatatattgcaaggatcagagatctgacaagagaaattggaaaaatctgggtagaaacacaaaattaaa

SEQ ID NO: 298729 - DNA, 1360 bp, Unknown
  Bacterial polypeptide expressing nucleotide sequence isolated from the Sargasso Sea
cttggccgcaaaaaacatggaagaattagtctctctctgtaaaaggaggggttttgtatttcagtcaggagaggtatatggcggccttcagggtgtttatgattatggtcctttgggcgttgagctaaaaaacaatctaaaaaactcttggtggagctcaatggtttatgaaagagatgacatagaagggcttgatgcatccatattgtccaagcaagagcttttcaagtattcagggcatgaagaaactttttcagacccattggtggattgcaggtcgtgtaaatctaggtggagagaagatttagttaaagatggaaaatgcctgtcttgcggctcaacagacctaacagaggcaagagcttttaatttgatgtttagaacacctatgggtcctgttgaaaatgaagagagctttgcatatcttaggcctgagacagctcaacatatttttacaagctttaaaaacgttcaagactcgacatctagacagataccttttggtatagctcaaattggtagagcattcagaaatgaaatcaatccgagaaattttattttcaggctgagagagtttgagcaaatggagttggaatattttgtaaggcctggcgacgatgaggctgcactagattattggagagatcaaagattaaggtggtgggaagaccaaggtatcgagccttccagtcttgagatttacgatgtcccagaatctgatctggcacattattctaaaagaacacttgatattatgtaccgctttcctcatggtctagaagagcttgaaggcattgcgaatagaactgactttgatctcggttctcatacaaaaaatcaacggggtctcggtttggtttctgaaacaaagaagaatgatgagtcaactatgaggctggctgttcaagacattgaggccaaaaaatggtacgtcccatatgtaatagagccctctgctggggtagataggggtgttttagcaatattaaatgaggcttataccgttgaagatttaggcgaaggaaaagaaagggttgtattaaggctaaagtcgcacctctcaccgattaaagctgctgtaataccccttaagaaaaacaaagaggagcttgttgcactagcaaaagacatcaaatcaaaccttcaatcgatggggaagggcagggtgtttttagaaaatacaggaaatattgggaaagcctaccgaagacatgatgaggttggtacccctgtgtgtattacggttgattttgatagtttagagcacggaacggttacgttaagagatagggatactatggagcaacggacggttgcaatttctgaactgaatcaactgtacctagattccttaaagtaa

SEQ ID NO: 298730 - DNA, 883 bp, Unknown
  Bacterial polypeptide expressing nucleotide sequence isolated from the Sargasso Sea
tatggtttctaaaaaaaaaaaaataaaaaaagaaccattaacatttcaagatacaatacttacattgcaaaaatattggtctaaacaaggatgcatactcttacaaccttatgatttagaagttggtgcaggtacatttcatccagcaaccactctaagatctctaggagagaaaccatggaagactgcctatgttcagccctctagaagaccaacagacggacgttatggagataacccaaatagattgcagcattattatcagtttcaagttttaataaaaccatcacctagtaatataaaaaaattgtatctaaatagtattgctgcaataggaatcgattataacgaaaatgatattagatttgtagaagatgactgggaaagcccaactcttggagcggcaggattgggatgggaagtgtggtgcaatggtatggaaattactcaatttacttattttcaacaaatggcaggaatagaatgcaaacctatttctgttgaaattacatatggattagagcgactttgcatgtttatccaaaataaaaaaaatgtatttgatttaacttggaacaatgatggagtttcttataaggaagtatttcatcaatctgaaaaagaattttcagcatataatttcgaacatgcaaatacagctaatttatttaaaatttttgatatgatagaagaagaagcaaaatctctaattgaaaaggaaatttctttaccagcttatgatcaatgtttaaaagctagccatatatttaatattcttgatgcaagaggtgtaattagtgttgctcaaagagcagaatatatttcaaaaattagagatctcaccaaagcaataggaaaaatctggcttgaaagtcaaaaataa

SEQ ID NO: 298731 - DNA, 597 bp, Unknown
  Bacterial polypeptide expressing nucleotide sequence isolated from the Sargasso Sea
aatggaacaattagtgtctttgtgtaaaagaaggggttttattttccaaacaaatgaaatctatggtggtcttcaaggtgtctacgattatgggcctctgggtgtagaattaaaggagaatcttaagaaggcttggtggacatcaatggtctactcaagagatgatgttgagggcctggatgcgtcaatacttactaataaaaaagttcttaaatattctggtcatgaagaaacttttacagatccattggttgattgtaaggactgtaagaatcgtatgagagcagatcatataaaagatagtaagtgcttacattgtggctctacaaaccttacagaacctagacccttcaacctaatgtttaaaacaaacatagggcctgttgcagatgatgaatcttatgcttatttaagacctgaaactgcacaacaaatatttactaacttcaaaaacgtagttgactcaacatcgaaatctattccttttggtatagcccaaattggaaaggcttttaggaatgagataactccgagaaactttatttttcgagtgagagagttgaacaaaggaattagagtttttgaaaaaaagggaag

SEQ ID NO: 298732 - DNA, 1330 bp, Unknown
  Bacterial polypeptide expressing nucleotide sequence isolated from the Sargasso Sea
atggacgaactagtcgcactttgtaaaaggagaggactaatttatcaatctagtgatatttatggtggtcttcaaggtgtatatgatttcgggcctttgggtgttgaacttaaaaataatataaaaaaagcttggtgggactcaatgatctatcaaaatgatgatatagagggccttgattcggctattttaacaaatccattagttttaaagtattctggacatgaggatacattttctgatcccatggttgattgtaagtcttgtgggctaaggtttagagcagatcaagttcctgattcgtgtaaaaaagaagacctaactgaaccaaggcagtttaatctaatgtttaaaacaaatgttggccctcttgaagacggagaatcttttgcatatttaaggcctgagacagctcaacagatatttacaaattttaaaaatgttgtagattctacttcaaagtcacttccttttggaattgctcaaataggtaaggcatttaggaatgagataactccaaggaacttcatatttagagttcgtgaatttgaacaaatggaattagaatattttgtaaaaccaggtacagatgatgatattcataattcatgggtacaaaaaaggctaaaatggtgggtggatcaaggtgtacccatggaaagcattaccttatacgaagtgccaactaatgagctggcacattattctaaaagaactatagacttgatgtataactttcctcatggcgttgaggagctagagggaatagcaaataggacagattttgatcttggttcacactctaaaaaacaaaatgatttgaatataaagtctaatataacaaaaaataaagattctaatagcaaattagctgttcaagaagatggtgaatgggttgtcccatatgttatagagccttcggctggggttgagagagggtttttagcaatcattaatgaagcatatagtgtagaagatttagaagatggaaaaagcagggttgttcttaaacttaaaccacacttatctccaataaaagctgcagttattcctttaaagaaaaataataaagaaattgtcagcttatcaaaattagttaaaaaaaggttacaaaaacttggtcttggtagaataatatttgaaaatactggaaatattggaaaaagttatagaaaacatgacgagattgggactcccttgtgtatcacagttgattttgaaagcttagatgataaatcagttactgttcgtgatagagatacaatgaaccaaactcgtattgagtttgaaaagctgaatgactttcttataaacacaattaaaaattaag

SEQ ID NO: 298733 - DNA, 1012 bp, Unknown
  Bacterial polypeptide expressing nucleotide sequence isolated from the Sargasso Sea
tttgactgaacctcgtcaattcaatctaatgtttaaaacaaatgttgggccaatagatgatgggtcatcttttgcttatttaagacctgagaccgctcaacaaatttttacaaattttaaaaatgttgttgattctacttcaaagcaaataccatttggtatagctcaaataggaaaagccttcaggaacgaaataactcctaggaattttatatttagagttagagagtttgaacaaatggaattagaatattttgttgagcccggaaatgatgaacaagcattagatgaatgggtacaaaaacgactaaattggtggaaagatcagggtgtacccatagaaaaaattgagttatacgatgtacccacagatgagctagcccattactctaaaaggactgtagatttgatgtatatgtttcctaacggattagaagaattagagggtattgctaatagaacagattttgatttagcctcacattctaaaaaacaagatgaacttaatataacatccaatgttgaaaaaaataaacattcaaatagcaagatggcagttcaagataaaaaaggtgattggatcgtaccgtatgtcatagaaccatcagctggtgttgaaagaggtattttagctgtattaaacgaagcatttgttaaggaaaaccttggtgatggtaaaacaagagttgttttaaagcttaaacctcatttatcaccaataaaagcagcaattttgccattaaagaaaaataatgaagaaatagtaaccttgtctaaagaggttaaaaatagtctacaaaaattaggcttaggtagggtaatcctcgaaaacacaggtaatattggtaaaggctacaggagacatgacgaaataggtacgcctgtatgtataactgttgactttgaatcaattgaagatagctctgttactatacgggatagggactccatggatcaggtaagggttcagatttcagaactagctgaaatttataaaaataagattaaataa

SEQ ID NO: 298734 - DNA, 1363 bp, Unknown
  Bacterial polypeptide expressing nucleotide sequence isolated from the Sargasso Sea
tatgacagcaaaatcgatggaacaacttgttgctcttgcaaaaagacgtggttttatattccagtcaaacgagatttatggtggtctacaaggggtatacgattatgggccactcggtgttgaattaaaaaataatcttaaaagtatatggtggtcctcgatggtctatgagcgcgatgacattgagggacttgatgcctcaatattaacgcattcagatgttctcagatattccgggcatgaagaaacctttactgatcccttaatagactgcaggtcatgtaagtaccgatgcagagctgatcaactcgttgacggcaaatgtcctaattgcggttctaatgatctcacagagccacgaccatttaacctaatgtttaaaacatcggttggcccaatagccggtgatgataactttgtctatttaaggccagagacagcacaacaaatttttacaaattttaagaatattcttgattctagctcgagatccttgccatttgggattgcacaaattggaaaagcatttaggaatgagattacaccaagaaattttatctttagagtaagagaatttgaacaaatggaattagaatattttgttcatccagcaaaagatcaagattattttaatgaatgggtacaaacaaggctaaagtggtggatagatattggcatatccgagcagaatcttgaattgtatgaagtacctgagaatgatctgtcacattattcaaaatcaactaccgatataatgtacaaattcccgcacggaaccgaggaacttgagggcattgctaatcgtactgattttgatttagggtcccacacaaaaaatcagaaagattattctctatccgcaacagttttgtctaatgacaaatctaactccaaacttgcgattaatgatcctgggtccaaagaatgggtgataccgtatgtgatcgagccttcagcaggtgtagataggggcgtgcttgctctcctcaacgaggcatacacagaagaaagacttgaaaatgatgacacaagaattgtattaaaattggatccaagattagctccaatcaaagttgcagtaataccactcaaaaaaaataattctgagattgtaaagcttgcacacaaaataaaagattctatccaatccttaagaattggacgtattgttattgaaaatacaggaaatattggtaagagttatagaaaacatgacgaaattggtacgccaatctgtattactgtagattttgattctctagaaaatgaagatgtaactattcgagacagagatactatggaacaaataagacaaccaatttctaaagtatcagaatttgtaaaacagcagataaataagtga

SEQ ID NO: 298735 - DNA, 1136 bp, Unknown
  Bacterial polypeptide expressing nucleotide sequence isolated from the Sargasso Sea
aatggaagaattagtctctctgtgtaaaagaagaggattcatttatcaaactaatgaattatacggcggaatgcagggtgtatatgactatggtccattaggagttgaattaaaaaataatctaaaacaagcttggtggagctctatggtttatgaaagagatgatatagagggcttagactcttcaatattaactcatccaaatgttttgagatactctggtcacgaagagacttttactgacccacttgtagattgtaaggactgcaaatcaaggtttagagctgatcatatcgataataataaatgtccttcatgtggttcagaaaatttaactgaccctaggccttttaatcttatgtttaaaacaacaattgggcctgttgatgatggaagtagttttgcatatttaagaccagaaaccgctcaacaaatttttacaaattttaagaatgtagttgattcaacatcaagaacattaccttttggaattgctcaaattggaaaggctttcagaaatgaaataactccaagaaatttcatttttagagtaagggaatttgaacaaatggaattagaattttttgtagagcctggtagtgatgaggaatggcatcaaaaatgggttgatgaaagagtcagttggtgggaacgacaaggcgtggataaaagtaaattagaaattattgatgtcgataaagaagatttatcgcattattcaaaaaaaacggttgatataatgtacgaatttcctcatgggcttgaggaattagaaggtatcgcaaatagaactgattttgatataggatcacatactaaaaatcagaaagattttgaaataaatgctgatgttataaaaaatgatgactcagtaacaaaattagcaattcaagataagattaacaatacatggactataccttatgtaattgagccatcggcaggagttgatagaggatttttagctgtattaaacgaggcatataaagttgagaagctagaaaatggtaaagagagaactgtcttatctctaaaatctcacttatcgcctataaaggctgcggttattccattaaaaagaaataatcaagatttagttaacaaagccagtagaatgaaaaagcaatgcagtcaat

SEQ ID NO: 298736 - DNA, 904 bp, Unknown
  Bacterial polypeptide expressing nucleotide sequence isolated from the Sargasso Sea
atggtttctaaaaataaaaataaaaataaaaataaaaaaaaacaaaaaccaaaatttcaaacttttcaagaaactattttaaatcttcaaaaattttggagtaaacaaggatgtattattcttcagccatacgacatggaagttggagctggtacgttccatcctgctacaactcttagatcgttgggcactcaaccatggaaaactgcttatgttcaaccatcaagaagaccaacggatggtagatatggtgaaaatcctaatagacttcaacattattatcaatttcaagttttgattaaaccttctcctgaaaatataaaaagactatatttaaatagtcttactacaattggaattcatcacaatgatcatgatatcagattcgttgaagatgactgggaaagtcctacattaggtgcagctgggttaggttgggaagtttggtgtgatggaatggagattactcaattcacttactttcaacagatggcaggttatgaatgtaaaccagtttcggtagaaattacttatggtttagagaggatctgtatgtttacccaacaacaaaaaaatgtttatgatttgctatggaatgatgaggatataaaatacagagaagtttttcatcaggctgaaaaagagttttctgcttataatttcgagcatgctaatgttgaacaattattcaaaatgtttgatatgcatgaatcagaagcaaaatcattagttgaaaagaaaatttcactacccgcatatgatcaatgtttaaaagcgagccacgtgtttaacgttttagatgcgaggggagcaataagtgttgcacaaagagcagggtatattggaagaattcgtgacatcactaagtctgctgctgggatttggatagatagtcaaaattaaa

SEQ ID NO: 298737 - DNA, 1204 bp, Unknown
  Bacterial polypeptide expressing nucleotide sequence isolated from the Sargasso Sea
atgtctgaagaaaaattcaagaaaataatttcacatgcaaaagaatacggtttcatttttcaatcgagtgaaatttatgatggattaagtgcagtttatgattatggtcaaaatggagttctactaaaaaataatataaaagaatattggtggaagtctatgactcagttcaatgacaatattgtagggatagattcagctattttttcacatcctacaacttggaaagcaagtggtcacttggatgcatttaatgatccattaattgataataaagattctaaaaaaagatatagagctgatgatttaattgaaggttttatcaataaaatagaaaaaaaattatctaaggagatagaaaaaaatagaaaaagatttggtgaaagtttcgatgaagaaatttttttatcgacaaatgatagggcaaaaaaatataaagcagaaatcaatgatttaaaatcaaatctaaataaagcacttaatgaagaaaatttagatttattaaaagaaattataatatcgaaaaatatttcttgtccagtctccggaacaactaattggactgacgttaaacaatttaatttaatgtttaatacaaaagttggtgcctcagcagagagtgctactgaattatttttgagacctgaaactgctcaaggtatttttttaaactatttaaatgttcaaaagacaggaagaatgaaaatcccttttggaattgctcaaattggaaaggcttttagaaatgaaattatagctagacagtttatttttagaatgcgcgagtttgaacaaatggaaatgcaattctttatcaaacctggtactcaaaaagaatggtacgaaaaatggaaaaaaaatagaatggaatggcatttatcaattggaataaataaaaataattatagatttcatgatcacgataaacttgcacactatgctgatgctgcttgtgatatcgagtttaatttcccgtttggatttaaagaattagagggtattcactcacgaacagattttgacttggcaaatcacgaaaagttttcctcaaaacaaattaaatattttgatcctgaggatgaatctaaatacatcccttatgttgtagaaacttcaattggtttagatcgaatgtttcttgccgtcttttctaattccctttctttcgaatcgttagaagacggttctcaaagaactgtataaa

SEQ ID NO: 298738 - DNA, 895 bp, Unknown
  Bacterial polypeptide expressing nucleotide sequence isolated from the Sargasso Sea
atgccaaaaaaaataaaaaaaaaaaataaaactttatttcaatcttttcaagatacaattttgaatttacaaaaatattggagcaaacaaggttgtgttattgtacaaccttatgacatggaggtaggagctggaacatttcatcctgcaactaccttaagatctttaggaccaaaaccttggaaagttgcgtatgcgcaaccatcaagaagaccaactgatggaaggtatggaaacaatccaaatagattacaacattattatcagtttcaagttttaataaagccatctccaaaagaaataaaaaaactttacctaaatagtttaaatgttattggtatcagtcacaaagatcacgatattagatttgttgaagacgattgggaaagcccaactcttggagctgctggtcttggatgggaagtttggtgtgatggaatggaaattacccaatttacttattttcaacaaatggctggtatggaatgcaaaccagtttcagttgagttaacttatggtctagaaagaatttgcatgtttacccaacaaaaaaaaaatgtctttgatcttttgtggaataatgaaggaattgaatatagagaagtttttcatcaagctgaaaaagaattttctgcgtataattttgagcacgcaaacactgaaaatttattcaaaatttttgatatgcttgaattagaagccaagtctcttatcgaaaaaaaaatatcattaccagcttatgatcaatgtttaaaagctagtcatttattcaatatacttgatgcaagaggagttattagtgtcgcccaaagagcagaatatatttcaagaattagagacttggtaaagggagttggtcaagtttggcttgaaagccaaaaacagaatgtctgaa

SEQ ID NO: 298739 - DNA, 1357 bp, Unknown
  Bacterial polypeptide expressing nucleotide sequence isolated from the Sargasso Sea
tatgactgcgaaatcgatggaagaattagttgcgctctgtaaaaggcgtggttttatatttcagtcaaatgagatatatggaggccttcaaggtctctatgattatggacctcttggtgtcgaactcaagaataatctaaaagcatcctggtggagctccatggtctatgagcgtgatgatgtagaaggaattgatgccagtattcttacaagccaagacgtgctaggccaatcaggtcatgaggacactttttctgacccgcttatagattgcaaagactgtaaagcaagatggcgtgaagacgaaatcgaagagaaaaagtgcccttcttgtggctctctaaatataacagagcccaggccttttaatttaatgttcaaaacaagtctcgggccaatcgatgatggaagttcgtttgcctatttgcgtcccgaaacagcacaaaatatattcactaattttaaaaatgttctggattcttcaccacgccatcttcctttcggaattgctcaaataggtaaggcatttagaaacgaaattacaccgagaaattttattttcagagtaagagaattcgagcagatggagctagaattttttgtccagaaaggatctgatgatgaatggcacaaaaaatggacagatctaagagttcaatggtggttagatcagggtattgataaagataacattgaattattgcacgtaaagggtaatgagctggcccactattccaaagccaccgttgacattatgtataagtttcctcacggattagaagaacttgagggaattgcaaatagaacagactttgatctgggatctcacacaaaatttcaagaagatttaaatataagctcgaaagttaaacagaatactaaatcgaaaagtaggctggcaatacaagacagtgataataactgggaaatcccttatgtgattgagccatccgcgggtgtcgacagaggtgttcttgctgttctcaatgaagcctatagaaaagaaattatcgataatggaaaagaaagggtggtattgtcgttcaaacctcatctggccccaatcaaagcggccgtgattccgctcaaaagaaataatgaaagtcttgtagaggcagcttcaaaattaaagtcggagttacaaaaaagaaaactaggcagggtgattctagagaatacaggcaatataggaaaaagttatagaaagcatgatgaaattggaacgccgctttgcatcacaattgattttgattcaatagaaaaaggtacagctacaatcagagatagagattcaatggaacaaacgacattaaatttatctgaaatacctgcttattacagtcaatatatagggtct

SEQ ID NO: 298740 - DNA, 1351 bp, Unknown
  Bacterial polypeptide expressing nucleotide sequence isolated from the Sargasso Sea
atgccagctcaatcaatggaacaattagtatctctttgtaaaagaagaggattcattttccaaacaaatgaaatttatggaggccttcaaggagtttatgattacggccctttaggtgtagagctaaaggaaaatcttaagaagtcctggtggacagcaatggtctactcaagggatgatattgagggacttgatgcatcaatacttactaataagaaagtacttcaatattcgggtcatgaagaaacttttacagaccctttggtggattgtaagacatgtggcgagagatttagggctgaccaagttccagaatattgtaaacaagaagatttaactgaaccgcgccgatttaatttaatgtttaaaaccaatatagggcctgtcgcagataaagaagcttatgcatatttgagacctgaaacagcacagcaaatatttacaaactttaaaaatgttattgactcaacctctaaatctattccatttggtatagcacaaataggtaaggcttttagaaatgaaatcactcctagaaactttatctttagagttagagagtttgaacagatggaattagagttttttgttgaaaaaggtcaagatgaagattggcacgagtattgggttaaagagagaataaattggtgggtcgatcaaggtgttagcgaagaaaagattgaggttcttcgtgttccaaaagaggatctttcacattactcgaaagctacggtagatttaatgtatgcatttcctcatggggttgaagaattagaaggaattgcaaataggacagattttgaccttgggtcgcactcaaaaaatcaagaagaccttaatataactgcaaaagttcttaaaaataaggactctaacgctagacttgcaatccaaaacattgaatctaaaaagtgggaaataccatatgtaattgagccgtcggctggtgtagatagaggagtgctagctatattgaatgaggcatataaagaagaaaatttagaaaatggaaagagtagagttgtgttagctctaaagcctcatctcgccccaattaaagcagcaataattcctataaaaaagaatgactcaacaattgtcgacttttctaaaaagattaagaataaacttcaaaaactaggtcttggaaggattgtttttgaaaataccggcaatatcggtaaaagttatcgtaaacacgatgaaattggaactccgatatgtataacaattgattttgatacacttgaagacaatacggttacagtaagagatagggattcaatggagcaaaagagggttgtggttggtgatttggaaaatcttttaataaacctcttaaaacgataac

SEQ ID NO: 298741 - DNA, 1327 bp, Unknown
  Bacterial polypeptide expressing nucleotide sequence isolated from the Sargasso Sea
atgaataaaacaatagaaaagatagtttctctttgtaaacaaagaggttttgtttaccaaagctcagatatatatggtgggtttggagcagtatatgactatggccctcttggtgttgagctaaagaataatattgcaaatcggtggtggagagagatgacccaaattcatgaaaatattgttgggcttgatagtggtattttaatgcacccgaagatatgggaagcatcaggccatgttggagagtttcatgacccacttgttgattgtaaacagtgtaaggcaaggtaccgggccgatgaattatcagataatattgaaaatgaagaatgggataaaatgaaatgccctaattgcggtacaactgggaaaatgacatcaccgagacaatttaatttgatgtttaaaacacaagtcgggccggtagaagatactggatcagtagcatatctgaggcctgaaacagcacaggggatttatgtcaactatcaactagtccaaggatccacgcgaatgaaaatcccatttgggatagcacagattggaaaagcatttcgtaatgagattattgctaggaattttatttttcgaactcgcgaatttgagcaaatggaaatgcagtattttgtaaaacctggtagtgataacgagtctatgtctgagtggaaagagaaacggtttaatttttatattgatactcttgggatagataaaaataatataagatttcaccaacacggagatggtgaacttgctcactatgcaaaagaagcctgggacattgaatataattttccttttggttggtctgaaattgaaggaattcataatcggacagattttgatttggctagacatgaagaattctcagggaaaaatttaaaatactttgatcaggtagctaatgaacggtatctcccatatatcattgaaacctctgccggcctgaatagaatgatgttatcagttttatctgatgcgtattgggaggatattgataacaaccgaacagtcatgaagtttcaccctagaattgcacctattaaagctgtcatctgtccattggtaaagaaagatgggcttccagagaaagccaaaaacattgtagatattcttagaccacactttaatgttctttttgatcaacaaggctcaattggtaaacgttattacaggcaagatgaagctggcactccatttgggattactgttgatcatcaaacaatggatgacaatacagtaacacttcgccatagagatactcagaaacaagaccgtatggcaatagatgatatactaaaaacaatacaatctagtcttgtttaat

SEQ ID NO: 298742 - DNA, 1102 bp, Unknown
  Bacterial polypeptide expressing nucleotide sequence isolated from the Sargasso Sea
aaagtggtgcgcccacgtttatctgacgctcagttcttttttgttacagacgctaaaaccaaactggtcgatcgtctgccagccttaagcactgtattgttccagcaaaagctcggtactttattagagaaatcagagcgtatcgccaaagtggccgcttttattgccggcaaaattggtgctgacgtacaacatgcagaacgtgctggtttgttatccaaaaccgacttaatgaccaatatggtgggcgagttccctgaagtgcagggtgtgatgggtatgcattatgcccgcctggacggtgaagccgaagctgtggctgtagcgctgaacgagcaatacaaaccacgttttgccggtgacagcctgccaggccagttagaagcttgtgctgtagccatagccgataaaatggattcgctggtgggtatctttggtataggtcaggcgccaaaaggcgacaaagaccccttcgctttacgccgcgctgccattggtgcgctgcgtattatggtggaaaaacagttaccactggatctgcttgaactgattgaattcagcaaaaccacctttggtgacaagctgactcaacaaagcgtatcggacgaagtgctggactttatgttaggccgtttccgcgcctggtacgaaggcgaaggttttggtgtagacgtgatccaggctgtattagcccgtcgtccaaccaatccggccgacttcgaccgtcgtgtcaaagctgtcgctgaattccgtaaactggacgccgctttagctttagctgcagccaataagagggttgcgaatattctggccaaagtgaccgaagctattccacaaagtatcaacagcgctctgctgagcgaagaagccgaacaagctctgtataaagccatagtggccgaacaggcctatcaggcgacagtaagcagctacgctgaaggtttaagccatctggccgccatgcgcgatgtagtagaccagttcttcgacaaagtaatggtcaatgctgatgacgccgcagtacgcttaaaccgtcaggctttgttacagcaattacgtgaattattcctgcgtgtagcggatatttctgtattgcagtgat

SEQ ID NO: 298743 - DNA, 1074 bp, Unknown
  Bacterial polypeptide expressing nucleotide sequence isolated from the Sargasso Sea
aatgccagctcaatcaatggaacaattagtatctttgtgtaaaaggagagggtttatttttcaaacaaatgaaatttatggtggtcttcagggtgtctacgattatgggcctttgggtgttgagttaaaggaaaacttaaagaggtcttggtgggcggcaatggtctactcgagagatgatgttgaaggtcttgatgcctctatacttactaatagaaaagttcttaaatattcgggtcacgaggatacctttacagatccactagttgattgtaaagactgtaataatcgcatgagagcagatcatttgaaagatagtaagtgcttacattgtgggtcaacaaaccttactgaacctagaccttttaatctaatgtttaaaacaaacattggccctgttgctgacgatgaatcttatgcatatttaagacctgaaacagcccaacaaatatttacaaacttcaagaatgtagttgactcaacatcaaaatctataccttttggtattgcccaaattggtaaagcctttagaaatgaaattactccgagaaactttatttttagagtgagagagtttgaacagatggaattagagttctttgttaaaaaaggtgaagatgaagattggcacaaatactggattgaagaaagaataaattggtgggtccagcagggagttaataaagagaaaattgaaattttgaatgttccacgagaagaactatcacactactctaaagcaactatagatttaatgtatgaattccctcatggtgtggaggagttagaaggaatcgcaaatagaactgattttgaccttggttcacattcaaaaaaccaaaaagatcttgatatagaagctgatgtcctaaaaaacaaggattcaaacgcaagactagctattcaaaatattgattcaaaggaatgggaagtaccatatgtaattgaaccatcagcaggtgtagataggggtgtgctggccatattgaatgagtcgtataaggaggaaacccttgaaaatgggaagaatagagttgtattagctttaaaacctcacctctcaccaatcaaagc

SEQ ID NO: 298744 - DNA, 2101 bp, Unknown
  Bacterial polypeptide expressing nucleotide sequence isolated from the Sargasso Sea
atgacgcacaatcatcccgcccccctgctcgtcgaactgttgaccgaagagctgccgccgaaggccctcgcgcgcctcggcgacgcattcgccgaaggtctcgcgcaacgcctcgcggcgcgcgacctcatcgacggcgaactcgtgttcgaacgctacgccacgccgcgccgcctcgccgtcgtcgtgcagaacgtgcgcgccgtcgcccctgaaaagcaggtccgcgaaaaagtcctacccgtgtcggtcgcactcgacgccgaaggcaagccgacggccccgctcgcgaagaagctcgcggcgctcggccacccgaacctgtcgatcgccgatctcgagcgcgcgcaggacggcaaggccgaagcgttcttcctcaactattcggccgccggcgcgacgctcgccgacggcctgcaggccgcgctcgacgagacgctcgagaagctgccgatcccgaaggtgatgacctaccagcgcccggacggctccgacgtgaagttcgtgcgcccggtgcatcgcctgacggtgctgcacgacgatcgcgtcgtgcccgtcaccgcgttcggcgtcgacgccggcgacacgacgctcggccaccgcttcctgtccgacggcctcgtcgcgatccagcatgcgcgcgcctacgccgacacgctgcgcgacaagggccgcgtgatcgcgcacttcgccgatcgccgcgaaacgatccgcacgcagctgaacgaacacgcgaacggcgataccgtcgtgatgcccgagtcgctgctcgacgaagtgacatcgctggtcgaatggccggtcgtctacccgtgccgcttcgaggacgaattcctgcaggtcccgcaggaatgcctgatcctcacgatgcaaaccaaccagaagtatttcgcgctgaccgacgtcgccggcaagctgcgctcgcgcttcctgatcgtgtcgaacatcgagacgaagacgccgggcgagatcatcgaaggcaacgagcgcgtcgtgcgcccgcgcctcgccgatgcgaagttcttcttcgagcaggacaagaagaagccgctcgccgaccgcgtgccgcagctcgcgaacgtcgtgtatcacaacaagctcggttcggcgctcgcacgcgtcgagcgcctcgaggcgctggctggcgagatcgcacccgcgatcggcgccgacgccacgcacgcgaagcgcgccgcgcgtctcgcgaaggccgacctgctgaccgacatggtcggcgagttcccggaactgcagggcacgatgggcacgtactacgcgcgccacgacggcgaagccgacgacgtcgcgctcgcctgcgccgagcactaccagccgcgcttctccggcgacgcactgccgaccacgcccgtgtcgaccgccgtcgcgctcgccgacaagctcgagacgatcgtcggcatctggggcatcggcctcgcgccgaccggcgaaaaggatccgttcgcgctgcgccgccacgcgctcggcgtgctgcgcctgctgctcgagaagcagctgccgctcgatctcgtgtcgctgctgcgcacggcccatgcacgcttcgaaggcgtgccgggcgtggccgaatcgaccgatgcgatcctcgcgttcttcatggatcgcctgcgcggcctgctgcgcgagcgcggctattcggccggcgaagtcgacgcggtgctgagcctgaacccgacgcgcgtcgacgatctcgtcgcgcgcctcgacgcggtgcgcgaattcacgcgcctcgcggaagccgaagcgctcgcggccgcgaacaagcggatctcgaacatcctgaagaagtcggaaggcggcgcgaacggcacggtgcaaccgacgctgctcgtcgaggccgccgagaaggcgctgcacgaacagctcgcggccgtgacgccgcacgtgcagtcgcagctcgaggcgcgtgcgtacacgggcgcgctgtcggcgctcgccgcgctgcgcgcaccggtcgacacgttcttcaacgacgtgatggtcaacgcggaagatccggcactgcgcgcgaaccgtctcgcgctgctgtccgcgctgcaccagcagatgaactgcgtcgccgacatctcgaagctcgccgcataag

SEQ ID NO: 298745 - DNA, 1006 bp, Unknown
  Bacterial polypeptide expressing nucleotide sequence isolated from the Sargasso Sea
atgcttacgtttcagcaaatcatcctgacgctgcagtcctactgggacaagcagggttgcgccctgctccagcccatcgacatggaagtcggcgcgggcacgtcgcacgtccacacgttcctgcgcgcggtcggccccgagccgtggcgcgccgcgtacgtgcagccgtcgcgccgcccgaaggacggccgttacggcgagaacccgaaccgcctgcagcactactaccagtaccaggtcgtgctcaagccggcgccggaaaacatcctcgacctgtacctcggctcgctcgaggcgctcggcttcgacctgcagcagaacgacgtgcgtttcgtcgaggacgactgggaaaacccgacgctcggcgcgtggggcctcggctgggaagtgtggctgaacgggatggaagtcacgcagttcacgtatttccagcaggtcggcggcctcgactgcaagccggtgctcggcgagatcacgtacggcctcgagcgcctcgcgatgtacctgcagaaggtcgagaacgtgtacgacctcgtgtggaccgagtgggaagagcaaggcccgaacggccccgaactgcgccgcctgtcgtacggcgacgtctaccaccagaacgaggtcgagcaatcgacctacaacttcgagcacgcgaacgtcgacctgctgttcacgttcttcaacagctacgaagcggaagcgaagaagatgatcgacgcgcagctcgcgctgcccgcatacgagctcgtgctgaaggccggccacacgttcaacctgctcgatgcgcgcggcgcgatctcggtcaccgagcgcgcggcgtacatcggccgcatccgcgcgctgtcgcgtctcgtcgcgcaggcctactacgactcgcgcgagaagctcggcttcccgatgctcggcaacccgccgggcgtgccgggcctcaccaccgacgcccaggacgccgcacagccggcgtgggcgccgccgctcaaggtcgaacgcaagatcgatcaggactgac

SEQ ID NO: 298746 - DNA, 1297 bp, Unknown
  Bacterial polypeptide expressing nucleotide sequence isolated from the Sargasso Sea
atggaaaagcctgataaagagttatttgataaagtagttaagatttctcaagctagagggtttgttttcaatgcatcttcaatttatggagggctaagaagttcctatgattatggtccattaggcaccatcctgaagcaaaacatttcaaaatattggtgggagagttttaatgatgttgaagttaatatttatccagtcgatacagcaattattcaaagtagtgatgtttggaaatcatcaggacatttagacgaatttacagatcctatggtagatcataaacctactggtgaaagatttagagcagaccaggtgccagatgatttaaaaaaggaggatttaacagagccacgtcaatttaatctaatgtttgagacaaacattggccctgttcaagatgaaaactctgctgtttatttaaggccagaaacagcacagggaatttttgtaaattttgaaaatgttttgaggacaatgagagcaaagattccttttggtattgctaatattggtaaatcatttagaaacgaaatcacaccaggacaatttatttttcgtactagagaattcgaacaaatggagattgaatttttctgtaaagaatcagatgaagatgagtggatggattattggataaataaaagaatggattggtataagtcgataggtataaaagaagcccaattacaacttagagagcatgcagataatgaattagctcattatgcaaagaagacagtagatattgagtatttatatccatggggttggggagagcttgaagggattgctaatagaggaaattatgatttatcatctcaccagaaaaatagtggaaaagatttaacctattttgattctttaaatgatgaaaaatatcttccaagtgtgatagaaccagcagggggattaacaagaacattgtttgcattattattgtcagtttatgatgaagaaaagcttgaaaatgatgaaaaaagaacagtatttagatttacatttgaattagctcctatacaaattggtattctcccattaagcaaaaaagatgatttaatccaagtttgcagtgaaattaataaaacacttaaaaatgactaccgtacagaagttgatataacacaatctattggaaaaaggtacagaaggcaggatgaaataggcactccttattgcataactgttgattttgaatcgttagaagacaattgcgtaacaataagagatagagatacaatggaacaagaaagaattagcatagataaattaagtgagtatttcgagaaactttaat

SEQ ID NO: 298747 - DNA, 1339 bp, Unknown
  Bacterial polypeptide expressing nucleotide sequence isolated from the Sargasso Sea
attgcctgcaaaaaatattgatgaactaatagctctctgtaaaagaagagggttcatctttcagtctaatgaaatatatggtggaacacagggcctttatgattatggtcctcttggtgttgagctcaaaaataatttgaaggatgcttggtggaaatctattgtatatgaaagggatgatgttgaaggtcttgatgcagcaatactgacaaaaagcacagttttaaagcattctgggcatgaagatacattttcagatcctatggttgattgtaaatcctgtggtgaaaggttcagggcagatcaagtgccagactattgcaagaaagaagatctaacagaaccgcgtcaatttaatttaatgtttaaaacgaatattggtcctatagatgacggtaaaagttttgcatatttaagaccagaaacagctcagaatatctttactaattttaaaaatgttgtcgactctacagccaggacagttccatttggtattgcacaaatgggaaaagcctttagaaatgaaataactcttaaaagttttatctttagagttcgagagtttgaacaaatggagcttgagttctttgtgcgtccaggagacgacgagaaatggcataagagctgggtagaatcgagagttcagtggtggaaagaccaaggtatttctgataaaagcctagaactttatgatgttcctgctgatgagcttgctcattattcgaaagcgacagtagatattatgtacaaatttcctcatggtgtagaagaattggaaggtatagccaatagaactgattttgatttaggctcgcactcaaaaaaccaaaaagaattaaacattaaggcaaaagtttcagaaaacaatgaatctaattccaaactagctcttcaggatgaaaataataactggtttgtgccatttgttattgagccttctgctggtgttgatagaggtgttctagcaattttaaatgaagcatattttgtagaagaaattgaaggaaaggagcgtgtagttcttaaactaaaacctcatctagccccaattaaagcggctattatgcccctaaagaaaaatgataaaaaaattgtagcacttgcaaaaaaggtaaaagatgagttacaaaaattaggcttaggtaggattctttttgaaaacagcggcaatatcggtaaaaattatcgcagacatgacgaagtcggaacaccagtttgcattactgttgattttgagtcgcttgataaccacactgttactgttcgagatcgtgatagcatgaaacaagaaagagtttctttagacaaggtttctgagcatcttaaaaagataatttaa

SEQ ID NO: 298748 - DNA, 1348 bp, Unknown
  Bacterial polypeptide expressing nucleotide sequence isolated from the Sargasso Sea
tttgacagcaaaaaccatggatgaattagttgcattgtgcaagagaagaggatttatttatcaatcaagtgatatttatggggggcttcaaggcgtatatgattttggaccacttggagtggagttaaaaaataatattaaaagggcttggtgggagtctatggtatatgaaaatgatgatattgaaggacttgattcttcaattcttacaaaccctttagttttaaaatactcaggacatgaagatactttctcagatccaatggttgattgtaaatcttgtggactcagatttagagcagatcaggtgcctgatatgtgcaaaaaagatgatttaacagagcctagacaatttaacctaatgtttaagacaaatgtaggtccgatcgatgatggtgaatcttttgcatacttaagacctgaaacagctcaacaaatatttactaactttaaaaacgtattggattcaacctcaagggccctaccatttggtattgcccaaatgggtaaagcttttagaaatgaaataacacctagaaattttatttttagagtaagagagtttgaacaaatggagttagagtactttgttaaaccaggaacagatgaggatattcatagttcatgggtacaaaaaagacttagttggtggaatgatcagggtgtacccatggagagtattgagctctatgatgtgcctagtgaagaattagcacattattcaaaaaaaaccattgatattatgtataaatttcctcatggactagaggaacttgagggaatagcaaatagaactgattttgatcttggatcacattcaaaaaaacaggatgagttaaatatcaagtctaaagtaattaaaaatgaagactcaaatagtaaattagccattcaaaatgataatggggactgggagattccatatgttatagagccatctgcaggtgttgaaaggggctttttggcaatactcaatgaagcatataaaatcgaggatttagatgatggcaaaactagaatagttcttaatttaaggccgcatctttcgcctgtaaaaattgcagttatacctctaaagaagaataatgatgatatcgttatgctagcaaaaaatattaaaaacaacttacaaaaattaggtatgggtagagttattttagaaaatacgggtaatattggaaaaagctatagaaaacatgatgaaattggtacaccaatatgcattacagttgactttgaatctctagaaaatagtgatgttactataagagatagggatactatgaaacaaattagaattaaaattgataaactgtcaaacttttgtgttgataaaataaagtcttga

SEQ ID NO: 298749 - DNA, 850 bp, Unknown
  Bacterial polypeptide expressing nucleotide sequence isolated from the Sargasso Sea
atgaattttcaaaatctgattcttaatcttcaaactttctgggctaaaaaaggatgtgttattcttcagccctatgatttagagaaaggagctggaactttccatcctggaaccttccttaggtgcctggggaaaacaccttggtcagcggcatacgtagaaccgtgtagaaggccaaccgatggaaggtacggtgagaatccaaatagattacagcattattatcaatttcaagttgtaataaaaccatctatagaaaatattcaagaactttatttagaaagcctcaatcatcttggtattgatacaaaaaaacatgacattagatttgttgaagatgattgggaatctcctacccttggtgcttggggacttggatgggaagtctggttagatggaatggagataactcaatttacctattttcaacaagccggtggatttgatttaaatcctgtcactgttgaaattacatatggaaccgaaagaatagcaatgtatcttcaagaagttgacagcgtatatgacttgcaatggtcagatgagataaagtatcacgatattcatcacagaacagaatatgaattttcaaaatataactttgaggtggccaacattgatatgctaaaagacttcttcataaaatccaaagaagaatgtatgagtctaattaaaaataatttacctttgcctgcatatgactattgcctgaaatgttcgcatatttttaatttactagatgcgcgtggaagtattagtgtaactgaaagagcacggtatattttagaaattagggagctagctaaagagtctgctagtttatatttaaaaatttatgaaacaagataat

SEQ ID NO: 298750 - DNA, 1363 bp, Unknown
  Bacterial polypeptide expressing nucleotide sequence isolated from the Sargasso Sea
tatgacagcagagtcaatggataaattagttgccctttgtaaaaggaggggctttatttttcaaactaatgaaatctatggagggctacagggcgtttatgattatggacctctaggggttgagctaaaaaataacttaaaacggtcttggtggaatgcaatggtctatgaaagagatgatattgaaggtatagattcatccatattaaccaacccactggtattaaagcaatctggtcatgaagaaaccttttctgacccgctcgtagattgcagaaattgcaatgcaagaataagggcagatcatatacaagatggaaaatgccctgaatgtggatcgagtgatttaactgatccaaggccattcaatttgatgttcaaaacaaatgttggtcctgtagaagatggaacttcatttgcctatttaaggccagaaactgcacaacaaatatttactaactttaaaaatgtacttgactccacaccacaccatctcccttttggaatagcacaaattggtaaagcatttagaaatgaaatcactcctagaaacttcatatttagggttagggaactagagcagatggaaatggagttctttgttgtgccaggagaagatgaaaaatggcacaaaacttggacagacttaagggttgcatggtgggagaaacaaggaataaacagaaaaagcctagagttactagacgtccctaaagctgaattggctcattattcgaaagctacgatagatatcatgtacaaatatccgcatggcttagaagagcttgaaggcatcgcaaatagaacagactttgatttgggttctcactctagagatcagtcaaagctaggcataacagctaaagttgaaaaaaacacaaaatctaatgccaagcttgcagttcaggatcctgaaacaaaagaatgggtggttccttatgtaattgagcctgctgcaggtgttgaaagaggcgttttggctattcttaatgaagcctacaaagttgaagagcttgaaaatggcaaggaaaggactgtcttgtccttaaaaccacatctttcgccaattaaagcagcgattatacctttaaaaaggaataataaggacttagtaaatatagctaaagaaataaaaaataccctccagggcttgggtctagggagagttttgctggagaattcaggaaatataggcaaaagctataggcgtcatgatgaaataggaacccctatatgtataacagtagactttgaatctctagaaaacgaaactataaccatcagggatagagacactatggaacaaagcaggttagatatagttgctgtttctgaatatttcaagaacactataaataattag

SEQ ID NO: 298751 - DNA, 892 bp, Unknown
  Bacterial polypeptide expressing nucleotide sequence isolated from the Sargasso Sea
atgtcttcaagagaaaaaaccaaaatagattttcagtcaataattcttaatctgcaaagttattgggcaaatcaaggatgtgtaatattacaaccatatgataaagaagttggtgcaggaacatttcatccagctacaactctaagaagccttggaccagaacagaaatggaatgttgcttatgttcaaccatctaggagaccaacagatggaagatacggattaaatcctaacagggttcaacattattatcaatttcagactatacttaagccttcaccagaaaatagccaagatttatttttgggaagtttagaggcaattggtttaaatataaatgagcatgatattagatttgttgaggatgattgggaaagtccaactttaggtgcgtggggacttggatgggaagtttggtgtgatggcatggaaatatctcaatttacatatttccagcaagttggtggtattgaatgttcaccaatcccattagaacttacatacggtttagagagattagctatgtttatacaaaatattgaaaatatttttgatattgagtgggtcagcattaataataatactgtttattacaaagatatatttttaagaaatgaaaaagaattttcagaatacaattttgatagggcagatatcaattctctttatacacaatttgaaatagcccagaatgaatgtaaaaatttgcttaacaatgatactcctctgcctttgccagcctatgacgaatgtttaaagtcaagtcatatatttaatcttttagatgctagaggtgcaatttctgtttctgagaggcaaggctttatacttaaaataagggatttagcaaggggttgttgtgaagcttacataaagtcttttaaggattaaa

SEQ ID NO: 298752 - DNA, 559 bp, Unknown
  Bacterial polypeptide expressing nucleotide sequence isolated from the Sargasso Sea
tatggtttctaaaaacaagaaaaaaagtaaaaagataacgagtattatttcttttcaagatacaatattaaatttacagaaatattggtctaaaaaaggctgtgtaattctacaaccatatgatttagaagttggagcaggaacttttcatccagctactaccctcaggtcattaggacctaaaccatggaaaactgcttatgttcaaccatcaagaagaccaacagatggaagatatggtaataatccaaatagactacaacattactatcaatttcaagttttaatcaaaccatctccaaaagaaattaaaaaactttatttaaatagcttagcagctattggaatagatcataaagatcacgatgttagatttgttgaagatgattgggaaagtccaacattaggagccgcaggtcttggatgggaagtttggtgtgatggcatggaagttactcagtttacctattttcagcaaatggctggattagaatgtaacccgatttcagttgaaattacttatggattagaaagattgtgtatgtttatacaaaataaa

SEQ ID NO: 298753 - DNA, 1098 bp, Unknown
  Bacterial polypeptide expressing nucleotide sequence isolated from the Sargasso Sea
ggtggcagtcaatggtctatgaaaacgatgatattgaaggattagacgcttcaattctcacaaaatctatgattcttgattattctggccatacagaaactttttctgatcctatggttgattgtaaatcatgtggtcaaagatttagagaggatcaagttccagaatcttgtgcaaaaaaagatctaacagaagcaagacaatttaacttaatgtttaaaaccaatgtaggtccagtagatgatgaaagtagttacgcatatttaagaccagaaacagctcaacatatatttaccaattttaagaatgttgttgattctacatctagaaacttaccttttggaattgcacagattggtaaagcttttaggaatgaaattactccaagaaactttatatttagagtgagagaatttgaacaaatggaacttgagtactttgtagcgccgggcgatgatgacgcagcacatagctcatgggtacaaaaaagattaaaatggtgggaaaaacaaggtgtacccatagaaacaattgaattatatgaagtacccacagatgagctagcacattattcaaaaaagactgttgatttgatgtataagtttccacacggtcttgaagagttagaaggaatcgcaaatagaacggattttgatcttggatcgcactcaaaaaaacaaggtgaattaaatattaacgctaaagttaaattaaataaagactcgaatagcaagctaacaataaaaaataatgatgacggcatggttgttccttttgtgatagagccaagtgcaggagttgaaagaggcatgcttgctgtgcttaatgaagcatttacaattgaaagtctacctgacaataaaagtaggcttgttctgaaattaaagcctcatcttgctccaataaaagcggcaataatacctctcaagaaaaatgataaaaatttagtgggtcaggcaaaaaaaatcagatctacccttcaagaattaggattaggaagaattattcttgaaaatactggaaatattggtaaaagttacagaaaacaggatgaaattggaacccctttatgcattacagtcgatttgaaacactaga

SEQ ID NO: 298754 - DNA, 721 bp, Unknown
  Bacterial polypeptide expressing nucleotide sequence isolated from the Sargasso Sea
ttaggacccaaaccatggagatcagcttatgtgcaaccttcgagaagaccaactgatggaagatatggagaaaatccaaatagacttcaacattattatcagttccaagtgattataaaaccgtctccaaaaaatattaaaaaattatatctaagcagtcttaatgccattggaataaaacataatgatcatgatattagatttgttgaagatgattgggaaagtcctacattgggtgcagccggactgggttgggaagtttggtgcgatggaatggaaattactcaatttacttattttcaaaaaatggctgggatggattgtaaacctatttctgtagagcttacttatggtttagaacgattatgtatgtttacccaaaagaaaaaaaacgtatttgacttagtatggaatgatgaaggtattatttataaagatgtttttttacaagctgaaaaagaattttcatcttacaattttgattttgcaaatgttgagaacttgtttaaattttttgatatgctggaacaagaaaccaaatctttgttagaaaaaaaactctcacttcctgcctatgatcagtgtttaaaagcaagtcatgtttttaatattttagatgctagaggtgcgattagcgtagcgcaaagagcagagtttattgctagaattagagatttgaccaaaggcgtgggtcaagtatgggtagatagccaaaaataaa

SEQ ID NO: 298755 - DNA, 873 bp, Unknown
  Bacterial polypeptide expressing nucleotide sequence isolated from the Sargasso Sea
tgccaaaaaaaaagaaattaaaatttttatcttttcaagaaataataatgaatttacaaaaattctggggaaaatatggttgcgttattcttcagccttatgatttagaagttggtgcaggaacatttcatccagctacaactttacgatccttaggaattaaaccttggaaagctgcttatgttcaaccttcaagaagacctactgatggaagatatggagaaaacccaaatcgattacaacattattatcaatatcaagttataattaaaccctctccagataatataaagcaagtttatttaagaagtttgtcagctattggtatagatgtcaaagatcatgatattcgttttgttgaagatgattgggaaagtccaactttaggcgcatcaggtttaggatgggaagtttggtgcgatggaatggaaattactcagttcacttatttccagcaaatgactggaatagaatgtaaacctgttccagtagaattgacctacggactggaaagactatgtatgtttgttcaaggaaaaaataacgtgtttgatttagattggaataatgaaggagttaaatacaaagaagtttttttacaagcagagaaagaattttctgcttataattttgagttcgccaatacagacactttattaaaaaattttgaagcaagtgaaacagagtgtaaatctttgttagaaaaaaaattgtctttgcctgcttacgaccaatgtttgaaggcaagtcatttatttaatttgcttgatgccagaggtgttatcggtgttgcagaaagaacaggttatataaatagaattagagaacttgctaaaggttgcggggcactttggttaagtacacaaatgtaga

SEQ ID NO: 298756 - DNA, 562 bp, Unknown
  Bacterial polypeptide expressing nucleotide sequence isolated from the Sargasso Sea
cttgtcatcaataggtattaatcatgaggaacacgatataaggtttgttgaagatgactgggaaagtcctacattaggagcggcaggtcttggatgggaagtttggtgtgatggaatggaagttacacaatttacctatttccaacaaatggctggagttgaatgtaaacctgtatctgttgaaattacatatggattagagagattgtgcatgtttattcaaaacaaaaaaagtgtttttgacttaatttggaatgatgaaggaattacttacaaagatgtttttcatcagtcagagaaagaattttcagcatataattttgaatatgccaatactgataatttatttaaaatatttgaaatgcttgaagaagaaacaaaattattagttgaaaaaaagatttctcttccagcttatgatcaatgtttaaaatgtagtcatgtcttcaatattttagatgcaagaggggtgattagtgtagcacaaagggctgaatatattgcaagaataagggaactaactaaatcaattgggaaagtttggattgaaagccaaagttaa

SEQ ID NO: 298757 - DNA, 1021 bp, Unknown
  Bacterial polypeptide expressing nucleotide sequence isolated from the Sargasso Sea
atgccagctcaatcaatggaacaattagtatctttgtgtaaaagaagagggtttatttttcaaacaaatgaaatttatggtggtcttcagggtgtctatgactatgggcctttgggtgttgagttaaaggaaaacctaaagaggtcttggtgggctgcaatggtctactcgagagatgatgttgagggtcttgatgcctccatacttactaataggaaagtacttcaatattcaggccatgaggaaactttcacagatcctttggtagattgtaaatcatgtggcgagaggtttagggctgatcaagttccggaatattgcaaacaagaggatttaactgagccgcgccagtttaatttgatgtttaaaactaatattggtcctgttgctgatgatgagtcttatgcatatttaaggcctgaaacagcacaacaaatatttactaacttcaaaaatgtgattgactcaacgtcaaaatctataccttttggtatagctcaaattggtaaggcttttagaaatgaaatcactcctaggaactttatatttagagtgagagagtttgaacagatggaattagagttttttgttaaaaagggtgaagatgaagattggcacaaatattggattgaggaaagactaaattggtgggttcagcagggtgtcgagaaagataaaattgaggttttgaatgttccacaagaagaactatcgcactactctaaagcaactatagatctaatgtataaattccctcatggtgttgaggagttggaaggaattgcaaatagaactgattttgatcttggttcacattcaaaaaatcaggaagatcttgatataacagctgatgttctaaataacaaagattcaaacgctaggcttgctgttcaaaatattgaatcaaaagaatgggaagtgccatatgtaattgagccatctgcaggtgtagatagaggtgtgctagctatactaaatgagtcatataaagaggaaccccttgaaaaatggaaaaagtagg

SEQ ID NO: 298758 - DNA, 883 bp, Unknown
  Bacterial polypeptide expressing nucleotide sequence isolated from the Sargasso Sea
atgaactttcaaaacattatagtactacttaaagatttttggataaaacaagggtttatagttcaggaaccttatgattatcctgtaggcgcagggacttttcatccagctactttccttagagccttagggccggaaccctgggcaactgcttatgttcaaccttgcagaaggcccactgatggaagatatggcgataatccaaacagacttcaacattactatcaatttcaagtagttcaaaaaccatcaaagccgactatacaaaaagattttttggaatctctgaggcaaattggtatagatcataaaaaaaatgatgttagatttattgatgataattgggaatcaccctcacttggagctgctggggtgggatgggaggtctggttaaacggaatggagattgcgcaatttacttattttcagcaagtaggaggattagattgtaaccctgttacgggcgaattgacatatgggcttgaaagaatagctatgcatttacaagatgttgagagcatttttgatattaaatggaatgatgaaatcaattatggtgacttatttttgcaaaatgagaaagaattttcacattttaactttgaaaatattaatgaaaagtctttaaatgaactttttataactaatgaaaaagatatcatgaacctaattgataaaaaattaccacttcctgcttacgacttactattacaaaattctcatatattaaacttactcgatagttcacaatcaatttcagttactgaaaggcagtcttacattcttaagttaagaacaatgtcgaataaaattgcggaatcatatattgaaattagaaaagatcttggcttcccactcgataaaaaacaatatgaaaaatgat

SEQ ID NO: 298759 - DNA, 907 bp, Unknown
  Bacterial polypeptide expressing nucleotide sequence isolated from the Sargasso Sea
atgcagaaatacgatattaagacctttcaagggttgatccttgcgcttcaagattattgggcgcgtcagggctgcgttattattcagcctctggatatggaagtgggtgccggtacttttcaccctatgacgttcctacgttctttaggtccagagccaatgagtagcgcctatgttcaaccgtgccgtagaccaaccgatggtcgttacggtgagaacccaaaccgcttacaacattactatcagttccaagtaatgcttaagccttcacctgacaatattcaggagttgtacttgggctctttgaaagagttaggtttcgatccgctggttcatgacattcgcttcgtagaagacaactgggaatcacccacgcttggtgcgtggggtctaggttgggaagtgtggctaaacggtatggaagtaactcagtttacctacttccagcaggtaggcggtctagagtgtaagcctgttaccggcgaaattacctacggcttagagcgactcgccatgtacgttcaaggtgtagatagtatctacgacctggtttggactgacggccctatgggcaaagtgacctatggcgatgtgttccatcaaaatgaagtagaacaatcgacgtataacttcgaacacgccaacgttgaagccttatttagaaccttcgacgaatgtgaagcagaaagcaaaaagcttatcgaaaacaaccttccacttcctgcctatgagcaggttatgaaggcgtcacacgcatttaacttgcttgatgctcgtcatgctatctcagtgactgaacgccagcgctatattcttcgcgttcgaacgctagctaaagcgtgtgcagaaagctattaccaagcacgtgaagcacttggcttcccactatgtaacaaggaggcataag

SEQ ID NO: 298760 - DNA, 1348 bp, Unknown
  Bacterial polypeptide expressing nucleotide sequence isolated from the Sargasso Sea
ttggctgctaaaaatatggatgagctagtagctctttgcaaaagaaggggttttatatatcaatcagctgaaatttatggtggtttacaaggagtttatgattatgggccgcttggggttgagttaaaaaataacttaaagagctcctggtggaagtctatgatttatgaaaatgacaatattgaaggtattgatgcagccatacttacaaacccattgattttaaagtattctggacatgaggatacgttttcagacccaatggttgattgtaaatcctgtaatttaagatttagagcagatcaagtacctgatagttgtaaaaaagaagatttaacagagccaagacagtttaatctaatgttcaaaactaatgtagggcctatagaagatggatccacctttgcttatttgaggccagaaacagctcaacaaatcttcacgaattttaaaaatgtcctagattcaacttctaactctcttcctttcggaatagctcaaattggaaaagcttttagaaatgaaattacgcctagaaactttatttttagagttagagaatttgagcaaatggaattagagtattttgttagtcctggtaaagatgaggaagctcataatttatgggtacaaaataggatagaatggtggaataatcaaggtgtacccacagaaagtattgagatttatgatgtacccaaagacgagcttgcacactactcaaagaaaacagtagatataatgtacaaatttccacatggtgttgaggagcttgagggtattgcaaataggactgattttgacttaggatcacactctaaaaaacaaaatgaactaaatataaaatctaaggtcacagttaataaagattctaatagtaaacttgccgttcaagatgacaatggagattgggttgttccttttgttattgagccttctgctggagttgaaaggggttttctagcaattttaaatgaagcatatacgaatgaagagcttgaagatggtaaaactagaatagtcttaaagctgaaaccccatctctccccaataaaggcagctgtaattccccttaagaagaacaacgaggagcttgttagtacagcgaaaaaaataaaagaagatcttcaaaacattggcttaggacgaatttttctcgaaaatacaggcaatatcggaaagggatacagaagacatgatgaaattggtaccccagtttgtattacagtagactttgagtcactagaagataattcagtaactattagagacagagatacaatgaatcaatctagattaaatattaatgagttatcagaatatttaaaaggcaaaatacagtcataaa

SEQ ID NO: 298761 - DNA, 907 bp, Unknown
  Bacterial polypeptide expressing nucleotide sequence isolated from the Sargasso Sea
catgacgacgaaacacgacgtaaaaacatttcagggtttcattctaaccctacaggaatattgggcgcagcaaggctgtgcaatcgttcaacctctagatatggaagtcggtgcgggtacattccacccacaaactttcctacgctctttagggcctgagccaatgagcagtgcctatgtgcagccatcgcgccgccctaccgacggccgttacggtgaaaacccaaaccgtctgcagcactactaccaattccaagtcgtgttaaaaccgtcaccggataatatccaagaactctatttaggttctctgcaggcccttggtattgatacacaaatccatgatatccgttttgtggaagacaactgggaatcaccaacattaggcgcatggggcctaggctgggaagtctggttaaacggcatggaagtgactcagtttacttacttccaacaggtcggcggcttagagtgtagccctgtcaccggtgaaatcacctacggtttagaacgtctcgccatgtatattcaaggtgtagatagcgtgtatgacctagtatggaccgatggccctatgggtcgcatcacctacggcgatgtgttccaccaaaacgaagttgagcaatcgacctataactttgaacacgcagacgtcgactttatgtttgccctgttcgatcaatgcgaaaaaatgtgtcagcatttattgtcgcttgaaaaaccattacctctacccgcctatgagcaagtgatgaaagcctctcacgccttcaacctgctcgatgcacgccacgccatttcagtgactgagcgtcagcgttatatcctgcgcgttcgtaccatggctaaagccgttgctgaatcctattatcaggcacgcgaagcgcttggcttcccaatgtgtaagtag

SEQ ID NO: 298762 - DNA, 2068 bp, Unknown
  Bacterial polypeptide expressing nucleotide sequence isolated from the Sargasso Sea
catgaattttgaaaacttactcatcgagttaggcactgaagaactgccgccaaaggcgctgcgtaaactggctgagtctttcttagcgaactttaccgaagaactgactaaagccgatttagcatttaaatctgccgtttggtatgcagcgccacgtcgtctggcgattaacgtaaccgaactggcacttgctcaagccgataaagttgttgaaaaacgcggcccagcagtaagctcggccttcgacggtgaaggtaaaccaacgaaagccgcagaaggctgggcacgtggtaacggtattaccgttgaccaagctgagcgtttggtgaccgacaaaggcgaatggctggtttataacgccaaagtagaaggcgttgaaactaagagcttaatcgcagctatggcgcaacgtgcgctggataagttacccattcctaagccaatgcgctggggaagtagcaagacacaattcattcgccctgttcacaccgccactatgctgttaggcagcgagttaatcgaaggtgaattactcggcattaaatcggcacgtaatgttcgtggtcaccgctttatgggtacaggcttcgagcttgaccatgcagacaactacctgaccctactgaaagaaaaaggtaaagtcatcgccgattacgaaagccgtaaagccataatcaaagccgatgcagaaaaagcggccgctaagattggtggcaccgccgatatcgaagatgacctgctggaagaagtcacctctttagttgaatggccagtcgtattaaccgcaagctttgaagagaagttcttaaacgtaccttcagaagccttggtttatacgatgaagggcgatcagaaatacttcccagtattcgatgatgcaggtaagttactgccaaacttcatctttgttgcgaacatcgagtcaaaagatccggcacaaatcattgcgggtaacgagaaagtggttcgtccacgcttggccgatgccgagttcttcttcaataccgacaaaaagcacacgctggaatcacgtttaccgagtcttgaaaccgtcttgttccaacaacaactcggtactttaaaagacaaagtcactcgtatctctgccctagccgcctttattgccgagcaaactggcgctaacgccgttgatgctgcccgtgctggtttattgtctaaaactgacttaatgaccaatatggtgatggagtttaccgatactcaaggcactatgggcatgcattacgcccgcctagacggtgaaacagaagccgtcgccttagccatggaagagcaatacaagcccaaattctctggcgatacagttccgactgcagcagtatcttgcgcggtagctttagcggataaactcgataccttagtcggtatcttcggtattggtcaggcacctaagggcgctgccgacccattcgcactgcgccgcgccgctatcggtgtgttacgcattatcgttgagaacaagttgccactagacttagtgaccctgattgctaaggctcaagaactccatggcacgaacttaagcaacgcgaatgcaagcgatgaagtgcttgagttcctaatggcgcgtttccgtgcttggtaccaagataaaggtatcgaggttgacgtgatcctcgccgtattagcacgtcgcccaactcgccctgctgattttgatagccgtatcaatgcggtatcacacttcagaagcttagatgcctctagcgctctggcagcggcgaataagcgtgtgtctaacattctggcgaaagtggaaggtgaattacctactgcgattaactcagctctgttagccgaagcagcagaacaagcattagccgctaagcttgccgaactgcagcctcaactcgctccgctgttcgctaatgctgattaccaacaggcattaacactgctggcaagcttacgtgagagtgttgaccagttcttcgaagacgtgatggttatggcggacgacgaagcattgaaaaacaaccgtttagctctacttaataacctacgtgagcagttcttacatgtagcggatatttctctgctccagtaa

SEQ ID NO: 298763 - DNA, 460 bp, Unknown
  Bacterial polypeptide expressing nucleotide sequence isolated from the Sargasso Sea
aatgttttttcaggatataattcaaaatttaaataatttttggtcagaagaaggttgtttgataatgcagccatatgatacggaaaagggtgctgggacaatgagtcctcatacttttttgagggcaattggacccgaaccttggtctgttgcatatgctgagccatgtagaagacccacagacggaagatttggtgataaccctaatcgtgcacaacattattttcaatatcaagtaataattaagccttccccagatgggatccaagaaaaatatttgaaatctctggaatctcttggaatagaggctaaaaatcatgacataagatttgtagaagataattgggagtcgccaactcttggagcttggggcgtaggttgggaagtatggctagacggaatggaagttactcaattcacttattttcaacaatgcgggggagttgattgtcaacccaat

SEQ ID NO: 298764 - DNA, 792 bp, Unknown
  Bacterial polypeptide expressing nucleotide sequence isolated from the Sargasso Sea
tatgagtattgaaaaaatagtttcactctgtaaaaggagagggtttgtttttcaaagctctgaaatttatggaggatacggcgctgtctatgattatggtccacttgggattgagttaaagaataagatatcccaactatggtggaaatcgatgacccaacttcatgataacatcgtaggtctagacagcggaatattgatgcatccaaagatttggaaagcatctggtcatgttgatgcatttaatgatcctttagtcgattgcaagcaatgcaaagctcgttttaggtcggatgaattagttagcgaagaaacttccgcaacagactggtcatctcttcagtgcccaaaatgtggaacaaaaggaagcttaacagagcccaggcaattcaatctaatgttcaagactcatattggacccattgaaaatgaatcaaataccacatacttaagaccagagaccgctcaaggtatctacgttaattatctattaacacaaaatgctatgcgacttaaaattccatttggcattgcacaaataggcaaagcatttagaaatgagatcgtagcgagaaatttcattttcagaacacgcgagtttgagcaaatggaaatgcaatatttcataaaacctgagaatgatgataaatcaatggaatattggaaaaatgaaagatataatttctattcgctgatcggaattgattctaataaaattcgactaaccgaacatgggcctaatgaattagcgcattatgcgaaggaagcttgggacattgaatataaatttcc

SEQ ID NO: 298765 - DNA, 307 bp, Unknown
  Bacterial polypeptide expressing nucleotide sequence isolated from the Sargasso Sea
tatgaatgttgcaaaacctaaatcgttccaagaaattgttttgaggttgcaaaactactggtcagacaatggttgtgcaattcttcagccctacgatatggaggtcggtgctgggacgttccatcccgctactacgctgagatcacttggcgaaaatcattgggctgctgcttatgtccagccgtctagaagaccaagcgacggcagatatggcgaaaatcctaatcgactgcaacattattatcaatttcaggtaatcatgaaacccagtcctgaggatttccaagaactatatttggggtccctt

SEQ ID NO: 298766 - DNA, 2059 bp, Unknown
  Bacterial polypeptide expressing nucleotide sequence isolated from the Sargasso Sea
atgtctgtgcaagattttttcgtagaaattggtaccgaagagttaccaccaaaagcattaaaaactctggcgactgcctttgctgacaatatcactgaagagctggccaagcagaacttaagccatgccgatgtcagctggtatgctgcgccacgccgtttagctgttcgtgtcaaccaactggcgttgcaacaacaagacaaagtggtggaaaaacgtggtccggctttggctgccgcttttgatgccgatggtcagcccaccaaagctgctgcagcctgggctgcgtcgaacggtattactgcagatcaggccgagcgtttagaaacagacaaaggtgcctggttaattcacaaagctttgattaaaggcgaaagcacagttgcattgttacccgctgtgatcagcactgctttagctaagttacctattgccaagccaatgcgttggggcaattcaacggccgaatttatccgccctgtgcacactgtcaccctgttattaggtgacgatgtagtgcctgccactattctgggcaaagagtcgggtcgtgttagttatggccaccgtttccatgcaccagctttggtcgaaatcaaaaatgccgatgcctacttaagcacgttggaacagtcttatgtcattgccgacttcgctaaacgtaaagctattattgctgaaaacgtggcagctcaggccaaagctctaaacggcgtggcactgatggatgatgctttgctggaagaagtggcttcattggttgaatggcccgttgtgctggtgggctcttttgaagaacgtttcctgcaggttcctgctgagccgttaatctccaccatgaaagacaaccagaagtacttcccactggttgataacaatggcaagttactgaataaattcatctttgtggccaatattgagagcaaagatccaagccagattatctcgggtaatgaaaaagtagtgcgcccacgtttatctgacgctcagttcttttttgtcacagatgcaaaaactaaactggtcgatcgtctgccagctttaagcactgtcttgttccagcaaaagctgggtactttactggagaaatcagagcgtatcgccaaagtcgcagcctttattgctggcaaaattggtgctgacgtacaacataccgaacgcgctggtttactgtctaaaaccgacttaatgaccaatatggttggcgaattcccggaagtgcagggcgtgatggggatgcattatgcccgtctggacggtgaggccgaagctgtggctgtagcgctgaatgagcaatacaaaccacgttttgccggtgacagcctgccaagccaactggaagcttgtgctgtggccattgccgataaaatggattcgctggtgggtatctttggtataggccaggcgccaaaaggcgacaaagaccccttcgccttacgtcgtgccgccataggtgcgctgcgtattatggtggaaaaacagttaccactggatctgcttgaactgattgaattcagcaaaaccaccttcggtgacaagctgacgcaggcatcagtctcggaggaagtgctggactttatgctgggccgtttccgcgcctggtatgaaggcgaaggttttggtgtagacgtgatccaggctgttttagcccgccgtccaaccaatccggcagacttcgaccgtcgtgttaaagcagtggctgaattccgcaaactggatgctgctttagctttagccgctgccaataagcgggtagcgaacattctggcgaaagtgacagaagctattccagagagcatcaacagcgctctgctgagcgaagaggccgaacaagccctgcataaggccatagtggctgaacaagcctatcaggccactgtaagcagctatgccgaaggtttaagccatctggcggctatgcgtgaagttgtcgatcaattcttcgacaaagtcatggtcaacgctgacgatgcggcagtacgcttaaaccgtcaggctttgttacagcaattacgtgaattattcctgcgagtcgcggatatttctgtattgcagtgat

SEQ ID NO: 298767 - DNA, 987 bp, Unknown
  Bacterial polypeptide expressing nucleotide sequence isolated from the Sargasso Sea
cagcggcgcaaataggtatacttttcagtcatttttaccagcaggtcaggctaatgcaaaagtacgatatgaagaccttccaggggttgatcctggcattacaagattattgggcacgccagggctgcgttattgttcagccgctggatatggaagtaggggccggtactttccatcctatgacttttttacgttctttaggcccagagccgaccaacgtggcttatgtgcagccttgccgccgtcctactgatggccgttacggtgaaaacccaaaccgtctgcagcactattatcagtttcaggtgatcttaaagccgtcgccagccaatattcaggagctgtatttaggttccttacgtgaactgggtattgataccctggtgcacgacattcgttttgtagaagacaactgggaatcgccaacgctgggcgcctgggggctgggttgggaagtgtggctaaacggcatggaagtgactcagttcacttatttccagcaagttggtggcttagagtgccgtcctgttacaggcgaaattacctatggtttagagcgtctggcgatgtacatccagggcgtggacagtatttatgatctggtctgggctgacggtcctttaggccgtgtcacttatggtgatgtattccaccagaacgaagtagagcaatcgacttacaactttgaatatgctgacgtgccagcgctgttcacttacttcgaccagtgtgaagcagaaagccagaagctgattgaagcaggtttggctttgccggcttatgaaaaagtaatgaaagcctcacatgcttttaacttactggatgcccgtcacgccatttctgtgaccgagcgccagcgttatattctgcgggttcgtaccctggccaaagcctgtgctgaagcctattttgctgcgcgggaaaagttaggttttcccctatgtagtgatagcaagagccgtaaccagtcaacgcaggaggcataat

SEQ ID NO: 298768 - DNA, 1339 bp, Unknown
  Bacterial polypeptide expressing nucleotide sequence isolated from the Sargasso Sea
atgtcagaatcatccttagataaaataatttcactttgcaaaagaagaggatttatatttcagagctctgaaatatatggaggatttggagcggtatacgattatggtcctttgggtgtagaattaaaaaataatatttctcactcctggtggaaatttatgacacataatcatgaaaatattgttggtctggatagtggtattttcatgcacccaaaaatatgggaggcatctgggcatgttgatgccttcaatgacccattagttgattgtaaacaatgtaaagcccgatatcgtgctgatgaacttattaaagaagattttatgaatgcaaattgggctgaaattcaatgtcctaaatgtggtactactggtaacctaacaaatccacgtcagtttaatttaatgtttaaaacaaatattgggcctatagaatcggaaagtgaaactgcttacttacggccggagactgctcaaggaatatatgtaaattatttattagtacagggcaccatgcgacaaaaagttccttttggaattgcacaaataggaaaagctttccgcaatgaaatagttgcgcgaaattttatttttaggacaagagagtttgaacaaatggaaatgcaatattttgttaaacctggcgatgatgataatgcaatgattgattggaaagaaaaaagatataatttttatattgatgagttagggataagtgaagataaaattcgttttcagcaacacggcaaggatgaattagcacattatgcaaaagaggcttgggatatagaatatgaattcccatttggctggtctgaagttgaaggggtccataatcgcactgattttgatctaaaaagacatcaagaattttctggaaaaaatatgcagtattctgaccaattattaaatgaaaaatattttccatatattattgaaacttcagcaggtttgaatcgcatgttattaactgtactttgtgatgcgtattgggacgatagtgaaaataaccgcattgttatgaaaattcatcctaagctagctccgataaaagctgttgtatgtcctcttgttaaaaaagatgggctacctgagatagggcataaaattgtaagcgatttaatgaaaaattttaacgtgctttatgatcaacaaggatccattggtaaacgatattatcgacaggatgaggctggcacacctttttgtattacagtcgatcatgaatcaaaggaaaataatacagttacattaagaaatcgggatgatcaaaatcaagatcgtgtaaaaatctctgacttggtttcgatcatacaaaatagaatggatatagtatgag

SEQ ID NO: 298769 - DNA, 883 bp, Unknown
  Bacterial polypeptide expressing nucleotide sequence isolated from the Sargasso Sea
tatggtttctaaaaaaaaaattaaaaaacttaaacatcaatcatttcaagatacaatcttgaatttacaaaaatattggagcagacatggatgtgtaattttacaaccatatgacttagaggttggtgccgggacatttcacccagctacaacacttagatctttaggaagtaagccatggagaacagcctacgttcaaccttcaagaagaccaactgacggaagatatggtgaaaacccaaatagacttcagcactattatcaatttcaagttttaattaaaccctcaccaaaaaatataaaaaaactttatttaaacagtctttcagcaataggaattaaacataaagaacacgatataagatttgttgaagatgattgggaaagtccaacattaggagccgcaggccttggatgggaggtttggtgtgatggcatggaagtaactcaattcacttatttccaacaaatgacaggaatagaatgtaatcccatttcagttgaattgacatacggactagaaagactttgcatgtttacccaaggaaaaaaaaatgtttttgatttagaatggaataacgatggagttttatatagagatgtatttcatcagtcagaaaaagaattttcaaaatataattttgaattagctaatactgataatttatttacaatatttgatatgacagagaaagaatctaaatctttaatagaaaacaaactatctttaccagcttatgatcaatgtttaaaagctagtcatatttttaatatattagatgctagaggagtaataagtgttgcacaaagagctaaatatatagcaaggatcagagatcttgcaaaagacgttggtcagatttggctcgaaagtcaaaaataa

SEQ ID NO: 298770 - DNA, 1237 bp, Unknown
  Bacterial polypeptide expressing nucleotide sequence isolated from the Sargasso Sea
tatggatagtagcatagaaaaaatcgtttcattatgtaaaagacgaggatttatctttcaaagctccgaaatatatggaggattttctgcgatatatgattatggaccattaggtattgaactaaaaaatcaaatatcccaattatggtggcgtgaaatgacacatgcacatgaaaatattgtagggttggatagtgggatattaatgcacccaagaatctgggaggcatctggccatgtaaatgcttttaatgatcctttaattgattgtaaacattgtaaagctcgttttcgagcagatgatttcgaaaaagacagtaaaagtactatctggaaagatatacaatgtcccagatgtggtacggttggaagtttaacagagccaagacaatttaatctcatgtttaaaacaaatataggtccagtggcagaaaaaggtacagaagcctatctacggccagaaaccgcccagggaatatatgttaactatttgctggtccaaggcgctatgagattaaaagtgccttttggtatcgctcaaattggaaaagcttttcggaatgaaataattgcaagaaactttatctttagaaccagagaatttgaacaattagaaatgcaatactttgttaaaccggggtctgacgataaaacttttcaagaatggaaagaagagcgaatggctttttacattgattttttagatattgataagtcctcattaagattttacaaacatggagaggaggaccttgcccactatgcaaaagaagcatgtgatattgaatacaaatttccttttggatggtctgaaattgaaggagtacacaatagaacaaattttgatttatctcaacatgaaaagttttctggaaaaaagatgtcctattttgaccaacaaaaaaatgaacgttatttaccttatatcatcgaaacatctgccggtctaaaccgaatgcttttaaccgttcttacaaacgcctattgggatgataaagaaaacaaccgaattgttctaaagctttcgcctaaaatagctccaattaaagctgctatttgcccattaacaaagaaagatggcttgcctgaaaaagctaggaaaattatggatattttaaaaccaaaatttaaagttatatttgatcagcaggggtctattgggaaaagatattacaggcaagatgaagcagggactccttttggaattacaattgaccatcaaacatatagaagataa

SEQ ID NO: 298771 - DNA, 610 bp, Unknown
  Bacterial polypeptide expressing nucleotide sequence isolated from the Sargasso Sea
tttgattaaaccttctcctgaaaatataaaaaggctttatctaaatagtcttactacaattggaattcatcaaaatgatcatgatatcagatttgttgaagatgactgggaaagtcctacattaggtgcagctggtttagggtgggaagtttggtgtgatggaatggaaattactcaattcacttactttcaacaaatggctggttatgaatgcaaaccagtttcagtagaaattacctatggcttagagagaatctgtatgtttacacaacaacaaaaaaatgtttacgatttgttatggaatgatgaggatataaaatacagggaagtttttcaccaggctgaaaaagagttttcggcttataattttgagcatgctaatgttgaacaattattcaaaatgtttgatatgcatgagtcagaagcaaaatcattagttgaaaaaaaagtttcactacctgcgtatgatcaatgtttaaaagcaagccacgtatttaacattttagatgctaggggagcaataagtgttgcacaaagagcaggttacattggaagaattcgtgacatcactaagtctgctgctgggatttggatagatagtcaaaattaa

SEQ ID NO: 298772 - DNA, 634 bp, Unknown
  Bacterial polypeptide expressing nucleotide sequence isolated from the Sargasso Sea
aagaaaacaaaaaaacctcgtttgcaatcttttcaagatacaatcttgaatttacaaaagtactggagcaaacagggatgtgtcatagttcaaccttatgatatggaggttggtgccggcacattccatcctgcaactactttaagatctttaggaccaaaaccttggaaagttgcatatgtgcaaccatcaagaagaccaacagatggaagatatggagataacccaaatagattgcagcattattatcagtttcaggttctaattaaaccatcaccagataatattaaaaaattatttctgaatagtctttcttctttaggaatcaaacatgaagagcatgacattagattcgtagaagatgattgggaaagtccaacacttggagccgctggcttaggttgggaagtttggtgtgatggcatggaaattacacaatttacttattttcaacaaatggcaggcgtagaatgtaatcctgtttcagttgaaataacttatggtcttgaaagactatgtatgttcatacaaaataaaaaaaatgtatttgaattaaattggaataatcaagaagtactttataaagatgtttttctatcaatcagaaaaagaattttcagcttacaattttgaa

SEQ ID NO: 298773 - DNA, 874 bp, Unknown
  Bacterial polypeptide expressing nucleotide sequence isolated from the Sargasso Sea
atggcctctaaaaaaaatttaaaaatacaaacattccaggatacaattttaaatctgcagaaattttgggcaaaaaatggttgtgtaattttacaaccatatgacatagaagttggtgcaggcacatttcaccccgcaaccaccttaagatctttaggacccaaaccatggagatcagcttatgtacaaccatcgagaagaccaactgatggaagatatggagaaaacccaaatagactacaacattactatcagttccaagtgattatcaaaccgtcaccaaaaaatattaaaagattatatcttagtagtcttaatgccattggaataaaacataatgaccatgatattagatttgttgaagatgattgggaaagtcctacattgggtgcagccggactaggttgggaagtttggtgcgatggaatggaaattactcaatttacttattttcaaaaaatggctgggatggattgtaaacctatttctgtagagcttacttatggtttagaacgattatgtatgtttacccaaaagaaaaaaaacgtatttgatttaatatggaacgatgaaggtattctttataaagatgtttttttacaagctgaaaaagaattttcatcttataattttgattttgcaaatgttgagaacttgtttaaattttttgatatgctggaacaagaaaccaaatctttgttagaaaaaaaactctcactccctgcctatgatcagtgtttaaaagcaagtcatgtttttaatattttagatgccagaggagcgattagcgtagcgcaaagagcagagtttattgctagaattagagatttgaccaaaggtgtgggtcaagtatgggtagatagccaaaaataaa

SEQ ID NO: 298774 - DNA, 1342 bp, Unknown
  Bacterial polypeptide expressing nucleotide sequence isolated from the Sargasso Sea
atggaagaattagtttctctctgtaaaagaagaggtttcatatatcaaaccaatgaattgtatggaggaatgcaaggtgtgtatgattatggtccgctgggagttgaactaaagaataatcttaagcaagcctggtggagttccatggtttacgaaagagatgatgtcgaaggtttagattcttcaatactaacacatccaaatgttttgaaatactctggtcacgaagatacatttactgacccactggtggattgcaaggattgtaaatcaagatggagagcagaccatattgatgatggtaaatgtccttcatgtggatcagaaaatctaaccgaccctaggccttttaatctgatgtttaaaacaactattggacctgtagatgatggttcaagttttgcttatttaagaccagaaacagctcaacaaatttttacaaattttaaaaatgtagtcgattcgacatcaagaacattaccttttggtattgcacaaattgggaaagctttcagaaatgaaataactccaaggaattttatttttagagtaagagaatttgaacaaatggaattagaattctttgtagaaccaggtagtgacgaagaatggcatcaaaaatgggttgatgaaagagtaaaatggtgggaacgacaaggagtggataaaaataacctagaaattattgatgttgatcaagaggaattatcacattattcgaaaaagactgttgatatcatgtataaatttcctcacggtcttgaggaactagaaggaattgcaaacagaactgactttgacataggttcacacactaaaaatcagaaagattttgaaataaagtcggatgttatgaaaaatgatgactctgtaacaaaattagcgatacaaaataaaattaataattcatggactattccgtatgttattgaaccctctgctggagttgacagagggtttttagcagtattgaatgaatcttacaaaattgagaaacttgaaaatggcaaagagagaaccgtactatctcttaaatctcatttgtcacctattaaggctgcggttattccattaaaaagaaataatcaagatttagttgatagagccatagaattaaaaagccagctacaatcaattggtttaggaagagtagtcctcgataatgcaggtaatattggaaaaagttatagaaggcatgatgaggttggaacacctatgtgcataacaattgactttgaaacattagatgataattctgttacggtaagagatagagatactatggagcaaaaaagaattaaactagatgaaatttctaatttttttgttaaaaatctctaat

SEQ ID NO: 298775 - DNA, 925 bp, Unknown
  Bacterial polypeptide expressing nucleotide sequence isolated from the Sargasso Sea
atggttgcgaacgctcctcagtcttttcaggatatcatcctacggctccaaaattattgggtggcacaggggtgcgccttgatgcagccgtacgatatggaagtcggagcaggaacttttcaccctgccaccacactaagatcgttgggccctaaatcatggtcggtagcctatgttcagccttctagaaggccaactgatggtcgttatggagaaaatccaaaccgtttacagcactattatcaatttcaggtattaatgaaacccagtcctcctgattttcaagacctgtatttaggatcattggatgcaattggcattgatagtcaattacacgatataaggtttgttgaagatgattgggagagcccaacgcttggggcatggggcttaggttgggaagtttggtgtgatggtatggaagtaagccaatttacatattttcaacaagttgggggtcatgactgtaatccaacttccggtgaattgacatacggtttagaaagactggccatgtatatactaggtgtcgaccatgtaatggatatgccattcaataacccaaaagccaatattccgctaaaatacggagatatttttaagcaaaccgaagaagaatattccagatggaattttgatgttgccaataccgaaactcttttccgacattttgatgaggcagagcaaagttgcatagaaatattatctcaagatgagttagattctaaatcaggaaaaaacattaccatggttcatccagcttacgaccagtgtattaaagcttctcatatattcaatattcttgacgctcgaggtgtcatatcagttacagagcggcaagcttatattggccgggttagaggattggcaaaacagtgcgccgatgcttttgttttaactgccgccgggggaaacgttaattgaa

SEQ ID NO: 298776 - DNA, 1112 bp, Unknown
  Bacterial polypeptide expressing nucleotide sequence isolated from the Sargasso Sea
ggatcccttagtcgactgcaaagactgcaaggccagacaccgagcagatcacatttcagacgcaacgtgcccaaattgcggatcaactaaccttacagcaccaagagcatttaatttaatgttcaaaactaacgtaggtcccatagacgacggctcttcttatgcttttttgcgacctgagacagcccagtcaatttttacaaattttaaaaatgtcgttgattctacctcaagaaaattacccttcgggatagcccaaatcggcaaatcattcagaaacgaaataactcccaggaattttatttttcgagttagagaattcgaacaaatggaattagaatacttcgttaagccaggggtagatgaggaggctcacgaatcctgggtacaaagcagagtaaattggtggatcgaacaaggtataaactcaaacaaccttgagttgtataaagtcccacaagaggaactcgcacactacagtaaggcgacggttgatttaatgtatcggttcccacatggtctcgaggaattggaaggaatcgcaaacagaaccgattttgatctgggctctcatacaaaaaatcaagaagattataaaatccaagcgatagtagagaccaacaccgaatcgaacgcaaaattagcgattgaaaataccgaagaaaaaacgtggcaaataccttacgttattgaaccatctgccggagttgatcgcggtgtattagcaataatgaatgaggcttttaatgtcgagcaactagataacgataagtctaggaccgtaatggcgtttaagcctcaccttgcgcccattaaagctgcaatcttgcccctcaagaaaaacaatctggaaatcgtcaataaagcaaaaaatttaaaggcaaatctccagaaactagggcttggaaaaatctcttacgaagataccggaaacatcggaaaaggatatcgaagacacgacgagattggcacgcccttttgctttactgtcgattttcaaacgatcgaggaagattcttcggttacggcacgcaacagagataccatggagcaagagcgagttaacattgagaatctgcctacattcttagcttctcagttgaaaccttgag

SEQ ID NO: 298777 - DNA, 898 bp, Unknown
  Bacterial polypeptide expressing nucleotide sequence isolated from the Sargasso Sea
atggtttctaaaaataaaaataaaaataaaaaaaaacaaaaaccaaaatttctaacctttcaagaaactattttaaatctccaaaaattttggagtaaacaaggatgtattattcttcagccatatgatatggaagttggagctggtacgttccatcctgctacaacccttagatcgttgggtattcaaccatggaaaaccgcttatgttcaaccatcaagaagaccaacggatggtagatatggtgaaaatcccaatagacttcaacattattatcaatttcaagttttgattaaaccctctcctgaaaatataaaaaggctatatttaaatagtcttactacaattggaattcatcacaatgatcacgatattagattcgttgaagatgactgggaaagtcctacattaggtgcagctgggttaggttgggaagtttggtgtgatggaatggagattacccaattcacttactttcaacagatggcaggttatgaatgtaaaccagtttcagtagaaattacttatggtttagagaggatttgcatgtttattcaacaaaaaaaaaatgtttacgatttgttatggaatgatgagaatgtaaaatacagagaagtttttcatcaggctgaaaaagagttttctgcttataattttgagcacgctaatgttgaacaattattcaaaatgtttgatatgcatgaattagaagcaaaatcattagttgaaaaaaaagtttcactacccgcatatgatcaatgtttaaaagcgagccacgtgtttaacgttttagatgcgaggggagcaataagtgttgcagaaagagcagggtatattggaagaattcgtgacatcactaagtctgctgctgggatttggatagatagtcaaaattaaa

SEQ ID NO: 298778 - DNA, 1107 bp, Unknown
  Bacterial polypeptide expressing nucleotide sequence isolated from the Sargasso Sea
tagttgattgcaaggtttgcaaggcaagatttagagcagaccaattagaaaatagtgagtgtcctagaggtgggtccttaactaattgtaaatttaaggatttaactgaagcgagaccatttaatttaatgttcaaaactgcaataggaccagttgatgatggtagctcatttgcatatttaagacctgagacagctcaacagatttttgtaaacttcaaaaatgttgttgactcaactagtagagttcctccttttggtatagctcaaattggaaaagcatttagaaatgaaattacaccaagaaactttatttttagggttagagagtttgaacaaatggaacttgaatattttgtcaaacctggttctgatgaagattggcataaatattggttagataaacgtttaaattggtgggctgaacaaggagtcaaatcagaaaaattaaaactacttgaggtggagaaaaaagatttatctcactattcaaaagccacattcgacattatgtacgacttcccgcacggtcttgaagaacttgagggtattgctaatagaactgattttgacttaggatctcactctaaaaatcaaaaagattttaatattaaagctaatattcaagaaaataaaaactctacaacaaaattagctattcaagatttagaaaataaagaatggtttataccttttgttatagaaccctctgcaggagtagagagaggtgttttggctgttttgaatgaggcatatactattgaggaggcaaataaaagaactttgcttaagctacaacctcatttatcgccaatcaaagcagctgtaatcccactaaaaagaaataactctgatttggttaataccgccaataatgttaaatcagaacttcaatcacttggtttaggaagagttattgttgaaaatactggaaatattggcaaaaattatcgtagacatgatgaaataggaacgcctttatgtatcacgattgattttgaaactcttgaaaatcagacagttacaattcgtgacagagatacaatgaaacaagaaaaagtatctttatctgaagtggcaaattattactctaaatattttaggtaat

SEQ ID NO: 298779 - DNA, 1516 bp, Unknown
  Bacterial polypeptide expressing nucleotide sequence isolated from the Sargasso Sea
agaaattatttcacactcaaaagagtatggatttatattcccctcaagtgaaatttatgaaggccttaatgcaatttatgactatggtcataatggtgtgcttttaaaaaataatatcagagaatattggtggaggtccatggttcagctaaatgaaaatattgtaggtatagattctgcaatatttatgcatccaaagacttgggttgcatcaggccatgtagatgcttttaatgatcctcttattgataataaggactcaaaaaaaagatatagggctgatgttctaattgaagaatttattgaaaagctaaattctaaaattcaaaaagaagttcaaaaagctgaaaaaagatttaaagaaaaatttgataaagttcagttcttaaatactagcccaaaaattttagaaataacaaatcagattaatgaattaaaatcaagaatgatatcagcttttgaaaaagatgatttggtagaagtaaaaaaaataattgacgatatggaaattaaatgtccaatttcaggaacatgtaattggacagaagtcagacagtttaaccttatgtttagtactaagttaggagcttctgaagagtcaagtatggatttatatttaagacctgaaactgctcaaggaattttcttaaactatttaaatgttcaaaagacctcaagaatgaaaattccttttggaattgctcaaactggtaaggcgtttagaaatgaaattgttgccagacaatttatctttagaatgagagaatttgagcagatggagatgcaatttttcattaaacctggaacccaggaaaattggtttaatcattggaaagataaaagacttaactggcatttaaatttaggtattgatccaagtttatttagataccatgatcatgataaacttgcacattatgctgacgctgcatgcgatattgagtttaattttccatttgggtttaaagaacttgagggtattcattcaagaactgatttcgatcttaaaagccacgaggagctttcaggtaagaaaattcaatattttgatcctgaattagataagaactatacaccatatgttcttgagacatctattggtttagatagaatgtttcttgcaattatatctaactcatttaaactagaaaccctagaagatggatctacaagaaatgttatgagtatacctaagcaaattgctccaaacaaattagcagttcttccactactcaaaaaagatggacttccagaatatgctagaaaagttatgaatgagtttagtcataagattaatcttgtttatgatgaaaaagatgcaattggaagaagatatagaagacaagatgcaattgggactccatattgtattacgattgatcaccaaacaattgaagatgattcattcacaataagagatagggactcaatggaacaaaaaagaataaacatagaagatttaaaatctattgttgatagtgaattaacacttaaaagtttattaaaaaagctttaa

SEQ ID NO: 298780 - DNA, 2068 bp, Unknown
  Bacterial polypeptide expressing nucleotide sequence isolated from the Sargasso Sea
catgaattttgaaaacttactcatcgagttaggcaccgaagaactgccaccaaaggcgctgcgtaaactggctgagtctttcttagcgaactttaccgaagaattaatcaaagccgatttagcttttaaatcagctgtttggtacgctgcgccccgtcgtctcgccattaatgtgactgaactggctattgctcaagcggacaaaatcgttgaaaaacgcggcccagctgtgagttcagcttttgatgccgaaggtaaaccaacgaaagccgcagaaggctgggcacgtggtaacggtattaccgttgaccaagctgagcgtttggtgaccgataaaggtgaatggctggtttataacgccaaagtcgaaggcgttgaaaccaagagcttaatcgcagcgatggcacaacgtgcgctggataagttacccattcctaagccaatgcgctggggaagcagcaagacacaatttattcgcccggttcacaccgctaccatgctgttaggcagtgagttaatcgaaggtgaattgctcggcattaaatcggcacgtaatgttcgtggtcaccgctttatgggtacaggcttcgagcttgatcatgcagacaactacctgacactgctgaaagaaaaaggtaaagtcatcgccaactacgaaagccgtaaagccttaatcaaagctgatgcagaaaaagcggccgctaagattggtggcacagccgatatcgaagacgacctgctggaagaagtcacctctttagttgaatggccagtcgtatcaaccgcaagctttgaagagaagttcttgaacgtgccttcagaggccttggtttatacgatgaagggcgatcagaaatacttcccagtattcgatgatgccggtaagttactgccaaacttcatctttgtcgcgaacatcgaatcaaaagatccggcacaaatcattgcgggtaacgagaaagtggttcgtccacgcttggctgatgctgagtttttctttaataccgataagaagcacacactagaatcacgtttgccaagccttgagactgtgttgttccagcaacaactcggtaccttaaaagacaaagtgactcgtatatccgccctagccgcctttattgccgagcaaactggcgctaacgccgttgatgcagcgcgcgctggtttattgtctaaaacagacttaatgaccaatatggtgatggagtttaccgatacgcaaggcactatgggcatgcattacgcccgcctagacggtgaaactgaagccgtagccttagccatggaagagcaatacaagccaaaattctctggcgatacggttccgacggcagcggtatcttgcgcagtcgctttagcggataaactcgacaccttagtgggtatcttcggtatcggtcaggcacctaagggcgctgccgacccattcgcactgcgccgcgccgctatcggtgtgctacgcattatcgttgagaacaagctgccactggacttagtgacgctgattgctaaggctcaagaactccatggcactaacttaagcaacgcgaatgcaagcgatgaagtgcttgagttcttaatggcacgtttccgtgcttggtaccaagataaaggtatcgatgttgatgtgatcctcgccgtattagcacgtcgcccaactcgcccagctgactttgatagccgtatcaatgcggtatcacacttcagaagcttagaagcctctagcgctctggcagcggcgaataagcgtgtatctaacattctggcgaaagtagaaggcaaactaccgactgcgattaattcagctctgttagccgaagcagcagagcaagcgttagctgcaaaacttgctgaacttcagcctctgcttgctccactgtttgctaatgcggattaccaacaggcattaacgctgctggcgagcttacgtgaaagtgttgaccagttcttcgaagacgtgatggtaatggccgatgacgaagccctgaaaaacaaccgtttagccctgctaaataatctacgtgagcaattcttacatgtagcggatatttctctactccagtaa

SEQ ID NO: 298781 - DNA, 874 bp, Unknown
  Bacterial polypeptide expressing nucleotide sequence isolated from the Sargasso Sea
gatgccaactaaaaaaaaatttaaatctttatcctttcaagagatcataatgaatttgcaaaaattttggggaagatacggttgtgtaatcttacaaccttatgatttagaagtaggagcaggaacttttcatcctgcaacaactttaagatctttaggacctaagccatggaaagcagcttatgtgcagccttcaagaagaccaacagatggaaggtacggagaaaatccaaatcgattacaacattattatcagtatcaagttataattaaaccttcacctgaaaatattaagcaaacttatttaaaaagtttatctgcaattggtattgatgttaaaaatcacgacatacgttttgttgaagatgactgggaaagtccaacattaggtgcagcaggattaggctgggaagtttggtgtgacggtatggagataacacaatttacttattttcaacagatgacaggattagaatgcaaacctgttccagttgaaatgacttatggtttagaaagattatgcatgtttgtccaaggaaaaaagaatgtattcgatcttgattggaacaatgaaggagtaaaatataaagatgtattttttcaagcagaaaaagaattttctgcgtacaattttgaatttgccaataccgaaaatttattaaaaaattttgaatcgacagaaattgaatgtaaatctttattagataaaaaactttctttacctgcatatgatcaatgcttaaaagcaagtcatatatttaatttacttgatgccagaggagtaattggtgttgcagaaagaactggttatataaacagaataagagagctcgcaaaaggatgcggagcactttggttaagtacacaaatttaa

SEQ ID NO: 298782 - DNA, 990 bp, Unknown
  Bacterial polypeptide expressing nucleotide sequence isolated from the Sargasso Sea
aatgccagctcaatcaatggaacaattagtatctttgtgtaaaaggagagggtttatttttcaaacaaatgaaatttatggtggtcttcagggtgtctacgattatgggcctttgggtgttgagttaaaggaaaacttaaagaggtcttggtgggcagcaatggtctactccagagatgatgttgaaggtcttgatgcctctatacttactaatagaaaagttcttaaatattcgggtcacgaggatacctttacagatccactagttgattgtaaggactgtaataatcgcatgagagcagatcatttaaaagatagtaagtgcttacattgtggatcaacaaaccttactaaaccgagaccatttaatctgatgtttaaaacaaacattggacctgttgctgacgatgaatcttatgcatatttaagacctgaaacagcccaacaaatatttactaacttcaagaatgtagttgatgcaacatcaaaatctataccttttggtattgcccaaattggtaaggcctttagaaatgaaattactccgagaaactttatttttagagtgagagagtttgaacagatggaattagagttctttgttaaaaaaggtgaagatgaagattggcacaaatactggattgaagaaagaataaattggtgggtccagcagggagttaataaagagaaaattgaaattttgaatgttccacaagaagaactatcacactactctaaagcaactatagatctaatgtatgaattcccccatggtgtggaggagttagaaggaattgcaaatagaactgattttgaccttggttcacattcaaaaaaccaacaagatcttgatatagaagctgatgtgctaaaaaataaggattcaaacgcaaggctagctattcaaaatattgattcaaaggaatgggaagtaccatatgtaattgaaccatcagcaggtgtagataggggtgtgctggccatattgaa

SEQ ID NO: 298783 - DNA, 859 bp, Unknown
  Bacterial polypeptide expressing nucleotide sequence isolated from the Sargasso Sea
ttgatcctgcgcctccaggcgtactgggcggaccagggctgtgtggtgcttcagccttacgatatggaagtcggtgcgggcacctttcacacggcgactttccttgccgccgtgggcccggagccgttgcgcgcagcttatgtccagccgtcccgtagaccgaccgacggtcgctacggggagaaccccaaccgcctccagcattattttcagttccaggttctgctcaaaccttcgccggacgattttcaggacctctatcttggctctcttgagagtcttggcatcagttttcaaaaagatgatgtccgcttcgtcgaggacaactgggaatccccgaccctcggggcgtggggactagggtgggaaatctggctgaacggtatggagatctcccaattcacctacttccagcaagtcggtgggctcgactgccggccggtcacgggggagatcacctatggcctggaaagaatcgcgctctacctgcagggcgtggacagtgtctttgatcttaaatggaacgcccacttcagttatggcgatctctatcaccagaatgaggtcgagcaatcagcgtataacttcgagcatgcagacgtcgatgtgctgctgcgtcagtttgagaattgcgagtccgcctgtgaacatcttttggggcagcggttgcccttacccgcctacgaacaggttctgaaagcttcacataccttcaacctgctggacgcccgacacgcgatcagcgtaactgagcgggcgcgctatatcgggcgggttcgaaatcttgcccggggtgttgcccaatcctatttcgaagcgcgtgaagcacttggatttccgcgaggacgctcatcttgag

SEQ ID NO: 298784 - DNA, 1339 bp, Unknown
  Bacterial polypeptide expressing nucleotide sequence isolated from the Sargasso Sea
ttgcctgcaaaaaatattgatgaactaatagctctgtgtaaaagaagagggttcatctttcagtctaatgaaatatatggtggaacacagggcctttatgattatggccctctcggtgttgagctcaaaaataatttgaagaatgcttggtggaaatctattgtctacgaaagggacgatattgaaggtcttgatgcagcaatactgacaaaaagtacagttttaaagcattctgggcatgaagatacattttcagaccctatggttgattgtaaatcctgtggagaaaggttcagggcagatcaagtgccagactattgtaagaaagaagatctaacagaaccgcgtcaatttaatttaatgtttaaaacaaatattggtcctgtagatgacggtaaaagttttgcatatttaagaccagaaacagctcaaaacatctttactaattttaaaaatgttgtcgactctacagctaggacagttccatttggtattgcacaaatgggaaaagcctttagaaatgaaataactcttaaaagttttatctttagagttcgagagtttgaacaaatggagcttgagttctttgtacatccaggagacgacgagaaatggcataagagctgggtagaatcgagagttcagtggtggaaagaccaaggtatttctgataaaagcctagaactttatgatgttcctgctgatgagcttgctcactattcgaaagcgacagtggatattatgtacaaatttcctcatggcgtagaagaattggaaggtatagctaatagaactgattttgatttaggttcacactcaaaaagccaaaaagaattaaacattaaggcaaaagttttagaaaacaatgaatctaattccaaactagctcttcaggatgaaaataataactggtttgtgccatttgttattgagccttctgctggagttgatagaggtgtgctggcaattttaaatgaagcatattttgtagaagaaattgaaggaaaagagcgtgtagttcttaaactaaaacctcatctagccccaattaaagcggctgttatgcccctaaagaaaaatgatgaaaaaattgtagctcttgcaaaaaaggtaaaagacgagttgcaaaaattaggtttaggcagaattctttttgaaaacagtggcaatatcggtaaaaattatcgcagacatgacgaggttgggacgcctgtttgtattactgttgattttgagtcgcttgacaaccaaactgttactgttcgggatcgtgatagcatgaaacaagaaagaatttctttagacaaagtttctgagcatcttaaaaagataatttaaa

SEQ ID NO: 298785 - DNA, 1435 bp, Unknown
  Bacterial polypeptide expressing nucleotide sequence isolated from the Sargasso Sea
gatgattctttttaaaggcttatattttcacaaaaaagaaagatataattttttcataacatttcgaggtgcattcttggctgcaaaaaacatggatgaattagtttctctctgtaaaaggagggggtttgtatttcaatctggagaggtctacggagggctccagggtgtatatgattatggtcctcttggggtagagcttaaaaacaatctgaaaaactcctggtggagtgcaatggtttttgaaagagacgacattgagggtcttgatgcatccatattgtcgaaaaaggagttattcaaatactctggccacgaagatacattttcagaccctttggtagattgtaaatcctgtaagtcaaggtggagagaggacctgattgaagacggaaaatgcccaggctgcggttcatctgaactaacagaggcaagaccatttaacttaatgtttaaaacaccagttggcccggtacaaaacgaagaaagttttgcgtacctgaggcctgaaaccgcacaacatatttttgcaagttttaaaaacgttaaagactcgacatcgagacaagtcccttttggaatagcacaaattggcaaggcttttagaaatgagatcaatccaagaaatttcatatttagattaagagagtttgagcaaatggagttggaatattttgtcaagcccggggaagatgagaccgctctagagtattggaaaaaggaaaggttagggtggtgggaacgccaaggcattgacctttcaaatattgaaatctatgatgtgcccgaaaacgaacttgcacattactccaaaaggactcttgatatcatgtaccgatttccacatggtcttgaagaactagaggggattgccaatagaacagattttgaccttggttcacacacaaaaaaccagaaggatttgtctttaagttcatcggttgttgaaaacgatgagtcaaccatgcgtcttgcggtacaagaccttgaagccaaagagtggtatgtcccatatgttatagagccttctgctggtgtagacaggggtgttttggcaatcttaaatgaggcctacactaatgaagatattggtgagggcaaacagagggttgtgctaaaactaaaacctcacttgtctcctattaaagcagctgtaattccgcttaagaaaaacaaagatgagcttgtgtccatggcaaaagagataaaacaatcgcttcaatcgctcggtttgggtagggtctttttagaaaacaccggaaacatcggcaaagcatataggaggcacgatgaggttggtaccccaatctgtattacggttgactttgatagtcttgaaaacaattcagttaccataagagacagggacacaatggaacaaagcagggtagatatttctgaactaaagcaatcctacctcagtattttaaagtag

SEQ ID NO: 298786 - DNA, 1206 bp, Unknown
  Bacterial polypeptide expressing nucleotide sequence isolated from the Sargasso Sea
aacgcctggtgggaagcatggtttatgaaaatgatgatattgaggggcttgactcatctatacttacaaacccacttgtgctcgggtattcaggccatgaagacaccttttcagatccaatggtcgattgtaagtcatgtggtcttagatttagagctgatcaagttccaaaagagtgcaaaacggaggatttgacagagccaagacagtttaacttgatgtttaagacaaatgtaggtccaatagacgatggttcaagctttgcatatctgaggcctgaaacagctcaacagatattcactaattttaaaaatgtcattgattcaacatccaaaccaattccatttggaattgcacaaattggtaaagcatttagaaatgaaataacaccgagaaattttatttttagagtaagggaatttgaacaaatggaattagaatattttgtcatgccaggtgaagacgaaaaatgtcatgatatatgggtacaaaaaagactagaatggtggaaaaaccaaggtgtacccatagaaagtattgagctttacgatgtaccctcagaagagcttgctcattattctaaaaaaactattgatctaatgtataaatttcctcatggccttgaagagcttgaaggtattgcaaacagaactgattttgatttgggttcacactctaagaagcaaaatgaattaagtatcgggtcatctgtaaaagaaaacaaacactcaaatagtaaaatggcagtacaggacaattctggtaaatgggttgtgccatttgtaattgaaccatcagcaggtgtagaaagaggctttctagcaatattaaatgaagcttattttgttgaggagttagaaaatgataaaactagggtagtcttaagactaaaacctcatttgtcaccaataaaggcagctgttatacctttaaagaaaaacaacacagaattagttgaagccgcaaaaaaaataaagaatgaacttcaaaaaattggtttaggaagggttatttttgaaaatactggaaatattggtaaaagctaccgaaaacacgatgagattggaacgccagtatgtattacggttgactttcaaacgcttgaagatgaatcagttacaataagagacagagactcgatggatcaaaaaaggttagatattaatgatcttaacaattatttgataaatttaataaatcactgat

SEQ ID NO: 298787 - DNA, 1285 bp, Unknown
  Bacterial polypeptide expressing nucleotide sequence isolated from the Sargasso Sea
aatgcctgaagaaatttttgataaggttgtaaaaattgctcaatcaagaggatttgtatttaatgcttcatcaatttatggaggtttaagaagttcttatgattacggcccattaggagtacttcttaaaaataatatagaaaagatgtggtggaaaagtatcagtaatttagaagttgaaatttatccaatagatactgcgattatacaatcaagcgatgtttggaaagcatcgggtcatgtaggcgaatttaccgatccaatggttgaccataaacctacaggtgaaagatttagagctgatcaggtaccagatcatattaagaaagaggacttaacggaaccacgtcaattcaacttgatgtttcagactaacattggcccggttgaaaatgaaaactcaactgtttatttaagaccagaaactgcacaaggtatatttgtaaattttgaaaatgttttgagaacaatgagagcaaaaataccttttggaattggaaatattggaaagtcatttagaaacgaaattacacctggacaatttatttttaggacaagagagtttgaacaaatggagattgaattcttttgtgatgagagtgaagaggacaaatggtttgattattggattgaaaatagacttaattggtacaaaaacctgggtattcctgaaaataaattaagaataagagaacatgatgaatctgaactagctcattatgcgaagaaaacatcagatattgagtttgaatatccttggggatggggtgaacttgaaggaattgccaatagaggtaactatgatttgaatgctcatcaagaaagtagtggtaaggatttgagatattttgatccaaatagtgataacaaatttactccatctgttatcgagcctgcaggaggccttactcgtactttatttgcggttttactttcattgtatgaagaagaagaactagaaaaagaggtaaggactctatttaaatttaaatttgacctcgctccaattcaaattgggattctgccattaagtaaaaaagatgaattaatcgaagtatgtaattctattaaatctgaactgagtccatatttcagaacagaaattgatgtaactcaatctattgggaaacgctatagaagacaggatgaaattggcactccttattgtataactgtagattttgatacattagaagacaaggctgtaactgtacgagatagagatagtatgtcacaagagagaattaaaatcgaagatataaaaagctattttgacaaaatgtaa

SEQ ID NO: 298788 - DNA, 880 bp, Unknown
  Bacterial polypeptide expressing nucleotide sequence isolated from the Sargasso Sea
tctaaaaaaaaaacaaaaaatccaaaatcttttatttcttttcaggatacaattttaaatcttcaaaagtactggtcaaaaaaaggttgcgttattttacaaccttatgatttagaagttggagcaggaacatttcacccagcaacaactctaagatcattaggttctaaaccatggaaaacagcttacgttcaaccatcaagaagaccaacagatggaaggtatggagaaaatcctaatcgtttgcaacattattatcaatttcaagttttaataaaaccttcaccaaaagatattaaaaaaatgtatcttaatagcctttcatcagtaggtattaaatacgaagagcacgatatcagatttgtagaggatgattgggaaagtccaaccttaggtgcttctggtcttggatgggaagtatggtgtgatggtatggaagttactcaatttacctattttcaacaaatggcaggtatggaatgcaatccaatatctgtagaaattacttatggtttagagagattatgtatgtttattcaaggtaaaaaaaatgtttttgatttaatttggaatgatgagggagttttatacaaagatgtttttcatcaagctgaaaaagaattttcagcctataattttgagtatgcaaacacagataaattatttaaaatttttgatatgctcgaagaagaagcaaaatcattaattgaaaagaaaatttctcttccagcatatgatcaatgtttaaaatcaagtcatgtgttcaatattttagatgctagaggagttataagtgttgctcaaagagcagaatatatcgcaaggataagagacctaacaagagaaattggaaaaatttggggagaaacacaaaattaaa

SEQ ID NO: 298789 - DNA, 883 bp, Unknown
  Bacterial polypeptide expressing nucleotide sequence isolated from the Sargasso Sea
atggtttctaaaaaaaaaaagaaacaaccaaaatttcaaacttttcaagatactattttgaatcttcaaaaatattggagcaagcaaggctgtataattttacaaccctatgacattgaggttggagcaggcacatttcatccagcaacaacacttagatcattgggaccaaaaccttggaaagcagcatatgttcaaccttcaagaagaccaactgatggaagatatggtgataatccaaatagacttcaacattactaccaatttcaagttattataaaaccatcaccaaaaaatataaaaaaactttatttaaatagtttaaatactataggcataaatcacaaagaacatgatattcgttttgtagaagatgactgggaaagtccgacattaggtgcagcaggacttggctgggaggtttggtgcgatgggatggagataactcaatttacgtattttcaacaaatggcaggctttgaatgtaaacctgtgtctgtggaacttacatatggtttagagagattgtgcatgttcactcaacagaaaaaaaatgtttatgatttaatatggaacaatgaagatgttaaatatagagatgtatttcatcaagcagagaaggaattctccacttataatttcgaattagcaaatacagaaaatctttttaaaatttttgatatgattgaaaaggaagctaagatgcttactgaaaatgatgtttcattaccagcttatgaccagtgtttaaaagcaagccatatttttaatattttagatgcacgtggtgtaattagtgttgctcaaagagctgaatatatatcaaggataagagaaataacaaaaggtgcagcagaaatttggttaaaaagtcaaacttaaa

SEQ ID NO: 298790 - DNA, 883 bp, Unknown
  Bacterial polypeptide expressing nucleotide sequence isolated from the Sargasso Sea
atgccaaaaaaaactaaagagaaaaataaagtcttatcatttcaaaacttaatttttaatttacaaaaattttgggataaacaaggatgtattattttgcaaccttacgacctagaggttggtgcgggtacttttcatccagcaactactttacgatcactaggaccaaaaccttggaaagcagcttatgttcaaccatcaagaagaccaacagatggaagatatggaaaaaatccaaatagattacaacattattatcagtatcaggttattatcaaaccatcaccgaaagatattaaacaactatatttaaaaagtttagttgcaattggaatagatcccaaagatcatgatgtaagatttgttgaagatgattgggagagcccaactttaggagctgcaggtttaggttgggaagtatggtgtgatggaatggaaataactcaatttacttattttcaaaaaatgacaggattagaatgtaagccaatatcagtcgagttgacctacggtttagaaagaatttgtatgtttgtgcaaaaaaagaaaaacgtatttgatatcgattggaatgacaatggagtaaaatatagagatgtttatcttcaatccgaaaaagaattttctgcttataattttgatcacgcaaacaccgagtcactgctaaaaaattttgatattgcagaacaggaatgtaagaaccttctagagcaaaaacttcctcttccagcttacgaccaatgtttaaaagccagtcatattttcaatttattggatgcgagaggagtaattgcagttgcagaaagaactggttatataaatagaattagagaactagcaaagggagcaggatcaggttggttagaaaatcaagataaataat

SEQ ID NO: 298791 - DNA, 1261 bp, Unknown
  Bacterial polypeptide expressing nucleotide sequence isolated from the Sargasso Sea
cccgtgccggccgaggcgctgttgcacaccatgaaggtgacccagaagtacttcccggtctacgacaagaacggcaagctgctgccgaagttcatcttcgtcaccaacatcgagtccaaagacccgagccagatcatcagcggcaacgagaaggtggttcgcccccgtctctctgacgccgagttcttcttcaagaccgacctcaagcagactctggcctcccgcctgccgcgcctggaaaccgtgctgttccagcaacagctgggcaccgtcaaggccaaggtcgagcgcatcgagaccgtcgccggctttatcgccgagcgtatcggtgccgacgtggctcaggccaaacgtgccggtctgctctccaagtgtgatctgatgaccaacatggtcggcgagttcaccgacacccagggtgtcatggggatgcactacgcccgtcacgatggcgaagacgaagcggttgccgtggccctcaacgagcagtacatgccgcgctttgctggtgatgccctgccgtccggtctggttgcctgcgccgtcgcgctggccgacaagttcgacaccctggccggtatcttcggcatcggcatgctgccgaagggtgacaaggacccgttcgccctgcgtcgcgccgccatcggtgccctgcgcatcatgaccgagaagcagctggatctggatctggttgaactggttgaagaagcggtacgcgtctacggcgacaagctgaccaacaaaaccgtcgtcaccgacgtggtcgacttcatgctgggccgcttccgtgccgcctatcaggacgaaggcatcggtgccgacgtggtgctggccgtactggcccgccgcccgacccgtccgctcgacttcgatcgtcgcgtcaaggccgtcagccacttccgcaccctggatgccgcactggccctggctgccgccaacaagcgcgtgagcaacattctggccaaggtcgaaggcgaattgccgactgccgtcaaaccggaactgctggtcgatgccgccgagaaggcgctggccacccaggttgccgaactgcaagccgaactggccccgctgttcgcagccggtgactatcaggcagccctcacccgtctggccgccctgcgcgagccggtcgacaccttcttcaacgaagtgatggtgatggccgacgacgaagccctcaaggccaaccgtctggcgctgctgaacaacctgcgcaacctgttcctgcaagtcgcggatatctccctgctgcagtgat

SEQ ID NO: 298792 - DNA, 808 bp, Unknown
  Bacterial polypeptide expressing nucleotide sequence isolated from the Sargasso Sea
atgacagcagaaaatatggaagacttagtatctctgtgtaagagaagagggtttatttttcaatcaaatgacatctatggtggcatgaaaggtctctatgattttggacctatgggtgtagagttaaaattaaatttaaaatcagcttggtggaaatcaatagtctatgaaagagatgatgttgagggattggactcaactattttaacctcacctactgttttaaaatattcaggccacgaggatacattttctgatcctttggttgattgtaaagtctgcaaagcaagatttagagcagatcaattagaacaaagtgaatgtcctagaggtggttcattaaataactgcaaatcaaaggatttaactgacccgaggccatttaacttaatgtttaaaactgcaataggtccagttgatgacggtagttcatttgcatatttgaggccagaaactgctcagcaaatatttgtaaattttaaaaacatcgttgactcaacaagtagggttcctccatttggtattgcccagataggaaaagcatttagaaatgaaatcacacctagaaactttatttttagggttagggaatttgaacaaatggaacttgagtatttcgttaaacctggttctgatgagaattggcataaatactgggtagataaacgtttaaattggtgggctgatcaaggtgtcaaatcagagaaattaaaattacttgaggtagaaaaaaaggatgaacgatgcggccgacagccagtcggccgcggtcgccatcccgtgaaggcagacggcacgcgccgcccgg

SEQ ID NO: 298793 - DNA, 886 bp, Unknown
  Bacterial polypeptide expressing nucleotide sequence isolated from the Sargasso Sea
tatggtttctaaaaaattaaaaaccaaaaaacccaaatttcaaacctttcaagatactatcttgaatctacaaaaatattggagcaaacatggatgcactatacttcaaccatatgatatggaggttggtgcgggcacttttcatccagcaacgacattaagatctttgggaccaaaaccttggaagacggcatatgttcaaccttcaagaagaccaacagatggaaggtacggtgaaaatccaaacaggcttcagcattattatcaatttcaagttttaataaaaccttcgccaaaaaatattaaaaaactctatctaaatagcctttcatcaattggtataaagtatcaagatcacgacataagatttgttgaggatgactgggaaagtccaactttaggagctgcaggactcggatgggaggtttggtgtgatggaatggaagttacccaatttacttattttcaacaaatggcaggaattgattgtgatcctatttcagtagaattaacttatggccttgaaagattatgcatgttcactcagcagaaaaaaaatgtttttgacttagtttggaacaatgaaggtattttgtataaagaagtttttcatcaagcagaaaaggaattttccaaatataattttgaagtagcaaatacagaaaatttatttaaaatttttgatatgctggaatcagagtctaaaagtttaactgaaactaaactgtctttgccagcatatgaccaatgtttaaaagctagtcatgtatttaatattttagatgcaagaggtgtaattagtgtagcacaaagagcagaatatattggtcgaataagagatttagtaaaaggggttgggcaaatatggcttgaaagccaaaaataa

SEQ ID NO: 298794 - DNA, 883 bp, Unknown
  Bacterial polypeptide expressing nucleotide sequence isolated from the Sargasso Sea
atggtttctaaagcaaaaaaagaaaaaaaaaaaattcaaacattccaagatacaattttaaatcttcagaaattttggagtaaaaagggatgcattattcttcagccttacgatatggaggttggtgcaggaacttttcatccagctactaccctaagatcactaggaactaaaccatggaaagcagcttacgtacaaccatcaagaagacccacagatggaagatatggagataatccaaacaggttacaacactattatcaatttcaagttttaatcaaaccttctcctgaaaatataaaaaaactttatttaaatagtttgtctactataggaatagatcataatgatcatgatataaggtttgttgaagatgattgggaaagtccaacattaggtgccgcaggattgggatgggaagtatggtgtgatggaatggaaattactcaattcacctattttcaacaaatggctggatttgattgtaaacctgtatcagttgaaatcacttatggcttagaaagaatttgtatgttcactcaaaaagaaaaaaatgtttatgatttattgtggaatgatgaaggtgtaaaatatcacgaagtttttcatcaagctgaaaaagaattttcagcatacaattttgaacatgcgaatgtagaaacacttttgaaaatgtttgaaatgcatgagtctgaggcaaaagatttggtagaaaaaaaaatttcattaccagcatatgatcaatgtttaaaagccagtcatgtgtttaatattctagatgcaagaggtgcaatcagtgtcgcacaaagagcaggttatattgctagaataagagatattacaaaatctgcagctggcgtttggttagatagtcaaaaataat

SEQ ID NO: 298795 - DNA, 1147 bp, Unknown
  Bacterial polypeptide expressing nucleotide sequence isolated from the Sargasso Sea
atgaaaaatacctccatggaagacttagtatctttatgtaaaaggcgaggtttcatatttcaatctaatgaaatttatgggggtctacaggggctttatgattacggccctctaggtgttgaactcaaaaataatctcaaaaaatcatggtggaaatccatgatatatgaaagagatgatatagaaggaatagactcatccattttaactaatccgctggttctaaaatattctggacatgagaatacctttactgatcccttggtagactgtaaaagttgtggtgaaaggtttagagaagatcaggtaccagattattgtaaaaaagaagatttaacagaaccaagacagttcaacctaatgttcaaaacaaatgttggaccgattgaggatggtaattcatttgcttacttaagacctgagacagcacaaaatatttttaccaattttaaaaatgttttagattctaatcctcaccctcttccgtttggtatcgctcagatgggtaaagcgtttagaaatgaaattacgcctagaaactttatattcagggtgcgcgaatttgaacaaatggaactggaattttttgtaaaacctggtgaagacgaggaatggcataaaaagtggactgatttaagattgcagtggtgggaagatcaaggagtaagcaaagatagtttagagctatatcatgtgcctagtgatgagttggcacattactctaaagccactgtggacattatgtataattttccgcatggcctagaggaactcgaaggaatagccaataggactgattttgatctaggatcgcatactaggggccaaaaggaacttaacatagatgcaactgttgcagaaaatactcaatccaatgcgaaactagctgttcaagacctagaaactaagaaatgggttgttccatacgtaattgaaccttctgctggggttgataggggcctcttagctattctcaacgaagcatataaggttgagagtcttgaaaacaacaaagaaaggaccgttttatctctaaaaccacaccttgcacctataaaaatagcagttattcctcttaaaaggaatgaaaattctatagtacagacgtcaatagatctaaaaaatgatttacagcgaacaattgaag

SEQ ID NO: 298796 - DNA, 679 bp, Unknown
  Bacterial polypeptide expressing nucleotide sequence isolated from the Sargasso Sea
gaatggatggattactggataaataaaagaatggattggtataagtcgctaggtataaaagaatcccaattacaacttagagagcatgcagataatgagttagctcattatgcaaagaagacagtagatattgagtatttatacccatggggttggggagagcttgaggggattgctaatagaggaaattatgatttatcatctcaccagaaaaatagtggaaaagatttaacctattttgattctttaaatgatgaaaaatatcttccaagcgtaatagaaccagcaggaggattaacaagaacattgtttgctttattattgtcagtttatgatgaagaaaagcttgaaaatgatgaaaaaagaacattatttagatttacatttgaattagctcctatacaaattggtattcttccattaagcaaaaaagatgatttaatccaagtttgtagtgaaattaataaaacacttaaaaatcactaccgtactgaagttgatataacacaatctattggaaaaaggtacagaaggcaggacgaaataggtactccttattgcataactgttgattttgaatcgttagaagacaattgcgtaacaataagagatagagatacaatgaaacaagaaagaataagcatagataaattaagtgagtatttcgagaaactttaat

SEQ ID NO: 298797 - DNA, 1360 bp, Unknown
  Bacterial polypeptide expressing nucleotide sequence isolated from the Sargasso Sea
atggcctctaaaaacatggaagacctcgtttcattatgtaaaagacgggggtttatttttcaatcaagtgaaatttatggtggcttgcaaggaatatatgattatggtccactcggagtagaattaaaaaacaaccttaaatcctcttggtggaaatcaatgatctatgatcgagatgacgttgaaggacttgatgcatctattttaacaagtagacacgtattaaaatattcaggccatgaagatactttctctgatcctttagtcgactgtagaaattgcaaaaatagatttagatctgaccaggctacggatggaaaatgtccagcatgtgggtccagcgatctaactgaacctcgaccatttaatcttatgtttaaaaccacagttggtcctgtagatgatggcagtaattatgcttacctaagacctgaaaccgcacagcaaatttttacaaattttaaaaatatattggactcaacaagtaagactattccttttggaatcgcgcagataggtaaagcatttagaaatgaagtcactccaggcaaatttatattcagagttagagagtttgaacaaatggaattagaattttttgttgaaccaggtaaagatgatgagtggcataaatattgggtagacaagaggtattcatggtggattgatcaaggcatatctgaaaaaagattaaaaaagctagatgttgaagatgctgacctatctcactattcaaaagctactgtagatcttatgtacgaatttccacatggacttgaagagttagaaggtatagcaaacagaactgattttgatcttggctctcacactaaaaatcaaaatgactttaaaatatccgcagatgtaatgaaaaacaaccaatcaacaacgaaattgagtattcaaaatttagaaagtaaagaatggtacatcccgtatgttatagaaccctccgctggtgttgatcgaggtgtatttgctctactcaatgaagcttacaaggaggaggatttagaaaacggaaataaaagaattgtgttaagtttgaaacctcatttgtctccaattaaagcggccataattcctcttaaaagaaataatgaggatttagtcaataaagcaagcaagattaagaatgatcttcaagcactaggtatgggaagggtcattttagaaaactcaggaaatattggaaaaggttatagacgtcatgatgagattggcacacctatttgtataacagttgattttgaaacaatcgaaaatgatacagtgactataagagatagagatactatgtcacaaaaaagagtttcatctcaagatttaaaacacgaatataaaaaagtttttaattaat

SEQ ID NO: 298798 - DNA, 793 bp, Unknown
  Bacterial polypeptide expressing nucleotide sequence isolated from the Sargasso Sea
atgaagcattcaatgtcacttcaaaacatcatcatggctttacatgattactggaatcgccatggttgcctgttgatgaatccatatgatgtggaaaccggtgcaggaacgatgaatccaatgaccacactccgtgcagttggacctgaagaatggaatgtcgcctatgttgaaccttcacgccgacctgcagacgggcgatacggtgagaacccgaaccgtctctatcaacacctgcaatatcaagtgatcctgaaaccttctccggacaacgtcgaagaactctacctcaaatcacttgaagaacttggagtggatcctctgcagcatgacattcgttttgtggaagacaactgggaggctccgacactaggtgcctggggacttggctgggaaatctggctggacgggatggaaatcactcagttcacctatttccagcaggtaggcggactggaatgccatccggtctctgctgaattgacttatgggcttgaacgtctggcgatgtatcttcagcaggttgaaaacgtgttcgacctggaatacaccaaaggggtgagttatggagcaatcttcaaacaaccggaatatgaacactctaaatacacctttgaaattgccgataccggtaaactttttgattggtttaatgaatttgaaatcgaatcgcgtaaagcccttgatgctgatttagtctttcccgcctatgattatgttctcaagtgctcccatgttttcaaccaattggatgccaccaatgccatcagtgtctcggccagagcttcctata

SEQ ID NO: 298799 - DNA, 1199 bp, Unknown
  Bacterial polypeptide expressing nucleotide sequence isolated from the Sargasso Sea
aatgccagctcaatcaatggaacaattagtatctttatgtaaaagaagaggttttatttttcaaacaaatgaaatttatggcggtcttcaaggtgtctatgattatggtcctttgggtgtagagcttaaggaaaatcttaagaagtcttggtgggcagcaatggtctactcaagagacgatgttgagggtcttgatgcttccatacttaccaataaaaaagttcttaaatattcaggccatgaggatacttttacagatccactagttgattgcagagattgtaaaaatcgtatgagagcagaccatataaaggatagtaagtgcttacattgtggctcaacaaacctcactgatcctaggcctttcaatctaatgtttaaaacaaatataggccctgttgctgacgatgaatcttatgcatatctaagacctgaaacagcgcaacaaatatttactaacttcaagaatgtggttgactcgacatcaaaatctataccttttggtatagcacaaattggtaaggcttttagaaatgaaatcactcccagaaactttatatttagggtgagagagtttgaacagatggaattagaattctttgttaaaaaaggggaggatgaagattggcacaaatattggattgaagaaagaataaattggtgggtccaacaaggtgtcaagaaagagaaaattgaagttttgaatgttcctcaagaagaactatcacactactctaaagcaactatagatctaatgtatgaattccctcacggtgttgaggaattggaaggaattgcaaatagaactgattttgatcttggttcacattcaaaaaaccaagaggatattgatataacagctgatgttctaaaaaataaagattctaacgctaggctagctgttcaaaatattaattcaaaggagtgggaagtgccatatgtaattgaaccatcagcaggtgtagatagaggggtcttggctatattaaatgagtcatataatgaggaaacccttgaaaatggtaaaaatagaattgtcttagctttaaagccccatctctcaccaattaaagctgctattataccaataaaaaagaatgattcgacaattgttgacttttcaaagcaaattaaggataacctccaaaaactaggtcttggtagggttgttttggaaaatacaggtaatattggtaaaa

SEQ ID NO: 298800 - DNA, 380 bp, Unknown
  Bacterial polypeptide expressing nucleotide sequence isolated from the Sargasso Sea
tcggcaggtgacctacggcgatgtgttccatcagaacgaggtggagcagtccacctactacttcgaacacgccaacgtcgacaagctgttcgaactgttcgacttctatgaaagcgaagccaagcgcctgatcgaactcgaccagccgctgccgttgccaagctatgaaatggtgttgaaggcgtcccataccttcaacctgctggacgcgcgccgtgccatctcggtaaccgcacgccagcaatacatcctgcgtgtacgcactctggcgcgttccgtcgctcaagcctacctgctggctcgcgccaagctgggcttcccgatggccaccccggacctgcgtgatgaagtgttggctaagctggaggctgcacaatgag

SEQ ID NO: 298801 - DNA, 1159 bp, Unknown
  Bacterial polypeptide expressing nucleotide sequence isolated from the Sargasso Sea
aatgacggcaagctcaatggaggaattagtctctttatgtaaaagaagaggttttatttttcaatctaatgacatctacggtggtattaaaggattgtatgattatggccctatgggtgtagaattaaaaaataatttaaagcaggcttggtggaagtctatggtttacgaaagagatgacattgaaggattagatgcatcaattttaagtgcccctgtcgtattgcaacaatcaggtcatgaagatacattttctgatccattggttgattgtaaaaagtgtaaagctaggtttagggctgatcagttggaaagtagcaaatgcccaaaaggaggctctttaattaattgtaaatcaaaagacttaacagagccaagagcatttaacctaatgtttaaaacagcaattggacctgttgatgacggttcttcttttgcctatttacgaccagagacatgtcagcaaatttttactaactttaagaatattactgactcaacgagcagagtaattccatttggtattgctcaaattggtaaagcatttagaaatgaaattaccccaagaaattttatatttagagttagagagtttgagcaaatggagctggagttttttgtaaaaccaggatctgatgatgaatggcataaatattgggtagataaaagaattgaatggtgggaaacacagggtattagtaaaaaaaatttatatcctatggaagtagaagagagtgaattatcacattattcaaaagcaactgtagatattatgtatgaatttcctcacggtaaagaggagcttgaaggaattgcaaacagaactgattttgatttaggctcacatactaaaaatcaaaaagattataacattagttcagatgttaaaaaaaatgaacattctacaacaaaattaggggtgcaaaatttagaagaaaaaacttcctatataccctatgtaattgaaccttcagctggtgttgacagaggtttactcgctattttaaatgaagcttatactatagaaactttagatgatgataatacgcgaacagtattgaaattaaaaccacatttatcacctataaaagcagctgtcattcctttgaaaaaaaataatgaacaaattgtttcaaaagcaaaagcaataaaaaatcaa

SEQ ID NO: 298802 - DNA, 562 bp, Unknown
  Bacterial polypeptide expressing nucleotide sequence isolated from the Sargasso Sea
ctatcttcaataggaataaagcaccaagagcatgacatcagatttgttgaagacgattgggaaagtccaactttaggagcagctggccttggctgggaagtttggtgtgatggaatggaaattacacaatttacttattttcaacaaatggcaggtctagaatgtaatccaatatctgtagaacttacgtatggattagaacgactttgtatgtttacgcaagaaaaaaaaaatgtttttgatttagtttggaatagtgatggagttttatataaagacgtatttcatcaagctgaaatagaattttcaaaatataattttgatttagcaaacacatctaatttatttaaaatctttgatatgacagaggaagaagctaaaaatttaactgagaataagatttccttgccagcttacgatcaatgtctaaaagctagccatatatttaatattttagatgcgagaggcgttataagtgtagcacaaagagccgaatacatttcaagaataagagagatggtcaaagcagttggaaaagtgtggcttgaaagccaaaaatgaa

SEQ ID NO: 298803 - DNA, 1105 bp, Unknown
  Bacterial polypeptide expressing nucleotide sequence isolated from the Sargasso Sea
aggtcacgttggagcgttcaacgacccattggttgactgcaaacaatgtaaggcgcgctaccgtgctgatgaacttggtgatattgaaaatgaaaaaattagttggaatgaaattcaatgtccaaaatgcggcaccaaaggtaacttaactgagccaagacaattcaatctaatgttcaagacttatgttggcgctgtagaagaagattctagtgcaacatttctgcgtcctgagacagcgcaaggtatttatgtaaattatttgctggttcaaaatgcaatgcgtctaaaattgccatttggaatagcgcaaattggcaaagcatttcgcaatgaaattgtagcaagaaattttatttttcgaactagagaatttgaacaaatggaaatgcaatattttgtcaagccaggacaggatgatgaaactttaggaaattggaaaaaagagcgaatggcattctatgctcaacttggtattgataaagataagctgcgcttcaaagaacatggtcctggcgaacttgctcactacgctaaagaagcatgggatattgaatatgatttttcttttggttggtctgaaattgaaggaattcataatcgaactgattttgacttgaaacgccatcaagaattttctggtaaaaaaatggaatattttgaaactgaaaccaatgaaagatttttaccttacatcattgaaacatctgcgggcttgaatcgaatgttattggccgttttaaatgatgcgtactgggaagatgaagaaaataaacgcgttgtaatgaagctggatcctaagattgctccggtgatggctgtagtatgccctttagttaaaaaagatggtttaccagaaataggtcgaaagattatggaaatactaaaaccagaattcaaagtaatctatgatcaacagggatctataggaaaaaggtattatcgtcaagatgaagcaggaactccatttggaattacagttgatcatcaatcaaaagatgatcaaagtgtaacgcttcgtcatcgcgacacccaacaacaagatcgaattgcaattgatcaacttgtagatgctattaataataaattggagaattattcatga

SEQ ID NO: 298804 - DNA, 883 bp, Unknown
  Bacterial polypeptide expressing nucleotide sequence isolated from the Sargasso Sea
atggtttctaaagcaaaaaaagaaaaaaaaaaaattcaaacattccaagatacaattttaaatcttcagaaattttggagtaaaaaaggatgcattattcttcagccttatgatatggaggttggtgcaggaacttttcatccagctactaccctaagatcacttggaaataaaccatggaaagcagcttacgtacaaccatcaagaagacctacagatggaagatatggagataatccaaacaggttgcaacactattatcaatttcaagttttaattaaaccttcccctgaaaatataaaaaaactttatttaaatagtttatctactataggaatagatcataatgatcatgatataaggtttgttgaagatgattgggaaagtccaacattaggtgctgcaggattgggatgggaagtatggtgtgatggaatggaaattactcaattcacctattttcaacaaatggctggatttgattgtaaacctgtatcagttgaaatcacttatggtttagaaagaatttgtatgttcactcaaaaagaaaaaaacgtttataatttattgtggaatgatgaaggtgtaaaatatcacgaagtatttcatcaagccgaaaaagaattctcagcatacaattttgaacacgcgaatgtagaaacacttttgaaaatgtttgaaatgcatgagtccgaggcaaaagatttggtagaaaaaaaaatttctttaccagcatatgatcaatgtttaaaagctagtcatgtttttaatattttagatgcaagaggtgcaatcagtgttgcgcaaagagcaggttatatttctagaataagagatattacaaaatctgcagcaggcgtttggttagatagtcaaaaataat

SEQ ID NO: 298805 - DNA, 562 bp, Unknown
  Bacterial polypeptide expressing nucleotide sequence isolated from the Sargasso Sea
tttgtcatcaataggcatttatcatgaggagcacgatataaggtttgttgaagatgactgggaaagtcctacattaggagcggcaggtcttggatgggaagtttggtgtgatggtatggaagttacacaatttacctatttccaacaaatggcaggagttgaatgtaaacctgtatctgttgaaattacatatggattagagaggttatgcatgtttattcaaaataaaaaaagtgtttttgatttaatatggaatgatgaaggaattacttacaaagatattttttttcagtcagagaaagaattttcagcatataattttgaatatgccaataccgttaatttatttaaaatatttgaaattctcgaagaagaaacaaaattattagttgaaaaaaagatttctcttccagcatatgatcaatgtttaaaatgtagtcatgtcttcaatattttagatgcaagaggggtgattagtgtagcacaaagggctgagtatattgcaagaataagggaactaactaaatcaattgggaaagtttggattgaaagccaaagttga

SEQ ID NO: 298806 - DNA, 874 bp, Unknown
  Bacterial polypeptide expressing nucleotide sequence isolated from the Sargasso Sea
tatggtctataaaacaaaaaaaaaaactttatcttttcaagacacaatctttaatttacaaaagtactggtcaaaaaaaggttgtgtaatattacaaccatacgatctagaagtaggagctggaacatttcatccagcaaccactctaagatcgcttggtccaaaaccatggaaaactgcatatgttcaaccatcacgtagaccgactgacggaagatatggtgacaaccccaatagattacaacattactatcagttccaagtattaattaaaccctcgccaaaagaaataaaaaagatgtatttaaatagcctgtcatcaataggtattaattatgaggaacacgatataagatttgttgaagatgactgggaaagtcctactcttggagcagcaggccttggatgggaagtttggtgtgatggtatggaagtaacgcaatttacttacttccaacaaatggctggagttgaatgtaaacctgtatctgtcgaaattacatatggattagagagattgtgtatgtttattcaaaacaaaaaaagtgtttttgacttaatttggaatgatgaaggaataacttacaaagatgtttttcataagtcagagaaagaattttcagcatataattttgaatatgccaacactgataatttatttaaaatatttgaaatgcttgaagaggagacaaaattattagttgaaaaaaaaatttcacttccagcatacgatcaatgtttaaaatgtagccatgtatttaatattctagatgctagaggggtaattagtgtagcacaaagggctgaatatattgcaagaataagggaactaactaaatcaattgggaaagtttggattgaaagccaaagttaa

SEQ ID NO: 298807 - DNA, 1013 bp, Unknown
  Bacterial polypeptide expressing nucleotide sequence isolated from the Sargasso Sea
cttaactgatcctaggccttttaatcttatgtttaaaacaacaattggacctgttgatgatggaagtagttttgtatacttaaggccagaaaccgctcaacaaatttttacaaattttaagaatgtagttgattcaacatcaagaacattaccttttggaattgctcaaattggaaaggctttcagaaatgaaataactccaagaaattttatttttagagtaagagaatttgaacaaatggaattagagttttttgtagagcctggcagtgatgaggaatggcatcaaaaatgggttgatgaaagagtcagttggtgggaacgacaaggagtggataaaagtaaattagaaattattgatgtcgataaagaagatttatcgcattattcgaaaaaaacggttgatataatgtacgaatttcctcatgggcttgaggaattagaaggtatcgcaaatagaactgattttgatataggatcacatactaaaaatcagaaagattttgaaataaatgctgatgttataaaaaatgatgactcagtaacaaaattagcaattcaagataagattaacaatacatggactataccttatgtaattgagccatcggcaggagttgatagaggatttttagctgtattaaacgaggcatataaagttgagaagctagaaaatggtaaagagagaactgtcttatctctaaaatctcacttatcgcctataaaggctgcggttattcctttaaaaagaaataatcaagatttagttaacaaagcagtagaattgaaaaagcaattgcagtcaatcggcttaggaagagtagtgcttgataatgcaggcaatattggtaaaagctatagaagacatgatgaagttggaacaccaatgtgcataacaattgactttgaaacattggatgataattctgttacagtaagagatagagatactatggagcaaaaaagaattaaattagatgaaatttctaatttttttgtaaaaaatctctaat

SEQ ID NO: 298808 - DNA, 868 bp, Unknown
  Bacterial polypeptide expressing nucleotide sequence isolated from the Sargasso Sea
atgttttttcaggatataattcaaaatttaaataatttttggtccaaagagggttgtttaattatgcagccatatgatactgaaaagggtgctggtacaatgagtcctcatacttttttgagggcaattggacccgaaccttggtctgttgcatatgctgagccatgtagaagacccacagacggaagatttggtgataaccctaatcgtgcacaacattattttcaatatcaagtaataattaagccttccccagatgggatccaagaaaaatatttgaaatctctggaatctcttggaatagaggctaaaaatcatgacataagatttgttgaagataattgggagtcgccaactcttggagcttggggcgtaggttgggaagtatggctagacggaatggaagttactcaattcacttattttcaacaatgcgggggagttgattgtcaaccaataccaattgaaattacatacggtttagagagaattgcaatgtttttgcaggataaagaaagtatctgggacttaaattggaataaagatctgaaatacagcgatatttggcttcaatttgaaaaaggtcaatgttcatataatttctctgaatcaaatcctgaaaatctcagaaaattatttgagatatatcaagatgaagcaaattcattaattgaaaagaagctaacttaccccgcgcttgattatgttttaaagtgtagtcatagctttaatttgcttgatgctagaggcgtaatatcagtaactgatcgtgcccagtatatagaaaaaatcagaaagttagctagagaagtcgcgtcttcatggatactagagagggaacgcatgggctttcccttagtaaagtaag

SEQ ID NO: 298809 - DNA, 432 bp, Unknown
  Bacterial polypeptide expressing nucleotide sequence isolated from the Sargasso Sea
gatgccagctaaaaaaaaagttaaaaaaaaaaataactctctttcttttcaagatataataatgaatcttcaaaaattttggggaagaaatggttgtgtaattttacaaccatatgatttagaagttggagctgggacttttcatcccgcaactacgttaagatctctaggccctaaaccatggaaagctgcttatgttcaaccttcacgacgaccaacggacggtagatatggtgaaaacccaaatcgtttacaacactattatcaataccaagtaattattaaaccatccccgagcaacattaaacaaacatatttaaaaagtttagcggctattggtattgatgtaaaaaatcatgacatccgttttgttgaagacgattgggaaagtccaaccttaggagcagcaggattaggatgggaagtctggtg

SEQ ID NO: 298810 - DNA, 606 bp, Unknown
  Bacterial polypeptide expressing nucleotide sequence isolated from the Sargasso Sea
tatggtttctaaaaaaaaaaggaaacaacctaaatttcaaacatttcaagatactatcttgaatcttcaaaaatattggagcaaacatggatgtataattttacaaccatacgatatggaagtaggagcaggtacatttcatccagcaacaacactaagatcattgggacccaaaccctggaaggctgcatacgttcaaccttctagaagaccaactgatggtagatatggcgataatccaaatagactacagcactactatcaatttcaagtaattataaaaccatctccaaaaaatattaaaaaactttatttaagtagtttaaatacaataggtattaaccataatgaacatgatattcgttttgtcgaggatgattgggaaagccccacgctaggagcagcaggacttggatgggaagtttggtgtgatggaatggagataacccaatttacatattttcaacaaatggctggatttgaatgtaaaccagtatctgtagaaattacatatggtttagagagattatgcatgtttactcaacaaaaaaaaaatgtttacgatttaatttggaatagtgaggatgttaaatatggagatgtatt

SEQ ID NO: 298811 - DNA, 1378 bp, Unknown
  Bacterial polypeptide expressing nucleotide sequence isolated from the Sargasso Sea
tatgactgcaaaaacaatggaagagttagtttctctttgcaaaagaagaggttttttatttcaatcaaatgacatctatggcggtatcaaaggtttatatgattatggaccaatgggagtcgagttaaaaaataatcttaaacaagcttggtggaaatcaatggtatatgagcgagatgacactgagggattggatgcaagtattttaagtgcgccagttgtattaaaacattccggtcatgaagatactttctcagatccacttgtagactgtaagatttgtaaagctagatttagagcagatcagttagaaaatagtgaatgcccaagaggaggactattgcctgattgtaaagttaaagatttgactgaaccaagaccctttaatttaatgtttaaaactgcaattgggccagtagatgatggttcgtcattcgcatatttaagaccagaaacatgtcagcaaatttttactaattttaaaaatatattagattcaacttctagaactgttccttttggtatcgcacaaatgggaaaagcatttagaaatgaaataacacctcgtaattttatctttagagttagagagtttgaacaaatggaattagagttttttgttaaaccaggtactgatgatgaatggcatgaatattggataaataagagaatagaatggtgggttaatcaaggcataaaaaaagaaaatttaaaaaaaattgaagtagaaaaaaatgaactagctcactactcaaaaagaactgttgatatcaattatgtgtttcctcacggtgaagaggaactagaaggggtagccaatagaactgactttgacttaggctctcatactaaaaatcaaaacgattttaaaattacatcagaagttatgaaaaactcctcttcaactacaaaattagctgttcaagatttagaagaaaaaaaatggtatattccttacgtaattgagccatcagctggtgttgatagaggagttcttgctttgttaaatgaagcttatcgtgaagaaaatgtagataaagataataaaagaattcttttatctctaaaacctcatctttcacctattaaagctgcagttattcctctcaaaaagaataatgaggaattagttaatttatctaaagaaataaaatctaatctacagaaattgggattgggtagagttgttttagaaaattcaggaaacattggtaagaattatagaagacatgatgaaataggaacaccaatttgtttaactgtagattttgaaactctagaagataaaagtgttactgttagggatagagatactatgaaacaggaaagagtttctatcgaaaatttatctgaatattacaaaaaatattttaattaa

SEQ ID NO: 298812 - DNA, 1069 bp, Unknown
  Bacterial polypeptide expressing nucleotide sequence isolated from the Sargasso Sea
aatggctgatggatttaagaataataatctaaatgatattgaaaatctaattaatgaattcgaaattaagtgtccagtatctggaacatctaattggactgaggtaagacaatttaatttaatgttcaaaactaacttgggggcctcaagtgattcaaatatggaattatacttaaggccagagacagcccaaggtatttttctaaattatttgactttacaaaagacttcaagaatgaagattccttttggaatcgcacaaattgggaaggcatttagaaatgagatagttgctaggcaatttatttttagaatgcgagaatttgagcaaatggaaatgcaattttttattaaaccaggaacacaagataaatggtataagcactggaaagaaaaaagaatggaatggcatcttagtttaggaatagaaaaaaacaattacagattccatgatcatgaaaaacttgcacattatgctgacgctgcttccgatattgaatttaagttcccttttggattcaaagaattagagggaatacactctagaacagattttgatttaaaaagtcatgaaaaactatcaggaaaaaaaattcaatattttgatacagaaaaaaatgaaagctatacaccatttgttatagagacatctattggtttagatagaatgtttctttctgtattgtcaagctcctacactaatgaaaatcttgaagatggctcttccagaattgttcttaaaatccctaaacaaatcgctccagtaaaaatagcagtattgccattgcttaaaaaagatggtctgccagagatagcaaaagaattattgaatgaattaagctcagaggtaaatttatcttatgatgagaaagatgcaatcggaagaaggtatcgcagacaggatgcgataggaaccccttactgtattactattgaccataaaactcttgaagataatacatttacactaagagacagggactctatggaacagaaaagaataaacaaagatgaactgatcaatattgttaaagatgaactaacaataaataatcttcttaataattga

SEQ ID NO: 298813 - DNA, 1324 bp, Unknown
  Bacterial polypeptide expressing nucleotide sequence isolated from the Sargasso Sea
catgaacaaaaccattgaaaagatagtatcactatgtaagcgtcggggatttattttccagagctcagacatttatggtggtttttcagctgtatatgattatggacctttgggtattgaactaaaaaataacatatcccagctatggtggaaagagatgacccagacccatgaaaatattgtagggcttgatagtggtattttgatgcatccaaagatctgggaagcttcaggtcatgttggtgcttttaatgaccctttggttgattgcaagcaatgtaaggcacggtaccgcgctgatgaattttcagaggattttaattctctggactggacagaaatcaaatgccctaattgtggtactactggaaaaatgactgagccaaggcaatttaatcttatgttcaagacccatgttggcccggttgaagagacaggtacagaagcctttctccgtccagaaactgcccaaggtatatacgtgaattatcaattagtgcagggtgctatgcgtatgaaaataccctttgggatcgcacaaattggaaaggcatttcgcaacgagataattgctcgaaattttatttttcgaacgcgagaatttgaacaaatggaaatgcagtattttgtaaaacctggtaccgatgattctatcatgaaagagtggaaagaaaaacgttttcaattctatcttgaccagctttgtattgttgaaaaaaaattacgctataaagaacatggtgaaaatgaacttgctcactatgctaaagaggcctgggacattgaatatgaatttccttttggatggtcagagatcgaaggaatacataataggactgattatgacctttcccgccatgaagaattctctgggaaaaatctcaactattttgaccagcccaataacgaaagattcttgccctatattattgaaacgtctgcaggtttgaatagaatgctattgaccgtacttgcagatgcttactgggaagatgaggaaaataatagggtcgttatgaaattacatccccgtctagctcctgtaaaagcagtggtctgcccattggtaaaaaaagatggtctacccgaaaaagctagagagataatggatatactcaaacctcattttaaaattgtctatgaccaacaaggttcaattggtaaaagatattataggcaggatgaagcaggtaccccttttggtataacagtcgaccatcaatcttctgaagataatacggtaactcttagacaccgtgacactcagaaacaggaccgtgtttctatagataagctcgtcaacactatccaagagaatatataa

SEQ ID NO: 298814 - DNA, 751 bp, Unknown
  Bacterial polypeptide expressing nucleotide sequence isolated from the Sargasso Sea
tatgcctgccaagtcgatggatgaattggttgctctgtgtaagcgtcgaggctttatttttcaatcaagcgatatatacggcggtctacagggagtctacgactatgggccactgggcgtagagctaaaaaataatctaaaggcaacctggtggtcctctatggtctacgaaagggacgacatagaagggttagatgccgccatcttaacgaatccagtaactctaaagtattctggtcatgtcgatacatttacggatcccttagtcgactgcaaagactgcaaggccagacaccgagcagatcacatttcagacgcaacgtgcccaaattgcggatcaactaaccttacagcaccaagagcatttaatttaatgttcaaaactaacgtaggccccatagacgacggctcttcttatgcttttttgcgacctgagacagcccaatcaatttttacaaattttaaaaatgtcgttgattctacctcaagaaaattacccttcgggatagcccaaatcggcaaatcattcagaaatgaaataactcccaggaattttatttttcgtgtgagagaattcgaacaaatggaattagaatacttcgttaagccaggggtagatgaggaggctcacgaatcctgggtacaaagcagagtaaattggtggatcgaacaaggtataaactcaaacaaccttgagttgtataaagtcccacaagaggaacttgcacactacagtaaggcgacggttgat

SEQ ID NO: 298815 - DNA, 994 bp, Unknown
  Bacterial polypeptide expressing nucleotide sequence isolated from the Sargasso Sea
ttacttaatgttaaaacgaatgttggtccggtagacgatggttcgagttttgcatatctaaggcctgaaacagctcaacagatattcacaaactttaaaaacgtcatagattcaacatccaaacctgttccatttggaattgcacaaattggtaaagcatttagaaatgaaataactcccagaaattttatttttagagtcagggaatttgaacaaatggaattagaatattttgttatgccaggtgaagacgaaaaatctcatgatatatgggtacaaaaaagactagaatggtggaaaaaacaaggtgtacccacagaaagtattgagctttacgatgtacccactgaagaactagctcattattctaaaaaaactattgatttaatgtataaatttcctcatggccttgaagagcttgaaggtattgcaaacagaactgattttgatttaggttcacactctaaaaaacaaaatgaattgagtattgggtcatctgtaaaggaaaataagcactcaaatagtaaaatggcagtacaagatgacactggtaaatgggttgtgccatttgtaatcgaaccatcagcaggtgtagaaagaggatttctagcaatattaaatgaagcttattttgttgaggaactagaaaatgataaaactagagttgtcttaagactaaaaccacatttatcaccaataaaggcagctgttatacctttaaagaaaaataatacagaattagttgatgctgcaaaaaatataaagaatgagcttcaaaaaattggtttaggaagggttatatttgaaaatactggaaatattggtaaaagctaccggaaacatgatgaaattggaacaccagtatgtattacagttgactttcaaacacttgaagatgattcagttaccataagagacagagactcaatggagcaaaaaagattagatattgatgatcttaataattatttaattaatttaataaatcactgat

SEQ ID NO: 298816 - DNA, 925 bp, Unknown
  Bacterial polypeptide expressing nucleotide sequence isolated from the Sargasso Sea
attgactgcaaaaactatggatgaattggttgcattatgcaaacgaagaggtttcatatttcaatctaatgaaatctatggtggattacaaggattgtatgactacggaccgttaggtattgagttaaagaataatcttaaacaatcatggtggacatcaatggtgtatgaccgtgatgatgtagagggattagatgcatctatattaacacacccagatgttttaaaatattccggtcacgaagaaacattcactgatccattagttgattgtaaaagctgtggtttaaggtttagagaagatcaaatacctgaacaatgtattggcgaggagttaactgaaccaagagattttaatttaatgtttaaaactaatgtaggtcctatagatgatggctccagctatgcatatttgagacctgagacagcacagcaaatatttactaattttaaaaatgttgttgattcaacatctagaacattaccatttggtattgcacaaattggtaaagcatttagaaatgaaatcacacctaggaattttatatttcgtgtgcgtgaatttgagcaaatggagttagaatattttgttacacctgggactgatgaaaaatggcataaaaaatgggtcgataccagaatcaaatggtggattgatcagggcattgatgcttcaaaaattaaacgtctaaatgtaccagatgatgatttagctcattattctaagtctacagtcgatctaatgtatgagtttcctcatgggatagaagagttggaaggaattgcaaataggactgattttgatcttggctcacatagtaaaaatcaagatcagctaaatatcaatgcaactactattactaacaagtcatcgaattcaaaacttgctgttcaggatatttctgacaatacttttattgttcca

SEQ ID NO: 298817 - DNA, 883 bp, Unknown
  Bacterial polypeptide expressing nucleotide sequence isolated from the Sargasso Sea
tatggtttctaaaaaaaaaaaaaataaaaaggaaccattaacatttcaagatacaatactaacactgcaaaaatattggtcaaagcagggttgtgtcctattacagccttatgatttagaggttggtgcaggaacatttcatccagctactactttaagatcacttggagaaaaaccttggaaaactgcttatgttcaaccttcaagaagaccaacagacggtcgttacggtgataatccaaatagattacaacattattatcagtttcaagttttaataaaaccgtcgcccagtaatataaaaaaattatatttaaatagtttggcctctataggtgtggatcataacactaatgatatcaggtttgtcgaagatgattgggaaagccctacacttggtgcagcaggattgggatgggaagtatggtgtaatggtatggagattacccaatttacctattttcaacaaatggccggaatagaatgcaaacctatttctgttgaaattacctatggattagagagactttgtatgtttatacaaaataaaaaaaatgtttttgatttaatttggaataatgatggaattttgtataaggatgtatttcaccaatcagaaaaagaattttcagcatataattttgaatatgcaaatacagttaatttgtttaaaatttttgatatggttgaatcagaagccaagtacttaattgaaaaggaaatctctttacctgcttatgaccaatgtttaaaagcaagtcatatatttaatatcttagatgccagaggagtgatcagcgttgctcaaagagctgaatatatttcaaaaattagagatctcacaaaagcaattggtaaaatttggcttgaaagtcaaaaataa

SEQ ID NO: 298818 - DNA, 891 bp, Unknown
  Bacterial polypeptide expressing nucleotide sequence isolated from the Sargasso Sea
tatgagtatcgataagattgtttctctatgtaaacgtagaggatttatttttcaaagttctgatatatatgggggcttcagagcagtgtatgattatggacctttaggaatagcgcttaaaaataatatctctcaactatggtggaagtcaatgacccaacttcacgaaaatattgttggactagatagtgcaattcttatggatccaaaaatatgggaagcttcaggtcacgttggagcattcaatgacccattggttgactgcaagcaatgtaaggcgcgctaccgtgccgatgaactcggtgatattgaaaatgaaaaaattagttggaatgaaattcaatgtccaaaatgcggcaccaaaggtaacttaactgagccaagacaattcaatctaatgttcaagacttatgttggcgctgtagaagaagattctaatgcaacatttctgcgtcctgagacagcccaaggtatttatgtaaattatttgctggttcaaaatgcaatgcgtctaaaattgccatttggaatagcgcaaattggcaaagcatttcgcaatgaaattgtagcaagaaattttatttttcgaactagagaatttgaacaaatggaaatgcaatattttgtcaagccaggacaggatgatgaaactttagaaaattggaaaaaagagcgaatggcattctatgctcaacttggtattgataaagataagctgcgcttcaaagaacatggtcctggcgaacttgctcactacgctaaagaagcatgggatattgaatatgatttttcttttggttggtctgaaattgaaggaattcataatcgaacagattttgacttgaatcgccatcaagaattttctggtaaaaaaatgggaatatttgaaac

SEQ ID NO: 298819 - DNA, 883 bp, Unknown
  Bacterial polypeptide expressing nucleotide sequence isolated from the Sargasso Sea
atggcctttaaaaaaataaaaaaaaaaccaaaatttcaaactttccaagatacaattataaatcttcaaaagttttggagtaaaaatgggtgtgtaattttacaaccttatgatatggaagttggagctggaacatttcatccagctactactctaagatctcttggacctaagccatggaaagcagcgtatgttcaaccttcacgaagacctacagatggaagatatggagataatccaaatagacttcagcattattatcaatttcaagttataataaaaccctctccaattaatattaaaaaactttatttaaatagtttgtcggtaataggaattaatcataaagagcacgatattagatttgttgaagatgattgggaaagcccaactctaggtgctgcaggtcttggatgggaagtttggtgtgatggcatggaaatatctcaatttacatattttcaacaaatggcaggttttgaatgtaaaccagtgtcagtagagataacttacggtcttgaaagaatttgtatgtttacccagcagaaaaaaaacgtttatgatttagtttggaatgatgaaggtattgattacagggaagtttttcatcaatcagaaaaagaattttcagcttataactttgagcatgctaatacagaaaacttatttaaaatatttgatatgcatgagagtgaagcaaaatcattagttgaaaaaaatatatctttacctgcatacgatcaatgtttgaaagcaagtcatatatttaacgtattagatgctcgcggagcaattagtgttgcgcaaagagcagaatatattggtcgaataagagaaattacaaaacaagctgctacaatttgggtacagtcgcaaacataga

SEQ ID NO: 298820 - DNA, 1298 bp, Unknown
  Bacterial polypeptide expressing nucleotide sequence isolated from the Sargasso Sea
ctttatattccaatctagtgaaatttacggtggccttcaaggaacatacgattttggaccacttggtgttgaattaaagaataatattaaagacgcctggtgggaagcaatggtttatgaaaatgatgatattgaaggacttgactcatctattcttacaaacccacttgttctggggtattcaggccatgaagacaccttttcagatccaatggtcgattgtaagtcatgtggtcttagatttagagctgatcaagtaccaaaagagtgcaaaccagaggatttaacagagccaaggcaatttaacttgatgtttaagacaaatgttggtccgatagatgatggttcgaattttgcatatctaaggcctgaaacagctcaacagatatttactaactttaaaaacgtcatagatgcgacatctaaaccaattccatttggaattgcacaaattggtaaagcatttagaaatgaaataacacctagaaattttatttttagagtcagggaatttgaacaaatggaactagaatattttgttatgccgggtgaagacgagacatctcatgatatatgggtacaaaaaagactagaatggtggaaaaaacaaggtgtacccacagaaagtattgagctatatgatgtacccactgaagaactagctcattattctaaaaaaactattgatttaatgtataaatttcctcatggccttgaagagcttgaaggtattgcaaacagaactgattttgatttaggttcacactctaagaaacaaaatgaattgagtattgggtcatctgtaaaggaaaataaacactcaaatagtaaaatggcagtacaagatgactctggtaaatgggttgtgccatttgtaatcgaaccatcagcaggtgtagaaagaggctttctagcaatattaaatgaagcttattttgttgaggaactagaaaatgataaaactagggttgtcttaagactaaaaccgcatttatcaccaataaaggcagctgttatacctttaaagaaaaataatacagaattagttgaagctgcaaaaaatataaagaatgagcttcaaaaaattggtttaggaagggttatatttgaaaatactggaaatattggtaaaagctaccggaaacatgatgaaattggaacaccagtatgtattacagttgactttcaaacacttgaagatgactcagttaccataagagacagagactcaatggagcaaaaaagattagatattgatgatcttaacaattatttaattaatttaataaatcactgat

SEQ ID NO: 298821 - DNA, 874 bp, Unknown
  Bacterial polypeptide expressing nucleotide sequence isolated from the Sargasso Sea
tatggtctctaaaataaaaaaaaaaactttatcttttcaagatacaatctttaacttgcaaaagtactggtctaaaaaaggttgtgtaatattacaaccgtatgatctagaggtaggtgctggaacattccatccagcaaccaccttaagatcgcttggcccaaaaccatggaaaactgcatatgttcaaccatcacgcagaccgactgatggaagatatggtgacaaccctaatagattgcaacattattatcaattccaagtcttaattaaaccttcaccaaaagaaataaaaaagatgtatttaaatagcttgtcatcaataggtattaatcatgaggaacacgatataaggtttgttgaagatgactgggaaagtcctacattaggagcggcaggtcttggatgggaagtttggtgtgatggaatggaagttacacaatttacctatttccaacaaatggcaggagttgaatgtaaacctgtatctgttgaaattacatatggattagagaggttgtgcatgtttattcaaaataaaaaaagtgtttttgatttaatatggaatgatgaaggaattacctacaaagatgtttttcatcagtcagagaaagaattttcagcatataattttgaatatgccaatactgataatttatttaaaatatttgaaatgcttgaagaagaaacaaaattattagttgaaaaaaagatttctcttccagcatatgatcaatgtttaaaatgcagtcatgtcttcaatattttagatgcaagaggggtgattagtgtagcacaaagggctgagtatattgcaagaataagggaactaactaaatcaattgggaaagtttggattgaaagccaaagttga

SEQ ID NO: 298822 - DNA, 1285 bp, Unknown
  Bacterial polypeptide expressing nucleotide sequence isolated from the Sargasso Sea
aatgcctgaagaaatatttgataaggttgtgaaaattgctcaatcaagaggatttgtgtttaatgcctcatctatatacggtggattaagaagttcttatgattatgggccacttggggtacttttaaaaaataatatttcaagcatgtggtggagtagtctcaacaaccttgatgttgaaatctatccaatagatactgcaattatacagtcaagtgaagtatggaaggcatctggccatttagctgaattcaccgatccaatggttgatcataaacctactggtgaaagattcagagcagatcaggtacctaaggatttaaaaaaagaagatttaacggagccacgtcaatttaaccttatgtttgaaactagtattggtccagtagaaaatgaaaactcagctgtttacttaagacctgaaactgcacaaggtatatttgttaactttgagaatgttttacgtaccatgagagccaaaattccatttggaattggaaatattggaaagtcttttagaaacgaaatcacacctggacaatttatttttaggactagggaatttgaacaaatggagattgaattcttttgtgatgaaagtgaagaggataaatggtttgattactgggttgaaaatagactaaattggtataaaaatcttggtattcctgagaaaaatttaagaattagaaatcatgaaaaatctgagcttgctcattacgcaaaaaaaacatcagatattgaatttgagtacccatggggatggggtgaacttgaaggaattgctaatagaggtaattttgatttaaatgcacatcaagaaagcagtggcaaggatttagaatactttgatccggttacagaaagtaaatttactccatctgtcatagagccagcaggtggtctaactagaacgctttttgctgttttattatctttatatgaagaagaagaattagaaaatgaaacaagaacgctatttaaatttaattttgatcttgcacctattcaaatcggaatacttccgttaagcaaaaaagaagaattaatcacagtttgtaatcagataaactcttctcttcgatcaaactttagaacagaaattgatattacccaatctattggaaaaagatacagaagacaggatgaaataggtactccttattgtataacggtagattttgatactttagaggataattctgtgacagtaagaagcagagatacaatggaacaagaaagaatcaaaatcgaagaattaagagactatttcaataatttttaa

SEQ ID NO: 298823 - DNA, 1197 bp, Unknown
  Bacterial polypeptide expressing nucleotide sequence isolated from the Sargasso Sea
gtctatggtttatgaaaagagatgatatagaaggcatagactcatcaattttaacaagcgctattgttctaaaatattctggccatgaggacacttttacagatcccttggtggactgcaaatcctgcggcgaaagatttagagcagatcaagtaccagattattgtaaaaaagaagatttaactgaacctagacattttaatcttatgttcaaaacaaatgtaggcccaatagaagatggagattcttttgcctatttaagacctgagaccgcacaaagcatttttactaattttaaaaacgtaatagattctactccacactctcttccgtttggtattgctcaaatgggtaaagcatttagaaatgaaatcacccctagaaattttatatttcgggttcgtgaatttgagcagatggaactagaattctttgtaaaaccgggagaagacgaaaagtggcataaagaatggaccgacctgagactaaagtggtgggagaatcaaggggtaagcaaggaaagcattgaactgtatcatgtacctagtgaagaattagctcattattctaaagcaacggtagatattatgtataagttccctcacggccttgaggagcttgaaggtatagcaaataggacagattttgacttaggatcacattctagagaacaatctgaacttaatttaacagcaaaagtagatgtaaatactcactctaacgcaaaacttgcaattcaagatacaaaaaccggagattggtttgtcccttatgttattgagccttcagctggagttgaaagaggatttttagccattttaaatgaggcttataatgttgaaaaacttaaagatggaaaggaaaggacagttttacgcctcaaaccacaccttgcccccataaaagcagctgttatacccctcaaaaggaataataaagacctggttgaaagggcaaaagatattaaaaatgaacttcaaagccttgctcttggaagggttctactggaaaattcgggcaatattggaaaaagctacagaaaacatgatgagattggaacgccaatgtgcataactgtagactttcaatctcttgaagatggaactgttaccataagagatagagatacaatgaagcaagaaagattagaaaaaaaatctatttctgattattttaagaatgctctaaataattgaa

SEQ ID NO: 298824 - DNA, 552 bp, Unknown
  Bacterial polypeptide expressing nucleotide sequence isolated from the Sargasso Sea
tatggcctctaaaaagaataaaaaaaaaccaaagtttcaaacttttcaagatacaataattaatttacaaaagttttggagcaaacacggctgtgtagttttacaaccttatgatatggaagttggagctggaacttttcatccagcaactactttgaggtcactaggaccaaaaccttggaaggcagcatatgttcaaccgtcacgaagacctaccgatggaagatatggaaataatccgaatagacttcaacattattatcaatttcaagttattataaaaccctctccactaaatattaaaaaaatttatttaaatagtttgtcggttataggaattaatcataaagaacatgacattagatttgttgaagatgactgggaaagcccaacactaggagctgcaggtcttggatgggaagtatggtgtgatggaatggaaatatctcaatttacatattttcaacaaatggcaggttttgagtgtaaaccagtgtcagtggagataacttacggtcttgaaagaatttgtatgtttacccaacagaaaaa

SEQ ID NO: 298825 - DNA, 874 bp, Unknown
  Bacterial polypeptide expressing nucleotide sequence isolated from the Sargasso Sea
tatggcctctaaaataaaaaaaaataatttttcttttcaagatacaattttaaatttgcaaaaattttgggcaaaaaaaggttgtttaatattacaaccgtacgatctagaggtaggagctggaacatttcatcctgcaaccactcttagatctctaggccaaaaaccatggaaaactgcttatgtccaaccatcacgtagacctactgatggacgatacggagacaatccaaatagattacaacattattatcaatttcaagttttaataaaaccttctccaaaagatattaaaaaaatgtatttaaatagtttaaattcaattggaattaatcatgaagatcatgatattagatttgtagaagatgactgggaaagccctactttaggagccgcaggccttggatgggaagtttggtgtgatggaatggaagttacacaatttacttattttcaacaaatggctggtattgaatgtaatcctgtgtctgtagaaattacttatggtttggaaagattgtgtatgtttattcaagataaaaaaaatgtttttgatttgaattggaataatgagggcatcttatacagggatgtttttcatcaatcagaaaaagaattttcagcttataattttgaatatgccaatactgataatttatttaaaatatttgatatgcttgaagaagaaacaaaattattagttgaaaaaaagatttcacttccagcatacgatcaatgtttaaaatgtagccatgtatttaatattcttgatgctagaggggtgattagtgtagcacaaagggctgaatatattgcaaggataagggaactaactaaatcaattgggaaagtttggattgaaagccaaagttaa

SEQ ID NO: 298826 - DNA, 322 bp, Unknown
  Bacterial polypeptide expressing nucleotide sequence isolated from the Sargasso Sea
atgccagctaaaaaaaaagttaaaaaaaaaaataactctctttcttttcaagatataataatgaatcttcaaaaattttggggaagaaatggctgtatgattttacaaccatatgatttagaagttggtgctgggacttttcatcctgcaactacgttaagatctctaggccctaaaccatggaaagctgcttatgttcaaccttcgagaagaccaacggacggtagatacggtgaaaacccaaatcgtttacaacactattatcaatatcaagtaattattaaaccatctccgagcaacattaaacaaacatatctaaaaa

SEQ ID NO: 298827 - DNA, 883 bp, Unknown
  Bacterial polypeptide expressing nucleotide sequence isolated from the Sargasso Sea
atgcaaaagctatcatttcaagaaattatattaaaacttttaaatttttggtctaaacaaggttgcataattttacaaccgtatgacatggaagttggcgctggaacttttcacccagctactgctcttaatgttttaggaccaaaccgattatggaaagttgcttatgtacagccttgtagacgtccaacagatggacgatatggggaaaatccaaatagacttcagcattattaccaatttcaagttattattcagccatctccagataatatacaagatttatatcttaaaagcttaaaagaaattaatttagatcatcttaagcatgacataaggtttgttgaagatgattgggaaagtcctacattaggagcggctggtttaggctgggaagtttggtgcgatggaatggaagttactcaatttacttattttcagcaagttggaggttttgaggtaaggcctgttgcggttgaaataacttatggacttgaaagattggcgatgttcattcaagagttagatgacgtatactccattgattttaatggtcttcctaaatcatctggtggaaagagttatggagacatttttaaagatgcagaaaaagaatactcagagtataattttgaaaaagcaaatgtagataaattattcaatgaatttgaaaattgtgtcaaagaatgcaatgatttgatgagtttagaaaaatcattagtaaaacctgcatatgatcaatgtataaaggcaagtcatatatttaatttattggatgctagaggtgttatttctgtttctgaaagacaagcttttatcctaaaagttagaaatatgagtaaaacgtgttgctctgaatggataaaaagacatgaaaattaaa

SEQ ID NO: 298828 - DNA, 752 bp, Unknown
  Bacterial polypeptide expressing nucleotide sequence isolated from the Sargasso Sea
aatgccaacaaaattaaaaaataaaaaaaaatcgttattaacttttcaagatttaatctttaatcttcaaaaattttggggaaaatatggttgtgttattttacaaccttacgatattgaagtgggcgcaggaacctttcaccccgcaactacactaaggtctttaggacctaagccatggaaggctgcatacgttcaaccttctagaagaccaactgatggaagatatggaaagaatccaaatcgtttacaacattattatcaataccaagttattataaaaccttctccagaaaatattaaacaagtatatcttaaaagtttagccgcaataggcattcagtcaaaagatcatgatattcgatttgtcgaagacgattgggagagtcctactttgggcgccgcaggattagggtgggaagtttggtgcgatggtatggaaataactcaattcacatattttcaaaaaatgacagggatagattgtaagcctgtatctgtagaacttacatatggtttagaaaggatctgcatgtttgttcaaggaaaaaaaagtgtattcgatatagactggaatagtgatggtgtaaaatatggagatgtatttcttgagtcagaaaaagaattttcagcttataattttgatcatgcaaatacggattctttattaaaaaattttgaaattgcagaaaatgagagcaaatctttgttggaaaaaaaactgccgcttccagcctacgatcagtgtctaa

SEQ ID NO: 298829 - DNA, 1153 bp, Unknown
  Bacterial polypeptide expressing nucleotide sequence isolated from the Sargasso Sea
catgtcagcacaatcaatggagcaactagtctcactttgtaaaagaagaggtttcatttaccaaactaatgaaatttatggtggtctccaaggaatatatgattttggtccctacggagtagaattaaaaaataatttgaaaaatgcttggtggagtgaaatggtctaccagagagatgatgtagaaggaatcgatgcttcaattcttacaaataaattagtactaaaacattcaggtcatgaagatacattttctgatccacttgtagattgtaaagattgcaaaaatagaatgagagctgatcatattaaaaatagtaagtgctcactttgcggttcatcaaatcttactaaacctcgtgagtttaatttaatgtttaaaacaaatgttggtcctattgaagatgagaacaactatgcatatctaagacctgaaaccgcacaacaaatttttacaaatttcaaaaatgtcttgaattcaaatcctaagaaaattccatttggtattgcacaaattggtaaggcatttagaaatgaaataactccaagaaatttcatctttagagtaagagaatttgaacaaatggaattagaattctttgttaaaaaaggtgatgatgaggaatggcacaaatattggctggaaaaaagaatagagtggtggggcaaacaaggggttgccaaagataagataaaaattcttaatgtaccggaagacgagctgtcccattattcaaaaggaacctatgacttaatgtatgaatttccacatggtgttgaggaattggaaggtatcgcaaacagaactgattttgatttagggtctcactctaaaaatcaagaagattaccaaattgatgcaaaagtaatcaaaaacaatgaatcaaatgaaaaacttgtttttactgatagtgagacaaacgaaacatatataccttacgttatagaaccctctgcaggtgttgagaggggtatgctagctatacttaatgaagcatacaacgaagaagtactagagaacggaaaaacaagaacattgctcaaattaaaacctcatctatcccctgtaaaagttgcagtaatacctttgaaaaaaaatgatgagaaaatagttagttatgcaaaagaaattaagagaaaaattcagggttaa

SEQ ID NO: 298830 - DNA, 1031 bp, Unknown
  Bacterial polypeptide expressing nucleotide sequence isolated from the Sargasso Sea
aatgccagctcaatcaatggaacaattagtatctttatgtaaaagaagagggtttatttttcaaacaaatgaaatttatggaggccttcaaggtgtttatgattacggtcctttgggtgtagaactaaaagaaaatcttaagaggtcctggtggacagcaatggtctactcgagagatgatattgaggggcttgatgcatcaatacttactaataagaaagtgcttcaatattcaggtcacgaggaaacttttacagaccctatggtggattgcaaatcatgtggtgagaggtttagggccgaccaagttccagaatattgcaaacaagaagatttaactgaaccgcgccaatttaatttaatgtttaaaactaacatagggccaattgcagatgaagaatcttacgcatatttgagacctgaaacagctcagcaaatatttacaaactttaaaaatgtagttgactcaacctcgaaatctattccatttggtatagcgcaaataggtaaggcttttagaaatgaaatcactcctagaaactttatctttagagttagagaatttgaacagatggagttagagttttttgttgaaaaaggtcaagatgaaggctggcatgagtattgggttaaagagagaataagttggtgggccgaccaaggtgttagaaaagaaaagattgaagttcttcatgttccaaaagaggatctttcacattactcgaaagctacggtagatttaatgtatgcatttcctcacggggtcgaagagttagaaggaattgcaaataggacagattttgaccttgggtcgcactcaaaaaatcaagaagaccttaatataactgcaaaagttcttaaaaataaggactctaatgcaagacttgcaatacaaaacattgaatcaaaaaaatggcaaataccatatgttattgagccatcagcaggtgtagatagaggggtgctagcaatattgaatgaggcttataaagaggaaaatttagaaaatggaaaaaatagagttgtgttaa

SEQ ID NO: 298831 - DNA, 1450 bp, Unknown
  Bacterial polypeptide expressing nucleotide sequence isolated from the Sargasso Sea
ttgagtaaaaataattatcgattagaagaactagaaaaactagtttctttagctaaaagaagaggtattatatttccttcaagcgaaatttatggtggactatcctcagtatgggattatggacctattggcgtagagataaaaagaaatgtaaaaaatctatggtggaaatcttttgttagtgaaagagatgatatttttggaatagatgcttcaattttaatgcatcctgatgtttggaaggcttctggtcatttagaatcattttcagatcctttagttgaatgttctcttacaggtaaaagatatagagaagatcatatatttatattagaaatagaaacaaaaaaggaaaataagattatagctattgaagcatcagataaaaatgaagctgaaaaactagtaaaagaaaaaattatttcaattattcctttaattgaatctgagagtaaagagaatccatctcctgatggaggaactttatctgatccaaggaatttcaatcttatgttcaagacatttataggcccagttgaagattcttcttccacagtttatcttagacctgaaactgctcaggctatgtttgtaaactttctaaatgtcttaaattcttcaagaaaaaaaatcccctttggaattgctcaacaaggaaagtctttcagaaatgaaattacccctggaaactttacatttagaactagggaatttgagcaaatggaaatggaatttttctgcagccctgatgacgatgaaaaatggcatgattactggattcagttctcattagattggtttaagaaatatggaattagagaagaaaacttaatgattaggaaacatgaaagtgaagaattgccacattattctaaagctagttcagatatagattatttatttccttggagctggggtgaactagaaactatttcaaatagaacagactatgatctcaaagctcactcagaactatcaggtaaagatttatcttattttgatcaagaaaataataaaagatttacaccttatgtaattgaacctgcgatgggagcagacagaagcgttctggcattcttatgtgatgcatattgtgaagagaaaacagagaaagaaacaagaacattattaaaattacatcctgaaattgcacctataaaaattgctgttttacctttgtcaagaaatgaaaaactttctgaatatagtagaaatatttttgatagattaaattctttatatacaactcaatatgacgatactcaatcaattggtagaaggtatcgtagacaagatgaagtaggtactccactatgtgtaactatagattttgaaagtgttgaagaggatgattcagtaactataagaaatcgtgatactatggagcaaattcgagtgagttcagacaaattattagaagctattaatgatcaacttaaatctttttaaa

SEQ ID NO: 298832 - DNA, 408 bp, Unknown
  Bacterial polypeptide expressing nucleotide sequence isolated from the Sargasso Sea
tatggtttctaaaaaaaaaattaaaaaaaaaccaaagtttcaaacttttcaagatactattataaatctgcaaaaatattggagtaaaaatggttgtgtaattttacaaccctatgatatggaagttggagcaggtacttttcatccagctactacactaagatctttagggcctaaacattggaaagctgcatatgttcaaccttctagaagaccaactgatgggagatatggtgataacccaaataggcttcagcattattatcaatttcaagttttaattaaaccttcaccaaaaaatattaaaaaactttatttaaatagccttaaaactattggtataaactataaagatcatgacataagatttgttgaagatgattgggaaagtccaacacttggtgcagc

SEQ ID NO: 298833 - DNA, 658 bp, Unknown
  Bacterial polypeptide expressing nucleotide sequence isolated from the Sargasso Sea
atggtttctaaaaaaaaaaataaaaaaaaaagttttcaatcttttcaagacactattttaaacttacaaaaatattggagtaaacaaggttgtaccttactacaaccctacgacatggaagttggagctggaacttttcatcccgcaactacattaagatcacttggaccaaaaccatggaaaacagcttatgttcaaccatcaagaagaccaactgatggtagatatggtgaaaatccgaatagactacaacattattatcaatttcaagttttaattaaaccatcaccaaataatattaaaaaactttatcttaatagtcttgcttctttaggaataaaacatcaagaccatgatattagatttatagaagacgactgggaaagtcctaccctaggcgctgctggactaggatgggaggtatggtgtgatggaatggaaataactcaatttacatattttcaacaaatggctggaatagagtgtaaacctatatcggttgaactaacatatggtcttgaaagattatgtatgtttatacaaagtaaaaaaaatgtatttgacttaatttggaataatgagggaatattatatagagatgtttattatcaatcggagaaggagttttctaagtataattttgaattagctaataccg

SEQ ID NO: 298834 - DNA, 874 bp, Unknown
  Bacterial polypeptide expressing nucleotide sequence isolated from the Sargasso Sea
tatggtttctaaatcaaaagataaaattcttacatttcaagatacaattttaaatcttcaaaagttttggagtaaaaaaggatgtgtggttctccaaccttatgacatggaagtaggagccggcacatttcatccagcaactacattgaggtccttaggaactaaaccttggaagacagcatatgtgcagccatcaagaagacccacagatggaaggtatggagataatccaaatagacttcaacattattatcagtttcaagttcttataaaaccttcacctgaaaatattaaaaaactttacctcaatagtttgtcatctataggaattgatcattcagatcatgatattagatttgtagaagacgactgggaaagtccaacattgggtgctgctggtcttggttgggaggtatggtgtgatggtatggaaattactcaatttacttattttcaacagatggcaggatttgagtgtaaacctgtttctgtagaaattacatatggattagaaagaatatgtatgtttatacagcaacaaaaaaatgtatacgatctgttgtggaatgatgatggtgtaaaatataaagaagtatttcatcaagctgagagagaattttcagcatataattttgaacatgcaaatgtagagtcactttttaaaatgtttgatatgcacgagtcagaagcaaagtcattagttgaaaaaaaaatttcactaccagcttatgatcaatgtttaaaagcaagtcatgtatttaatatattagatgcacgtggagcaattagcgtcgctcaaagagcaggatatattgcaagaataagagatattacaaaatcagctgctagtatttggttagatagtcaaaaataa

SEQ ID NO: 298835 - DNA, 436 bp, Unknown
  Bacterial polypeptide expressing nucleotide sequence isolated from the Sargasso Sea
gaagtaccatatgtaattgaaccatcagcaggtgtagataggggtgtgctggccatattgaatgagtcgtataaggaggaaacccttgaaaatgggaaaaatagagttgtattagctttaaaacctcacctctcaccaatcaaagctgctgttataccaataaaaaagaatgattcgacaattgtcgacttttcaaaacaaattaaggataacttgcaaaaactgggcctaggtagagttgttttggaaaatacaggaaatattggtaaaagttatcgtaaacacgacgaaattggcactccgatctgcataacgattgattttgacacccttgaagatagtacagttactgtcagagatagagattcaatggagcaaaagagggtaaaagttgaaaatttagatgatcttttaaaaaacctgttagtaaagtagt

SEQ ID NO: 298836 - DNA, 1267 bp, Unknown
  Bacterial polypeptide expressing nucleotide sequence isolated from the Sargasso Sea
ttcctcgccgtgccgcaggagtgtctgatcctgaccatgcagaccaatcagaagtactttgcgctgaccgacgcgcagggccatctgcgcaaccgcttcttgatcgtctcgaacatcgccacggatacacccgaggccatcattcaaggcaatgagcgcgtggtccgcccgcgcctggccgacgcccgcttcttcttcgagcaggacaagaaaaagccgctggccgaccgcgtgccgctgctctcgcgcgtggtctatcacaacaagatcggcacgcagcttgagcgtgtgtcgcgcctgcaggccatcgccggccaactggctgagaagctcggcgcggatgtggcgcacgcctcgcgcggcgcgctgctggccaaggccgatctgctgaccgacatggtgggcgagttccccgagctgcaaggcacgatgggcacgtactatgcacgccatgacggcgaacccgacgatgtggcgctggcctgctccgaacactaccaaccgcgctttgccggcgatgcgctgcccagcaccgccaccggtaccgtggtggcgctggccgacaagttcgaaacgctggtcggcatctggggcatcggcctgcaacccacgggcgagaaagacccgttcgcgctgcgccgccacgcgctgggcatcctgcgcatgctgatcgagaagccgctcgcgctcacgattgacgatgcactgcagatcgccgctgccagcttcgacggcatcgccgccgtcaaaccgaacctggccgccatcaccgacttcctctacgaccgcctgcgcggctacctgaaggacaagggctacagcaccaacgaggtcgaagccgtggtgagtcagcgcccgcagcgcctggacgacatcgtcgcgcgcctagaagccgtacgcgcctttgctgccctgccgcaggccgaggcactggcggccgccaacaagcgcatcaccaacatcctgaagaagacggacgtggccattggtgccgtgcagccgccactgctcaaggaagacgccgagcgcgcgctgcatcaatccgtggttgcagcggagccgcaggtgcacgacgccttcgcacgcggcgatttcaccactgcgctcaagacgctggccggcctgcgcgaagcggtcgacaccttctttgacggcgtgatggtgatggccgacgacaccgcgctgcgcgataaccgcctggcgttgctggctgaactgcacggactgatgaaccgcgtcgcggacatctccaagctggccgcctgat

SEQ ID NO: 298837 - DNA, 1600 bp, Unknown
  Bacterial polypeptide expressing nucleotide sequence isolated from the Sargasso Sea
atgtctgaaaaaactttcctggtggaaatcggcaccgaagagctgccaccaaaagccctgcgcagcctggcggaatcttttgctgcgaactttaccgcggagctggataacgctggcctcgctcacggcaacgtcgagtggttcgctgctccgcgccgtctggcgctgaaagtcgctaacctggcggcggcgcagcccgatcgcgaagttgaaaaacgcggcccggcggtttctgccgcgttcgacgcggaaggcaaaccgagcaaagcggccgaaggctgggcgcgcggctgcggcatcaccgttgaccaggccgagcgcatggtcaccgacaaaggcgaatggctgctgtatcgcgcccatgtcaaaggcgaaagcgcagaagcgctgttgccgaacatggtggccacgtccctggcaaaactgccgatcccgaaactgatgcgctggggcgcctccgacgtgcagttcgtgcgtccggttcacaccgtgaccctgctgcttggcgataaagtcgtcccggcaaccattctgggcattgcctccgatcgcgtgattcgcggccatcgctttatgggcgagccggaattcaccatcgataacgccgaccagtacccgcaaattctgctggagcgcggcaaagttattgctgactacgagcagcgtaaagccaaaattaaagccgatgccgaagaagcggcgcgcaaaattggcggcaacgccgatctgagcgaaagcctgctggaagaagtggcctctctggttgaatggccggtagtgctgaccgcgaaattcgaagagaaattcctcgcggtccctgcggaagcgctggtctacaccatgaagggcgaccagaagtacttcccggtctacggcaacgacggcaaactgctgccgaactttattttcgttaccaacatcgagtcgaaagatccgctgcagattatctccgggaacgaaaaagtggtgcgcccgcgtctggcggatgccgagttcttcttcaacaccgaccgtaaaaagcgtctggaagatcatctgccgcgtctgcaaaccgtgctgttccagcagcagctgggtacgctgcgcgacaagactgaccgtattcaggcgctggcgggctggattgctggtcaaattggcgctgacgttaaccacgcaacgcgtgcgggcctgctttccaagtgtgacctgatgaccaacatggtgttcgagtttaccgacacccagggcatcatgggcatgcactatgcgcgtcacgatggtgaagccgaagatgttgcggtggcgctgaacgagcagtatcagccgcgctttgccggtgacgatctgccgtccaacccggtggcctgtgccgtagcgattgccgataagatggataccctcgcgggcatcttcggcatcggtcagcatccgaagggcgataaagacccgtttgcgctgcgtcgtgccgcgctcggcgtactgcgcatcatcgttgagaagaacctgaacctggacctgcaaacgctgaccgaagaagcggcgcgtctgtatggtgataagctaactaacgccaacgtagttgatgacgtcattgacttcatgcttggtcgcttccgcg

SEQ ID NO: 298838 - DNA, 383 bp, Unknown
  Bacterial polypeptide expressing nucleotide sequence isolated from the Sargasso Sea
tatggtttctaaagcaaaaaaagaaaaaaaaaaaattcaaacattccaagaaacaattttaaatcttcagaaattttggagtaaaaaaggatgtattattcttcagccttacgatatggaggttggtgcaggaacttttcatccagctactaccctaagatcacttggaaataaaccatggaaagcagcttacgtacaaccatcaagaagacctacagatggaagatatggagataatccaaacaggttacaacactattatcaatttcaagttttaattaaaccatcacctgaaaatataaaaaaactttatctaaatagtttatctactataggaatagatcataatgatcatgatataaggtttgttgaagatgattggg

SEQ ID NO: 298839 - DNA, 874 bp, Unknown
  Bacterial polypeptide expressing nucleotide sequence isolated from the Sargasso Sea
gatgccaactaaaaaaaaattaaaatctttatcttttcaagagatcataatgaatttacaaaaattttgggggaaatatggctgtgtaatcttacaaccttatgatttagaagtaggagcaggaacttttcaccccgcaacaactttaagatctttaggaccaaaaccttggaaagcagcttatgtgcaaccttcaagaagaccaacagatggaaggtacggaaaaaatcctaatcgattacaacattattatcagtatcaagttataattaaaccttcgcctgataatattaagcaaacttatttaaaaagtttatctgcaataggtattgatgttaagaatcatgatgtacgttttgtagaagatgattgggagagcccaacactaggtgccgcaggattaggctgggaagtttggtgtgatggtatggagataacacaatttacttattttcaacagatgacaggattagaatgcaaacccattccagttgaaatgacctatggcttggaaagattatgtatgtttgtccaaggaaaaaaaaatgtatttgatcttgattggaacaatgaaggagtaaaatacaaagatgtattttttcaagcagaaaaagaattttctgcatacaattttgaatttgctaataccgaaactttattaaaaaattttgaatcaacagaaattgaatgtaaatctttattagataaaaaactttctttacctgcatacgatcaatgcttaaaagcaagtcatatatttaatttacttgatgctagaggagtaattggtgttgcagaaagaactggatacataaacagaataagagaactcgcaaaaggatgcggagcactttggctaagtacacaaatttaa

SEQ ID NO: 298840 - DNA, 1025 bp, Unknown
  Bacterial polypeptide expressing nucleotide sequence isolated from the Sargasso Sea
ctattgcaagaaagaagatttaacagaaccgcgtcaatttaatttaatgtttaaaacaaatattggtcctgtagatgacggtaaaagttttgcatatttaagaccagaaacagctcaaaatatctttactaattttaaaaatgttgtcgactctacagctaggacagttccatttggcattgcacaaatgggaaaagcctttagaaatgaaataactcttaaaagctttatctttagagttcgagaatttgaacaaatggagcttgaattctttgtgcgcccaggagatgacgataaatggcacaagagctgggtagaatcaagagttcagtggtggaaagatcaaggcatttctgataaaagcctagaactttatgatgttcctgctgatgagctcgcccactattcgaaagcgacagtcgatattatgtacaaatttcctcatggtgtagaagaattagaaggtatagctaatagaactgattttgatttaggctcacactcaaaaagtcaaaaagaattaaacattaaggcaaaagttttagaaaataatgaatctaattccaaattagcccttcaggatgaaaataataattggtttgtgccgtttgttattgagccttctgctggagttgatagaggtgtgctggcaattttaaatgaagcatattttgtagaagaaattgaaggaaaagagcgtgtggttcttaaactaaaacctcatctagccccaattaaggcggctgttatgcctctaaagaaaaatgatgaaaaaattgtagctcttgcaaaaaaagtaaaagatgagttacagaaattaggtttaggcagaattctttttgaaaacagtggcaatattggcaaaaactatcgcagacatgacgaagttgggacgcctgtttgtattactgttgattttgagtcgcttgacaaccaaactgttactattcgagatcgtgacagcatgaaacaagaaagaatttctttagacaaaatttctgagtatcttaaaaaaataatttaaa

SEQ ID NO: 298841 - DNA, 532 bp, Unknown
  Bacterial polypeptide expressing nucleotide sequence isolated from the Sargasso Sea
catgatattcgttttgtagaagatgattgggaaagcccgacattaggtgcagctggacttggctgggaagtttggtgcgatgggatggagataactcaatttacctattttcaacaaatggcaggctttgaatgcaaaccagtttcggttgaacttacatatggtttagaaaggttgtgtatgtttactcaacaaaaaaaaaatgtttatgatttaatatggaacagtgaagatattaaatatagagatgtatttcatcaagcagaaaaggaattctctacttataattttgaattagcaaatacagaaaatctttttaaaatttttgatatgactgaaaaagaggcaaagatgctcactgaaaataacgtgtcattaccagcctatgatcaatgtttaaaggcaagccatatttttaatattttagatgcacgtggcgtaataagtgttgctcaaagagccgaatatatatcaaggataagagatattacaaaaggggcagctgaaatttggttaaaaaatcaaacttaaa

SEQ ID NO: 298842 - DNA, 955 bp, Unknown
  Bacterial polypeptide expressing nucleotide sequence isolated from the Sargasso Sea
cccaggcaatttaacctcatgtttaaaacatccattggccccgttgaagatgattctaacatagcataccttcgccctgagactgctcagggaatctatgtgaattatttattggtgcaaaatgcgatgcgcttaaaagtaccgtttggtattgctcaaattggcaaagcattccgaaatgaaattgtagcacgaaactttatttttagaactagagaatttgaacagatggaaatgcagtactttgttcagccagatcaggatgatcaatctctaaatgagtggaaggataaacgattatcattctattctcaacttggtattgataaaagtaagctcagattcaaagaacatggccctgacgaacttgctcattacgctaaagaggcctgggatatcgaatacgagtttccttttgggtggtctgaaatagaaggaattcataataggaccgactttgatttaaaacaacatcaagaattttctggaaagaaaatggagtattttgatcctgttgagaatacgcgctacctcccttatattattgaaacttctgcaggtttaaataggatgcttcttgcagtactatctgatgcatattgggaagacaatgagaataatcgtgtggtaatgaagcttgatccaaaaattgcccctgttttagctgtagtatgtccacttactaaaaaggatggtctgccagaaattggaagaaatattatggatattttaaaaaaagaatttaaagttatctacgatcagcagggttccataggaaaaagatattaccgtcaggatgaggctggaactccgttcggcattaccgtagatcatcagtcaaaagatgatcaaagcgttacgcttcgccaccgtgacacgcaacatcaagatagaattgcaatcgatcaacttgtaaatgctatcaagaataaattggagaattttaatgaataat

SEQ ID NO: 298843 - DNA, 1018 bp, Unknown
  Bacterial polypeptide expressing nucleotide sequence isolated from the Sargasso Sea
agaattaacagaaccaaggcctttcaatttaatgtttaaaactgctattggaccggtagacgatggatcatcatttgcttatttaaggccagaaacttgccagcaaatatttacaaattttaaaaatattttagactctacctcaagaacagttccatttggaattgcgcaaataggaaaagctttcagaaatgaaataacacctcgtaattttatttttagagttagagagtttgaacaaatggaactagaattttttgttaaacctggttcagatgataaatggcatgaatattggattgaaaaaagaatacaatggtgggtagatcagggaataaaaaaagaaaatttgaaaaaaaatgaagttaataaagaagatctttctcattactcaaagagaactgttgatataaattatttatttcctcatggtgaagaagagttagagggaattgctaatagaactgattttgatttaggttctcatacaaaaaatcaaaaagattttgaaattaaatcagaggtaatgcaaaattcttcctctacaactaagctggcggtacaagatttagaagaaaaaaaatggtatattccttttgtaattgaaccatctgcaggtgttgatagtgggattctagctttacttaatgaggcatataaagaagaaagcactgatagtgaaaataagagaactttactgtcacttaaaccacatctttcacctattaaagctgctgttatccctcttaaaaaaaataatgaagagatagttaatttatctaagcaaattaagtcaaatctccaaaaattaggattaggaagggttgttttagaaaattcaggaaatattggtaaaaactatagaagacatgatgaaattggaacgcctatttgtttaacagtggattttgaaactctagaagacaaaagtgtaactgtaagagatagagattcaatgaaacaagagagagtttcaattgaaagtttagccgattattacaaaagttattttaaataa

SEQ ID NO: 298844 - DNA, 883 bp, Unknown
  Bacterial polypeptide expressing nucleotide sequence isolated from the Sargasso Sea
aatgccaaaaaaaactaaaaagaaaaatacaatcttgtcatttcaaaatttgatttttaatttacaaaaattttgggataaacaaggatgcattattttacaaccttacgatttagaagttggggctggtacttttcatcctgcaactactttgcgatcactgggaccaaaaccttggaaagcagcttacgttcaaccatcaagaagacctacagatggaagatatggaaaaaatccaaaccgactacaacactattatcagtttcaggttataataaaaccatctccaaaagatattaaacaactatatttaaaaagtcttatgactattggtatagactctaaagagcacgatataagatttgttgaagatgattgggagagtccaactttaggagccgcaggtttaggttgggaagtatggtgtgatggaatggaaattacgcaatttacttattttcaaaagatgacaggaatagaatgcaaaccaatatcggtggagctaacatatggcttagagagaatttgcatgtttgtacaagaaaagaaaaatgtatttgatattgattggaatgataatggagtaaaatatggagatgtttatcttcagtcagaaaaagaattctccacgtataattttgaccaagcaaacaccgactctctactcaaaaattttgaaatcgcagaacaagaatgtaaaaatcttctagaacaaaaacttcccttgccagcttacgatcaatgtttaaaagctagtcatatttttaatttattagatgcaagaggtgtaattgcagttgcagagagaactggttatataaatagaattcgagaattagcaaaaggagccggatcaggttggttagaaaatcaacaaagataa

SEQ ID NO: 298845 - DNA, 941 bp, Unknown
  Bacterial polypeptide expressing nucleotide sequence isolated from the Sargasso Sea
gaaaatgggtccagaacttttaagaattaaagataggcatgagagagatttttgtctgggccctactcacgaagaagttataacagacataattagagataatgtaaaaagctataaagaacttccacttaatatttatcaaattcaaactaagtttagagatgaagttagacccagatatggaattatgaggggaagagaatttctgatgaaagattcatatagcttcaatattgatgaagaatctcttcaagaaacttacctactaatgagggatgcctataaaaaagtacttgaaagaattggacttgaatataaaatttctgctgctgattctggagcaattggtggagacagttctgaagaatttcatgtcttagctgaaaatggagaagatactattgctgttagtgactcatctgaatttgcaataaatacagaactcctcttgaaagaaggtgaagatataaattcacttgatggaaaaccttctccagacggaaatggaacaatacaaattaagaaaggtattgaggttggtcatatttttaaacttggtaagctttacgccgaatcaatgaaagctaatgttttaaatgctgaaggtaaagcttcaacattgtatatgggttgttatggtattggtgtatctaggctggttgcagccgctatagaacagaattttgacgataaaggaattgtctggcctcatagcattgctccatttgatattaatattattgcgataggttttgataaagatcgaaatattgccactgcatcaatgaaattatatgatgaactgaaaaatatgggttatgacgttcttcttgatgacagaaaagacggttatggtgtaaaaatgaaggactcggaacttataggcattcctttaaatataattattggtaaaaaatttcttgaaaatcatgaagtttgaa

SEQ ID NO: 298846 - DNA, 904 bp, Unknown
  Bacterial polypeptide expressing nucleotide sequence isolated from the Sargasso Sea
tattcaatggaagtttagagatgaaatcagaccacgttttggtttgttaagaggtagagaattcttaatgaaggatgcttattcatttgatttggataaagagtctgcaaaaatatcatattttaaaatgttcacttcatatatgagaactttcaaaagattaggtttaaatgcaataccggtaattgctgacagtggtcctataggcggtgaattaagtcacgagttttccattattacgaataccggtgaaacagagatttattatgatagcagaatacttgaaatagaagactatgattttgattattcaaaaaaagactccttagaaaactcttataataaattcacaaacttttattcttcaacagatgataagcattctgaagatttgttccaaaaaataccggaggaatttcaaaataagggtaaggcaattgaaattggtcatattttttcttttggctacaaatattcagaacctatgaacgcatttgttaataatgacaaaggtgaaaatattcctgtctatatgggttcttacggaattggtgtatccagattagtatcagctattattgaagcctaccatgacgatagaggaatattatggccaatctctgtagcgccttttcaagttggtataattaatttaggtaagaatgatgagaagtgtaaaaaagtctcagagaatatttatcaacaattaagaagcaataatatagatgttatttatgacgacagggacgaaagtgcagggagaaaatacgctgatatggatttaattggaattccatatcaaattattttaggcccaagggacttagaaagtaataaatgtgaattaaaaaatagattgaacgaccaaagagtgagtatcgatttagataatatcattaaagaa

SEQ ID NO: 298847 - DNA, 997 bp, Unknown
  Bacterial polypeptide expressing nucleotide sequence isolated from the Sargasso Sea
gatgcccttcggtttaaaagttttaagaaagatcgagcaaaccgtcagagaggaaatggataactcaggtgcttttgaggtcctaatgccaaccatacaaccttcagagttatggcaagaaactaagaggtgggatgattatggtgatctgcttttacagattcgcgatcgtcatgaacgtctgttttgctatggtcccacgcatgaagaggtcatcactgatattctcagaaaaagtgtaaaaagctataaacagctgcctgtaaacttctatcagattcaaacaaaattcagagatgagattcgacctcgatttggtgttatgagggcgcgtgaatttctaatgaaagatgcttattcgtttcatttgaatcaagattctcttgaagaagaatatgaaaaaatggaccaaacgtatgaaaagattttcacaaaactggagcttgattttaggaaagttcaggccaccagtggggaaattggtggttcagtttctcatgagtttcatgtaattgcagaatctggcgaagatgaaatcgcattttgtgatgatgagaactttgctgcaaatgttgagatgttggagagtggaaatgcgcccaatggtggagaattaacatatgcgagaggcattgaagtgggccatatttttcaactgggtgataaatacagtaaagcgatgaaacttgaagtattggactctaatggaaaaaacgtcaatccatatatgggttgttatggggttggtatctcgaggattgtagcagctgccatagagcaaaaccatgatgataaaggaatcatatggccaagtgccatctcacctttcgagatattgattattgttctcaatgacaaagatgactcaaatgtaatggatcaagcaatgaaaatttaccaagaactcagatcagatggcatagaggttgcgatagatgatcgagatgaaagagctggggtcaaatttgcagatgcagacttattgggcgtgcccact

SEQ ID NO: 298848 - DNA, 528 bp, Unknown
  Bacterial polypeptide expressing nucleotide sequence isolated from the Sargasso Sea
aatgcacttatcaaaattttttttaccaactctgaaagatttaccttccgatgctaagataaaatctcatcaagttatgcttaaaacaggtatgataaaacaagcagctgctggaatttattcatggcttccacttggctataaggtaatgaaaaaaatagaaaatatagtaagagaggaacaaaattttattggagctcaagaaatgcttatgccaactattcaatctgcagaaatttggaaggaaagtggaaggtatgatgattacggagaggaaatgcttcgtattaaagatcgtcaaaatagagaaatgttatacggtcccacaaatgaagagcttataactgaaatattcagggcaagcataaaatcatacaaatcacttcctcaaattttatatcacatacaatggaaattcagagacgaaattagaccaagatttggtgtaatgagatgtagagaattttatatgaaagatgcatattcttttgacattaatgagagtaatgcaaaaatttcctataataa

SEQ ID NO: 298849 - DNA, 493 bp, Unknown
  Bacterial polypeptide expressing nucleotide sequence isolated from the Sargasso Sea
catgtatatttcaaaatcatttataccaattcttaaaaatataccctcagaagctaaaataaagtcacatcaattaatgttaagagttggaatgataaaacaatcttcagcaggtatttattcttggctgccactaggatttaaaataatgaaaaaaattgaaaaaattgtcagagaagaacaagataaaattggcgctcaagaaattttaatgccaacaatccaatcaagtgaaatttggaaagagagcggacgatacgaggattatggagaagagatgttaagaattaaagatcgtcaaaatcgtgagatgttatatggccctaccaatgaagaacttgtgactgatatcttcagatcagctattaaatcatataaatctcttcctcaacttttatatcatatacaatggaaatttagagatgagataagaccaagatttggaataatgagatgtagagaattttatatgaaagatgcttactcttttgat

SEQ ID NO: 298850 - DNA, 591 bp, Unknown
  Bacterial polypeptide expressing nucleotide sequence isolated from the Sargasso Sea
aatgtttttatctaaattgtttttaccaattacaaaaaatcttccagctgatgcaaaaatcaaatcacatcaattgatgctgagatctggtatgattaaacaatcatcagcaggtatttattcttggttacctttaggcttaaaggtaatgaaaaaaattgaacaagtagtaagagaggagcaaaacaaaataggtgcacaagagctacttatgccaactattcaatcggctgaaatttggaaagaaagtggaagatacaatgactacggtgaagaaatgttaagaattaaagatagacagggaagggaaatgttatatgggccgactaatgaggagttgataacagacatatttagatcatctatcaagtcttataaatctttgccacaaatgctttatcatatccaatggaagtttagagatgagataagaccaagattcggagtaatgagatgcagagaattttttatgaaggatgcatattcctttgatctagatgatgctagcgctaagtcttcatacaacaaaatgtttttttcatatctaaaaacttttaaaagattaggtttagaggctattccaatggcagc

SEQ ID NO: 298851 - DNA, 618 bp, Unknown
  Bacterial polypeptide expressing nucleotide sequence isolated from the Sargasso Sea
aatgtatctatcaaaactttttatacctgtaacaaaagatcttccaactgaagcaaaaataaaatcccatcaattaatgttaagaactggaatgattaagcaatcctctgcaggaatttattcatggctaccactaggatttaaagtaatgaaaaaaattgaacaaattgttagagaagaacaaaatctgattggagctcaagaaatgctcatgcctactattcaatcctccgatatatggaaagaaagtggaagatatgaggattacggggaggaaatgcttagaattaaagatagacaaggtcgcgaaatgttatatggacctactaatgaagagttgattactgatatatttagaactagcattaaatcttataaatctcttccgcaaattctttaccatatacaatggaaatttagagatgaaataagaccaagatttggagttatgcgatgtagagaattttatatgaaagatgcatactcttttgatttaagcgaggaagatgctagaaaatcttacaataagatcttttattcttatataagaacttttaatcgactaggtttaaaagctataccaatggcagcagatactggccccattggaggtgattt

SEQ ID NO: 298852 - DNA, 802 bp, Unknown
  Bacterial polypeptide expressing nucleotide sequence isolated from the Sargasso Sea
tctattaactcctataagcaattacctcaatgtttttaccaaattcagacaaaattcagagatgaaataaggccaaggtttggattaatgagaagtagagaatttataatgaaagatggttattctttccattcttcaggaaaagatttagcttcattttatgaaaaggtgggcaatgcttatgaaaatatttttaaatcttgtggactccaaacagtaggggttgaagcagatagtggagccattggcggtgcctcctccaaagaatatatggtcactgcagattccggggaagattcaatcttgtttactcaaagcggttcttatgctgcgaatattgaaaaagctatttcaataccctctaaacctattccattaggagatgatatttcagggtggatagaaacacctcaacaaaaaacaatcctcgaagtttgtaaaaataataatttagaccctagtcagattattaaagtcgtagtattccttgcaaagttcgaaggtaaatcggaggttccagttcttgcatgcataagaggggatcaacatattaatgaagtaaagctttttaacttaataaataaacttcatagttccaaccttcttaatcttcagaaaattgaagacacaaacattatcgaaaaaaacctagttaattttcctttaggttttattgggccagacttagataatgaaactattaaagcgagttctaattggaataaaacttggactaaaataattgatcattccgcaagtagactctcaaagtttataagtggtggaaataaagttaattttc

SEQ ID NO: 298853 - DNA, 706 bp, Unknown
  Bacterial polypeptide expressing nucleotide sequence isolated from the Sargasso Sea
atgaaactctcaaatcttttatttaactcattaaaagagtcaccaaaagaagctaaaattatttcccatcaattaatgttgcgttcatcgatgattaggcagcacacctctggtatatacacatggttaccattaggttttaaagtcctaaaaaatattgagaatattattcgatataatcaagacgaaataggttgtaatgaaatgttaatgtccactattcaatcctcagaattatggaaaaaaagtggcagatatgcagactatggaaaagagatgttaagaattactgacagacatgataacgatttattgtacggcccaacgaatgaagaggttattacagatttattttcagattatgtaaattcttataaaggtcttccaaaatatttgtaccatattcaatggaaatttagagatgaaattagacctcggtttggcgtcatgcgaggtagagaattcttaatgaaagatgcttatagttttgacttaactgaagaagctgcttttgaaacttataaaaaattttttagaagttatttaaaaacttttctagatttaggattacaaccgattcctgtaaaagctgcgacgggggctattggtggagatttatctcatgagtttcaaatattagctaatactggtgaaagcgaacttgcttacgattctaaattagttgactctaatttatacgaaaaaa

SEQ ID NO: 298854 - DNA, 586 bp, Unknown
  Bacterial polypeptide expressing nucleotide sequence isolated from the Sargasso Sea
ccccaacttcatcctgcagatttatggaaaaaaagtgaaaggtgggaaggatataccgcaggggaaggaataatgtttaatctcaaagatagacaaggtaaagaatttggtttagctccaactcacgaagaggtgatcacgagtattgcatcagagaccatcaactcctataagcaattacctcaatgtttttatcaaattcagacaaaatttagagatgaaataaggccaaggtttggattaatgagaagtagagaattcataatgaaagatggttattcttttcattcttcagaaaacgatctagcttctttctatgaaaaggtgggcaatgcttatgaaaatatttttaaatcttgtggactacagacagtaggggttgaagctgatagtggagcaataggtggttcctcctctaaagaatttatggtcactgccgatgctggggaagattccattttgtttactcaaagtggttcttatgctgcaaatattgaaaaagctgtttctttaccctctcaacctattccactaaaagataacattgcagaaaggttggaaacacctcaacaaaaaacaatcctag

SEQ ID NO: 298855 - DNA, 835 bp, Unknown
  Bacterial polypeptide expressing nucleotide sequence isolated from the Sargasso Sea
aaagtaatgaaaaaaattgagaggatagtaagacaggaacaaaataaaattggtgcgcaagaaatcttaatgcccacaattcaatcaagcgaaatttggcaagaaagtggtaggtatgaagattatggtgaggaaatgcttagaattaaagatcgtcaaaatcgtgaaatgctttatggaccaactaatgaagagcaggtaacagaaatttttagatcttctttaaaatcgtataaatcacttccacaacttctttatcatattcagtggaaatttagagacgaaattagaccaaggtttggaattatgaggggtagagaattttatatgaaagatgcttattcatttgatgtttccgatgaagaagcattttattcttataataaattttttttatcttatttaagaacttttaaaagattagatttaactgcaattccaatggctgcagacactggtccaattggtggaaatttatctcatgaatttattatattagctgacactggtgaaagtaaaatttttactgacaaaagaatttttgacttaaatagtaatgagacaaaattagaaaaaaattctttacaacaaatgagaaaaaaatatgagcagtattattcagtaactgatgaaaaattcaataaggaggagtttgaaaaagttgtatctgaagaaaatagattgatcacaaaaggtattgaagtaggacacattttttattttggtgataaatattcaaaagcaatgggtgcttcagttgatttgcctggtggcaagaaagactttgttaaaatgggctcatatggaattggtgtatccaggttagttggtgcta

SEQ ID NO: 298856 - DNA, 545 bp, Unknown
  Bacterial polypeptide expressing nucleotide sequence isolated from the Sargasso Sea
gatgcttttatcaaattcatttataccaatattaaaaaataatccttcagaagcaaaaattaaatctcatcaattgatgttgagagtaggtatgattaagcaagcctctgcaggaatttattcatggttacctttaggttttaaggtaatgaaaaaaattgaagacattgtcagacaagaacaaaacaaaattggagctcaagaaatattaatgccaacaattcaatccagcgaaatttggaaagaaagtggtcgttatgacgattatggtgaagagatgttaagaataaccgaccgtcaaaatagagaaatgttatatggaccaaccaatgaagagcaagttactgaaatttttagatcttcaataaaatcttataaatcactcccacaacttatgtatcatattcaatggaagttcagagatgaaattagacctagatttggaattatgcgtggtagagagttttatatgaaagatgcctattcatttgatgtatcagatgaggaagctttttattcttataataaattttttctttcttatt

SEQ ID NO: 298857 - DNA, 823 bp, Unknown
  Bacterial polypeptide expressing nucleotide sequence isolated from the Sargasso Sea
atgcgcgtgacaacctcatttcctctggggacacttcgtgacacaccttctgaagctgagattatttcacatcaattacttttaaaagctgggtatattcgcagagttaacagcggtatttatgcatacatgccaataatgcttagagttattgaaaaaatatccgcaataattgaaagagaacttaatagtattggttgtacaaaattactattacctcaacttcatcctgcagatttatggagaaaaagtgaaaggtgggaaggatatactgcaggtgaaggaataatgtttaatctaaaagatagacaaggtaaagaatttggtttagctccaactcacgaagaagttatcacgagtattgcatcagagaccatcaactcctataagcaattaccacaatgtttttatcaaattcaaacaaaatttagagatgaaataaggccaaggtttggattgatgagaagtagagaatttattatgaaagatggttattcttttcactcttcagaaaacgatctagcttctttctatgaaaagatgggcaatgcttatgaaaatatttttaaattttgtggactgcagacagtaggggttgaagctgatagtggagcaattggcggggcctcatctaaagaatttatggtcactgctgatgctggagaagattccattttgtttactcaaagtggttcttatgctgccaatattgaaaaagctgtttctctcccctctcagcctattccacttagagataatattgcagagtggttagaaacacctcatcaaaaaacaatcctggatattgcgataataataatta

SEQ ID NO: 298858 - DNA, 580 bp, Unknown
  Bacterial polypeptide expressing nucleotide sequence isolated from the Sargasso Sea
gatgtatatttcaaaatcttttattcctattcttaaaaataatccctccgaggctaaaataaaatctcaccaactaatgttaagagtaggaatgataaaacaatcatcagcagggatatattcttggttacctcttggttttaaagtaatgaaaaaaatagaaaaagttgtaagagaggaacaaaataaaattggtgctcaagaaattttgatgccaacaattcaatcaagtgaaatatggaaagaaagtggaagatatgaggattatggagaagaaatgttaagaattaaggatcgtcaaaatcgggaaatgttatacgggccgactaatgaggaacttgttactgatatatttagatcttcatttaaatcttataaatctttacctcaacttttgtatcatattcaatggaaatttagagatgagattagaccaagatttggaataatgaggtgcagagaattttatatgaaagatgcatattcatttgatatctctgatgaagatgcattattttcatataataagttttttttatcttatttaaaaacatttaaaagattagatttaactgcaata

SEQ ID NO: 298859 - DNA, 384 bp, Unknown
  Bacterial polypeptide expressing nucleotide sequence isolated from the Sargasso Sea
agaaatttttaggtcatctgtaaaatcttataaatctcttcctcaacttttataccacatacaatggaaatttagagatgaaataagacccagatttggaattatgagatgtagagaattttatatgaaggatgcttattcatttgatatttctgatgaagatgcttttttttcttacaataaattttttctatcttatttacgaacatttaaaagattagatttaacagcaattcctatggcagcagacacaggtcctataggaggaaacctttctcatgaatttattattcttgcagaaactggtgagagcaaaatttttactgataaaagaatttttgatgtaaatagcgaaggaacaaaattagaaaaaaaatctttaga

SEQ ID NO: 298860 - DNA, 709 bp, Unknown
  Bacterial polypeptide expressing nucleotide sequence isolated from the Sargasso Sea
aatgaaactctcaaatcttttatttaactcattaaaagagtcaccaaaagaagctaaaattatttcccatcaattaatgttgcgttcatcgatgattaggcagcacacctctggtatatacacatggttaccattaggttttaaagtcctaaaaaatattgagaatattattcgaactaatcaagacgaaataggttgtaatgaaatgttaatgtctactattcaatcttcagaattatggaaaaaaagtggtagatatgcagactatggaaaagaaatgttaagaattactgacagacatgataacgatttattatatggaccaactaatgaagaggtaattacagatttattttctgattatgtaaattcttataaaggccttccaaaatatctctaccatattcaatggaaatttagagatgaaattagacctcgttttggcgtaatgcgaggtagagaattcttaatgaaagatgcctatagttttgacttaaccgaagaagctgcttttgaaacttataaaaatttttttagatgttatttaaaaacctttctagatctaggattacaaccgattcctgtaaaggctgcaacgggtgccattggtggagatttatctcatgagtttcaaatattagctaatactggtgaaagcgaacttgcttatgattctaaattagttgactccaatttatacgaaaaaagt

SEQ ID NO: 298861 - DNA, 839 bp, Unknown
  Bacterial polypeptide expressing nucleotide sequence isolated from the Sargasso Sea
taatccttcagaagcaaaaattaaatctcatcaattgatgttgagagtaggcatgattaaacaagcctcagcaggaatttattcatggttacctttaggttttaaggtaatgaaaaaaattgaagacattgtcagacaagaacaaaacaaaattggagctcaagaaatattaatgccaacaattcaatctagcgaaatttggaaagaaagcggtcgttatgacgattatggtgaagaaatgttaagaattactgaccgtcaaaatagagaaatgttatatggaccaaccaatgaagagcaagttactgaaatttttagatcttcaataaaatcttataaatcactcccacaacttatgtatcatattcaatggaagttcagagatgaaattagacctagatttggaattatgcgtggtagagagttttatatgaaagatgcctattcatttgatgtatcagatgaacaagctttttattcttataataaattctttctttcatacttgagaactttcaaaagattatctttgacagcaatacctatggctgctgacacaggacctatcggtggaaacttatctcatgaatttattattcttgctgatactggagaaagtaaaattttcacagataaaagaatattcgatcttgatagtgatgatactgaaatagaaaaagtatcattagaaagtatgagaaaaaaatatgaacagttttatgctgtaactgatgaaaagtttaataaagaagaatttgaaaaaattgtttctaaggaaaatcaattgattacaaaaggaatcgaagtaggtcatatattttattttggtgacaagtatt

SEQ ID NO: 298862 - DNA, 810 bp, Unknown
  Bacterial polypeptide expressing nucleotide sequence isolated from the Sargasso Sea
cttcatcctgcagatttatgggagaaaaagtgaaaggtgggaaggatatactgcaggggaaggaataatgtttaatctcaaagatagacaaggtaaagaatttggtttagctccaactcacgaagaggtaatcacaagtattgcatcagagaccatcaactcctataagcaattacctcaatgtttttatcaaattcagacaaaatttagagatgaaataaggccaaggtttggattgatgagaagtagagaatttataatgaaagatggttattcttttcattcttcagaaaacgatctggcttctttctatgaaaaggttggcaatgcttatgaaaatatttttaaatcttgtggtctgcagacagtagaggttgaagctgatagtggagcaattggcggtgcctcctctaaagaatttatggtcactgctgatgctggggaagattccattctgtttactcaaagtggttcttatgctgcaaatattgaaaaagctgtttctctaccctctcaacctattccactaaaagatgatattgcagagtggttggagacacctcaacaaaaaacaatcctagagctttgcaataataataatttagaccctagtcagattattaaagtagtaatattccttgctcagtttgaaggtaaatttgaggtcccaattcttgcatgcataagaggcgatcaacacattaatgaagtaaagctttttaatttaatcaataaacttcatcatttcaatctccttaatctcaaaaagattgaagacaaaaataatatcgaaaaaaatctaattgattt

SEQ ID NO: 298863 - DNA, 820 bp, Unknown
  Bacterial polypeptide expressing nucleotide sequence isolated from the Sargasso Sea
atacaatggaaatttagagatgaaattagacctagatttgggattatgagatgtagagaattttatatgaaagatgcttattcattcgatattaatgatgatgaagctttattttcatataacaagttttttttatcttatttgaaaacttttaaaagattagatttaacagctattccaatggctgcagatacaggccctatcggaggaaatctatctcatgaatttattatacttgctgagactggtgaaagtaaaatttttactgataaaagaatttttgatttagatagtgatggaacaaatttagaaaaaaaatcacttgaaagtttaaggaaaaaatatgaaaaattctattctgttactgatgaaaaatttgataaagaagaatttgaaaaaaatgtttcagagtcaaatcgtctgaaaacaaaaggtattgaggtaggtcatattttttattttggcgataaatattctaaagcgatgggcgcttcagttgatttacctggaggaaaaaaggattttgttaaaatgggctcatatggaataggggtatctcgtcttgttggggcaattatagaagctaaatatgatgaaaaaaatgaagtcatgaaatggccaatatctgttgcaccatatgatatttcaataattcctatgattaataaaaatgacacctctattttagaaaaagcaaataagattaattttgagttagaaaaaaataatatagaaacaataattgatgatactgatgaaaatttttcttctaaaataaaaaaaatgaatttaattggggctccaatatcaaataaataat

SEQ ID NO: 298864 - DNA, 850 bp, Unknown
  Bacterial polypeptide expressing nucleotide sequence isolated from the Sargasso Sea
agaagcaaaaattaaatctcatcaattgatgttgagagtaggcatgattaaacaagcctctgcaggaatttattcatggttacctttaggttttaaggtaatgaaaaaaatagaagatattgtcagacaagaacaaaacaaaattggagctcaagaaatattaatgccaacaattcaatccagtgaaatttggaaagaaagtggtcgttatgacgattatggagaagagatgttaagaataaccgatcgtcaaaatagagaaatgttatatggaccaaccaatgaagagcaagttactgaaatttttagatcttcaataaaatcttataagtcactcccacaacttatgtaccatattcaatggaagttcagagatgaaattagacctagatttggaattatgcgtggtagagagttttatatgaaagatgcttattcatttgatgtatcagatgaagaagctttttattcttataataaattctttctttcttatttaagaacatttaaaagattaactttaacagcaatacccatggctgctgatacagggcctataggtggaaatctatctcatgaatttattattctagctgatactggagaaagtaaaattttcacagataaaagaatattcgatcttgatagtgatgatactaaaatagaaaaagtatcattggaaagtatgagaaaaaaatatgaacagttttatgctgtaactgatgaaaagtttaataaagaagagtttgaaaaaattgtttccaaagaaaatcaattgattaccaaaggtatcgaagtaggtcatatattttattttggtgacaagtattcaaaacccaatgggtgcatc

SEQ ID NO: 298865 - DNA, 1000 bp, Unknown
  Bacterial polypeptide expressing nucleotide sequence isolated from the Sargasso Sea
tatgcgagctcgtgaattcctaatgaaagatgcttattcattccatctagatcaagactctttggaacagggatacaatttaatgcatgagacttattcaaaagcttttgaaaaaatgggtctagagtttagagtcgttgatgcggacagtggtgaaatcgggggaaatcgatcgcaagaatttcatgtgatagcagattctggagaggatgctatcgcctactgtgacgaagaaaattatgctgcaaatatagagctcactccaacattaaagagtcaagcaaaaacagtaaaatcaaaaaaaagaaaagaaaagaaacataccccaaataccaaagatattgcttcattatgtaagctattaaaggtagagccgaaagacacagtaaaaactctattacttaagggagaaaaaaagccattggcggttgttttaagaggagatcatcaacttaatattattaaagcagcaaaaatttctggtatatcattacctgttacgatggcagatgaaaaagaaataaaaaaatcaacaggctatgattttggttatatcggaccgatcgaccttggactagaaatatattttgaccatgctgttgccgaaatgcctagtttaatatgtggcgccaatgaaaaagattatcattttgttgatgcaaatttttctgatgaccttggaaatccagatacaattgaccttagaaatgctgaagtaggagatccatcgccaaatggaaaagggaaactaagtattgcaagaggaattgaggtgggacacatctttcaacttggaacaaagtatagccaggctctaaaagcaactgttcaagatggttcaggcaaggatgtacctttatccatgggttgctatggtattggaatttcgagaattgtggctgcagcaattgaacagaatcacgatgaaagcggaataatttggccagaaaatattgcgccatttaaagtaataatcattccaataaatatacataaatca

SEQ ID NO: 298866 - DNA, 838 bp, Unknown
  Bacterial polypeptide expressing nucleotide sequence isolated from the Sargasso Sea
atgcttttatcaaattcatttataccaatattaaaaaataatccttcagaagcaaaaataaaatctcatcaattgatgttgagagtaggcatgattaagcaagcctccgcaggaatttattcatggttacctttaggttttaaggtaatgaaaaaaatagaagacattgtcagacaagaacaaaacaaaattggagctcaagaaatattaatgccaacaattcaatccagcgaaatttggaaagaaagtggtcgttatgatgattatggagaagagatgttaagaataaccgaccgtcaaaatagagaaatgttatatggaccaactaatgaggagcaagttactgaaatttttagatcttcaataaaatcttataaatcactaccacaacttatgtatcatattcaatggaagttcagagatgaaattagacctagatttggaattatgcgtggtagagagttttatatgaaagatgcctattcatttgatgtatcagatgaagaagctttttattcttataataaattctttctttcatatttgagaacttttaaaagattatctttgacagcaatacctatggctgctgacacaggacctatcggtggaaatttatctcatgaatttattattcttgcagatacaggtgaaagtaaaattttcactgataaaagaatatttgatcttgatagtgatgatactcaactggaaaaaacatcattggaaagtatgagaaaaaaatatgagcagttttatgctgtaactgatgaaaaatttaataaaaaagagtttgaaaaaattgtttctaaggaaaatcaattgattacaaaaaggt

SEQ ID NO: 298867 - DNA, 605 bp, Unknown
  Bacterial polypeptide expressing nucleotide sequence isolated from the Sargasso Sea
gatgcttttatcaaattcatttataccaatattaaaaaataatccttcagaagcaaaaattaaatctcatcaattgatgttgagagtaggcatgattaaacaagcctctgcaggaatttattcatggttacctttaggttttaaggtaatgaaaaaaatagaagacatcgtcagacaagaacaaaacaaaattggagctcaagaaatattaatgccaacaattcaatccagcgaaatttggaaagaaagtggtcgttatgacgattatggtgaagagatgttaagaataactgaccgtcaaaatagagaaatgttatatggaccaaccaatgaggagcaagttactgaaatttttagatcttcaataaaatcttataaatcactcccacaacttatgtatcatattcaatggaagttcagagatgaaattagacctagatttggaattatgcgtggtagagagttttatatgaaagatgcctattcatttgatgtatcagatggagaagctttttattcttataataaattctttctttcatatttgagaacttttaaaagattatctttgacagcaatacctatggctgctgacacaggaccta

SEQ ID NO: 298868 - DNA, 783 bp, Unknown
  Bacterial polypeptide expressing nucleotide sequence isolated from the Sargasso Sea
aatgtatttatcaaaactttttatacctatcacaaaagatcttcctactgaggcaaaagtaaaatctcatcaattaatgttgagagctgggatgatcaaacaatcctctgctggaatttattcgtggttacctttaggctataaagtaatgaaaaaaatcgaacaaattgttagagaagaacaaaattcaatcggagcgcaagaaatgcttatgcccacaattcaatcttcagaaatatggaaagaaagtggaagatatgaagattacggagaagaaatgcttagaattaaagatcgtcaaggtcgagaaatgttatatgggcccactaatgaagaattagtaacagatatatttcgatcaagtgttaagtcttacaaatctctaccccaaattctttatcacatacaatggaaatttagagatgaaataagacctaggtttggagtaatgcgatgtcgtgaattttatatgaaagatgcttactcatttgatttaaccgatgaggatgcaaaaaattcatataataaaatgttttattcgtacattagaacttttaaacgactgggcttaaaagcaataccaatggcagcagatactggaccaataggaggagatttgtctcatgaatttgtaattttagcagaaacgggagaaagtcaaatttatgccgataaaaagatatttgatattgatctaaataaatataatttttctgaaaaatctttacaaaaaatgagagatgatttctcttcaatttatgctgtaacagatgacaagtttaa

SEQ ID NO: 298869 - DNA, 979 bp, Unknown
  Bacterial polypeptide expressing nucleotide sequence isolated from the Sargasso Sea
actaatgaggaacttgtgactgatatatttagatcatcaattaaatcttataagtctttacctcaacttttgtaccatattcaatggaagtttagagatgaaattagaccaaggtttggaataatgagatgtagagaattttatatgaaagacgcatattcattcgatataaatgatgaagaagctctgttttcatataataaattttttttatcttacttaaaaacttttaaaagattggatttaactgcaatccctatggcagcagatacaggaccaataggtggaaatctttctcatgaatttattattttagcagaaactggtgaaagtaaaatttttactgataagagaatttttgatttaaataataatgattcaaaattagaaaaaaaatctttggaggatttgagaaaaaaatatgaaaaattttattccgtaacagatgaaaaatttaataaagaggaatttgagaaaaaagttttagaggaaaatcgtttaataactaaaggaattgaagtggggcatatattttattttggtgataaatattctaaatcaatggaagcatcagttgatttgccaggaggaaaaaaagattttgtaaaaatgggctcatatggaattggtgtttcaagattagttggtgccataattgaggcaaaatatgatgaaaaaaatgaaattatgaaatggccaatttcagttgcaccatacgatatagcaataattccaatgataaataaaaatgatatctcggcattagagagagcaaataatatatatttagaacttaataaaaataatattgactcaattattgatgatacagatgaaaatttttcttcaaaaataaaaaaaatgaatttaattggagtaccatatcaaattattataggcaaacagtcagaaggtgatctggttgaatttaaagaagttggagaggaatctcaaaaacttaaattaaaagatattataa

SEQ ID NO: 298870 - DNA, 708 bp, Unknown
  Bacterial polypeptide expressing nucleotide sequence isolated from the Sargasso Sea
ttataaatctttaccgcaacttttataccatattcagtggaaattcagagatgagataagaccaagatttggaatcatgagatgtagagaattttatatgaaagatgcatattcatttgatgtatcagatgaggatgctcagttttcttataataaatttttcttatcttatctaaaaacttttaaaaagttagaccttacagctattccaatggcagctgatactggtccgataggtggcaatctttcacatgaatttattattcttgcagaaactggagaaagtaaaatttatactgataaaagaattttcgatttggactcccaaggcacaaaactggaaaaagaatctttaaatgaactaagagagaaatatgaaaagttttattcagtaacagatgataaatttaataaggaagagtttgaaaaaaaagtaagtaaagataatcagcttcaaacaaaaggtattgaagttggacacattttttattttggtgataaatactctaaacctatgggagcctcagtagatctaccaggcggaaaaaaagattttgtaaaaatgggatcatatggaataggtgtttctagattagtaggtgcaattattgaagccaaatatgatgaaaaaaatgaggtcatgaaatggccaatatctgttgcaccatatgatatttcaataattcctatgattaataaaaatgataa

SEQ ID NO: 298871 - DNA, 885 bp, Unknown
  Bacterial polypeptide expressing nucleotide sequence isolated from the Sargasso Sea
ctctgcaggaatttattcatggttacctttaggttttaaggtaatgaaaaaaattgaagacattgtcagacaagaacaaaacaaaattggagctcaagaaatattaatgccaacaattcaatccagcgaaatttggaaagaaagtggtcgttatgacgattatggtgaagagatgttaagaataaccgaccgtcaaaatagagaaatgttatatggaccaaccaatgaagagcaagttactgaaatttttagatcttcaataaaatcttataaatcactcccacaacttatgtatcatatccaatggaagttcagagatgaaattagacctagatttggaattatgcgcggcagagagttttatatgaaagatgcctattcatttgatgtatcagatgaagaagctttttattcttataataaattctttctttcttatttaagaacatttaaaagattgtctttgacagcaatacccatggctgctgatacaggacctataggtggaaacttatctcatgaatttattattcttgctgatactggagaaagtaagattttcacagataaaagaatattcgatcttgatagtgatgatactgaaatagaaaaagtatcattggaaaatatgagaaaaaaatacgaaaaattttatgctgttactgatgaaaagtttaataaagaagagtttgaaaaaattgtttctaaggaaaatcaattgattacaaaaggtatcgaagtaggtcatatattttattttggtgacaagtattcaaaaccaatgggagcatctgttgatttaccaggtggaaaaaaagattttgtaaaaatgggttcttatggaattggtgtatcaaggttagtaggggctataattgaagctaa

SEQ ID NO: 298872 - DNA, 748 bp, Unknown
  Bacterial polypeptide expressing nucleotide sequence isolated from the Sargasso Sea
aatgcaaacaaaactaagagacgaaccaaggcctagaggtggtttgctaagagtaagagaatttatcatgaaagacgcttacagctttgacttagacaaggaaggcctagatgaaagttatgaaaaacaagctcaagcgtataaaaatatatacgacaaatgtggcctagaggtaatacaaatcgaagctgacagcggagcaattggagggaaagattcacatgaatttgtagctttgtcagaggcaggagaagataaagtagtattatgtaacaactgcaattattctgctaattcagaaaaagctattttttcaaaaaatgaatatcccttagaaaacaaattaaaaaaagaagaaatatctacacctggagtaaaaacaatttcagaattatgcaaattcacaggtgtaaaaccttataagactataaaagctatgttttataattcaaaaaataaattgatttgtgtggttataagaggagatttggaagttaacgaattaaaattagcaagaatagcaggagatccagatattaaaccagctaacaataagttattagaagaacataatattccatcaggctcagcatcgcctatcggaaaagaattatttgttatagcagacgattcaattactaaatcaaataattatattgctggggcaaacaagcacggatatcatgttaaaaatataaatattgacgaagatttttcagccaacattattcaggatattgctcagata

SEQ ID NO: 298873 - DNA, 838 bp, Unknown
  Bacterial polypeptide expressing nucleotide sequence isolated from the Sargasso Sea
agagatgagataagaccaagatatggagtaatgaggagtcgagaattcttaatgaaagattcttatagctttcatatttctgaagcaagcttggaagaaacatacctaataatgagaaatgcctactcaaaaatctttgaaagagtaggtttagatttcaaaattgtaaaagcggactctggtgcaattggtggagataaatctgaggaatttcatgtccttgcaaaaaatggtgaagatactcttgcagtatctaataaatctgattatgcagtcaatgcagagcttttgcttgaagatggtcaagattcaaagtcactagtaggtcaaaaatcaccagatggaaatgggttgcttgaaattacaaaaggtattgaggtgggacacatattccaattgggaaggctctatagcgagaatatgaatgcgactgttttagatgattcaggtgcagctaaaaacatgtatatgggatgttatggaattggtatctcaaggattgttgccgctgcaatagagcaaaattttgatgataaaggaattatctggccagaatctatttctccctttgatttaaatataattacaattggagctgatagagacaaaaatattgaagcatcgtccagaaaactatatcaagacctgactcagaaagggtttgaagtaatattagatgatcgagatgatggttttggaaaaaagataaaagattctgagctaataggcgttcctttatcgatcgttttcggtaaaaattttacggataatgataaggttgaaataatctttagggatggtaaaaaaataacttcagcttttaatgaagtagaggaaa

SEQ ID NO: 298874 - DNA, 793 bp, Unknown
  Bacterial polypeptide expressing nucleotide sequence isolated from the Sargasso Sea
atgttttggtcaaattatttcattcctacacttaaagatactgcttctgaggatgctcaagttataagtaatagcctcatgcttaagtctggcatgataaggaaaaatgcctcaggaatttatacatggcttccacttggtttgagagtcttaaataaagttgaaaacattgtaagagaagaaatgaataatgcaggagcgcatgaagtgttaatgcctatggtgcaaccaaaagatttatggaatgaatcaaagagatgggacaaatttggtcctgaattgcttagatttaaagatcggcatgatagagatttttgcttaggtcctactcatgaagaagttataactgacctaattaaaaataatgtaaaaagttataaagagcttccattgaatatttatcaaatacaaactaaatttagagatgagataaggccaagatatggagtgatgaggagtcgagaattcttaatgaaagattcttatagctttcatctttctgaggcaagcttggaagagacataccaaataatgagaaacgcctattcaaaaatctttgaaagaataggtttagatttcaaaattgtaaaggcggactcgggcgcaattggtggagataaatctgaggaatttcatgtccttgcagaaaatggtgaagatactctagcagtatctgacaaatctgattatgcagtcaatgcagagcttttgcttgaagatggacaagactcaaaatcactagtaggtcaaaaatcaccagacggtaatggattgcttgaaattacaaaaggta

SEQ ID NO: 298875 - DNA, 824 bp, Unknown
  Bacterial polypeptide expressing nucleotide sequence isolated from the Sargasso Sea
aatacaatcggctgaactttggagagaatcaggccgatatgatgactacggattggaaatgctcagaataaaagatcgtcacgatagagatattttgtatggtcccacaaatgaggaaatgataacagacatatttagatctcatataaaatcttataggggtttgccattaaatttatatcatattcaatggaaattcagagatgaaataaggcccagatttggtgttatgagaggaagagaatttttgatgaaagatgcatattcttttgatttagatcaaaattcttcatttacatcatataataaaatgttcatttcttacttaaaaatttttaaaaaattgggtttgactgcattaccaatggaagcagatactgggcctattggtggtgacaaaagtcatgaatttattattttagctgatactggtgagtcaaaggttttttgtgatagaaaatggttaaatcttagtcttgatatagataatattaattacgaaaaagatttagaacaaaatgtgagtttatttacatccctttatgccgctaccgatgaaaaacatgatcctactaaaattgatccatcaaatttgattgagacaagaggtattgaagttggccatatttttcatttcggcacaaaatattctgagagtatgggcgcaaaagtagctcttccagatggaagcttatctcctgtatttatggggtcatatggtataggagtgagtagattagttggtgcaattattgagtcaagtcacgatgatgcaggaataatatggcctgaaacagttgctccatttgatttatgtattgtta

SEQ ID NO: 298876 - DNA, 931 bp, Unknown
  Bacterial polypeptide expressing nucleotide sequence isolated from the Sargasso Sea
gatgcttttatcaaattcgtttataccaatattaaaaaataatccctcagaggcaaaaattaaatctcatcaattgatgttgagggtaggtatgataaagcaagcttcagcaggaatttactcatggttacctttaggttttaaggtaatgaaaaaaatagaagatatagttagacaagaacaaaataaaattggtgctcaagaaattttaatgccgacaattcaatcaagcgaaatttggaaggaaagtggtcgttatgatgattatggagaggagatgctcagaataactgatcgtcaaaatagacaaatgttatatggaccaactaatgaggagcaagttacagaaatttttagatcttcaataaaatcttataaatcgttacctcaactcttatatcacattcaatggaaattcagagatgagattagacctagatttggaattatgcggggcagagaattttatatgaaggacgcttactcatttgatatatcagatgaagaagctttttattcttataataaattttttctttcatatttaagaacattcaagagattatctttaacagcaatacctatggctgctgacacaggacctattggtggaaatttatctcatgaatttattattttagcagatacaggtgaaagcaaaatttttactgataaaagaatatttgatctaaatagtgatgaaacgcaattagaaaaatcatctttagaaagtatgagaaaaaaatatgaacaattctatgctgtaactgacgaaaaatttaataaggaagaatttgaaaaaattgtttctaaggaaaaccaattgatcacaaaaggtatagaggtaggacatatattttattttggtgataagtattcaaaaccaatgaccacagcagttgacttaccagggggaaaaaggatttgtaaa

SEQ ID NO: 298877 - DNA, 940 bp, Unknown
  Bacterial polypeptide expressing nucleotide sequence isolated from the Sargasso Sea
acaaacaaaattgggtgcgcaagaaattttaatgcctacaattcaatcaagtgaaatttggaaagaaagtggtcgttatgaagattatggtgaggaaatgcttagaataaaggatcgtcaaaatcgtgagatgctttatggaccaactaatgaagaacaagtaacagaaatttttagatcttccctaaaatcgtataaatcccttccacaacttgtttatcatattcagtggaaatttagagacgaaattaggccaagatttggaataatgagaggtagagaattttatatgaaagatgcttactcttttgatgtttctgacgatgaagcattatattcttataataaattttatttatcagacttaagaacttttaagagattatctttgactgctattccaatggcagctgatacaggaccaattggaggaaatttatctcacgaatttattattttagctgacactggcgaaagtaaaatttttactgacaaaagaatttttgatttaaacagtaatgacacagaattagaaaaaaattccttacaaaaaatgagaaaaaaatatgaacaatattattctgtaactgatgaaaaatttaataagaaagattttgaaaaagttgtatctgaggaaaatagattgatcacaaagggtattgaagtaggacatattttttactttggtgataaatattcaaaagccatgggtgcttcagttgatcttccaggtggcaagaaggactttgtcaaaatgggctcttatggaataggtgtatctaggctcgttggcgccattatagaggccaaatatgatgataaaaacgaaatcatgaaatggccattgtctgttgctccttatgaaattgctttaataccaatgataaataaaaacgataaatcagctctagataaagcaaaaaatattaataaagaatta

SEQ ID NO: 298878 - DNA, 862 bp, Unknown
  Bacterial polypeptide expressing nucleotide sequence isolated from the Sargasso Sea
aatggaggaattaattacagaaatttttagatcaagtattaaatcttataaatccctcccacaaattctttatcacatacagtggaaatttagagacgaaattagaccaaggtttggagtgatgcgctgccgagaattttatatgaaagatgcttattcttttgatgctgatgaaacgtcagcaataaactcttataataaaatgttttattcttatatacgaactttcaacagactaggacttaaagcgatacctatggcagctgatacaggtccaataggaggagatctatctcatgaattcattataattgctgaaactggagaaagtaaaatttatgcagataaaaatatatttgaaattgacttaggtaaatataaatccgaccacgcatcattaaaaaaattaagagataatttctcaaattattacgctgcaacagatgaaaagtttgataaaaaaatatttgacgaaaaagtaaaaaaaagcaatcaagtaatcacaaaaggaatagaagttggtcatatattttattttggtgaaaaatactcaaaacctcttaactgttatgtagactctaaagacggcaagaaaaattctgttaaaatgggatcttatggaataggcgtttcgagattagtgggtgcaataattgaggcaaaatttaataatgacattatgaaatggcctaaatctatttctccattcgatgtatcgataatcccacatataagtaaaaacaataaagaaaacgttataaaagctgaaaaagtttataatgatctaaaaaaacaaaatattgacgtattgttagatgatgttgatgagaatatgtcaaataaatttaaaaacatgacttaa

SEQ ID NO: 298879 - DNA, 513 bp, Unknown
  Bacterial polypeptide expressing nucleotide sequence isolated from the Sargasso Sea
aatgtatctttcaaaattatttattccgataacaaaaaatatacctgctgaagcaaaaataaaatctcatcagttaatgttacaaactggaatgataaaacaatcttcagcaggtatttactcttggttaccactaggatttaaagtaatgaaaaaaatagaacaaattgttagagaagaacaaaactttataggcgcacaagaaatgttaatgcctacaatacagtcgtcagaaatatggaaagagagcggaaggtacgacgattatggggaagaaatgctgagaattaaagatcgtcaagggagagaaatgctttatggaccaacaaacgaagaattaattactgatgtttttagatcaagcgtcaaatcttataaatcactacctcaaattctttatcatatacagtggaagttcagagatgagataagacctcgatttggtgtgatgcggtgtaaagaattttttatgaaagatgcttactcatttgatttaaatgataatgatgcaaa

SEQ ID NO: 298880 - DNA, 724 bp, Unknown
  Bacterial polypeptide expressing nucleotide sequence isolated from the Sargasso Sea
atgcttatttcaaaatcatttattccaattttaaagaataatccttcagaagctaaaataaaatctcatcagttaatgcttagagtaggaatgattaagcaatcatcagcaggtatttactcatggcttccactaggttttaaagtaatgaaaagaatagagaaaatcgtgagagacgaacaaaataaaattggtgcacaagaaattttaatgccaacaatacaatctagtgagatatggaaagagagtggtcgatacgaagattacggagaagaaatgctcagaattagggaccgccaaaacagagaaatactttatggaccaaccaatgaggaacttgtaacagacatatttagatcttctattaaatcttacaagtccttaccacaattgttgtaccatatacaatggaaatttagagacgaaataaggccaagatttggaattatgagatgtagagaattttatatgaaagatgcatactcatttgacataaatgatgaagaagcactattttcttacaataaattttttttatcttatttaaatacttttaaaagattagaacttacagcaattccaatggcagcagatacaggcccaattggaggaagtctttcacacgaatttattatacttgcagaaactggagagagtaaaatttttacagataaaagaatttttgatttaaatagtgacggaacaaaattagaaaaaaaatctt

SEQ ID NO: 298881 - DNA, 819 bp, Unknown
  Bacterial polypeptide expressing nucleotide sequence isolated from the Sargasso Sea
agaacaaaacaaaattggagctcaagaaatattaatgccaacaattcaatccagtgaaatttggaaagaaagtggtcgttacgacgattatggcgaagagatgttaagaataaccgaccgtcaaaatagagagatgttatatggaccaaccaatgaagagcaagttactgaaatttttagatcttcaataaaatcttataaatcactcccacaacttatgtatcatattcaatggaagttcagagatgaaattagaccaagatttggaattatgcgtggtagagagttttatatgaaagatgcttattcatttgatgtatctgatgaagaagctttttattcttataataaattctttctttcttatttaagaacatttaaaagattatctttgacagcaatacccatggctgctgatacaggacctataggtggaaatttatctcatgaatttattattcttgctgatactggagaaagtaaaattttcacagataaaagaatattcgatcttgatagtgatgatactgaactagaaaaaacatcattagagagtatgagaaaaaaatatgaacagttttatgctgtaactgatgaaaaattcaataaggatgaatttgaaaaaattgtttccaaagaaaatcaattgataacaaaaggtatcgaagtaggtcatatattttactttggtgacaagtattcaaaaccaatgggtgcatcagttgatttaccagggggaaagaaagattttgttaaaatgggctcttatggaattggtgtatcaaggttagtaggggctataattgaggcaaaatatga

SEQ ID NO: 298882 - DNA, 814 bp, Unknown
  Bacterial polypeptide expressing nucleotide sequence isolated from the Sargasso Sea
atgctgttatcaaattcatttataccaatattaaaaaataatccttcagaggcaaaaattaaatctcatcaattgatgttgagagtaggtatgattaagcaagcctctgcaggaatttattcatggttacctttgggttttaaagtaatgaaaaaaatagaggacattgttagacaagagcaaaagaaaattggagctcaagaaatattaatgccaacaattcaatctagtgaaatttggaaagaaagtggtcggtatgacgattatggtgaagagatgctcagaataactgatcgtcaaaatagagaaatgttatatggaccaaccaatgaagagcaagttactgaaatttttagatcttcaataaaatcttataaatcactcccacaacttttatatcatatacaatggaagttcagagatgaaattagacctagatttggaattatgcgtggtagagaattttatatgaaagatgcctattcattcgatgtatcagatgaagaagctttttattcttataataaattttttctttcatatttaagaacatttaaaagattatctttgatagcaatacccatggctgctgacacaggacctatcggaggaaatttatctcatgaatttattattcttgctgatacaggtgaaagtaaaattttcacagataaaagaatatttgatcttgatagtgatgatactcaactagaaaaaaaatcgttagaaagtatgagaaagaaatatgaacagttctatgctgtaaccgatgaaaagtttaataaagaagaattgaaaaaaatgtttctaagga

SEQ ID NO: 298883 - DNA, 736 bp, Unknown
  Bacterial polypeptide expressing nucleotide sequence isolated from the Sargasso Sea
atgtatctttcaaaactgtttatacctataacaaaagaccttccaacagaagcaaaaattaaatcgcatcaactaatgttaagaacaggtatgattaaacaatcttcagcaggcatatactcttggttgcctctaggctttaaagttatgaaaaagattgaacaaatagtaagagaagaacaaaatacaataggagcgcaggaaatgttaatgcctactatacaatcctcagaaatatggaaagaaagcggtaggtatgatgattatggagaagaaatgttaagaattaaagataggcaaggaagagaaatgttatatggtcctaccaatgaagaattaataactgatgtgttcagatcaagtataaagtcatataaatcccttccacaacttctttatcacatacaatggaaatttagagatgaaataagaccaagatttggagttatgagatgtaaagagttctatatgaaagacgcatactcttttgatctatctgatgaagatgcaagaatatcttataataagatgtttttttcttatttaaaaacatttaatagattaggtttaaaagctattcctatggcagcagatacaggacctataggcggagatctttctcatgaatttgtaatactagcagagacaggagaaagtcagatatatgcagataaaaaaatttttgaaattaatttagatcaatacaaattaaatgatctatctcttaaaaaaatga

SEQ ID NO: 298884 - DNA, 850 bp, Unknown
  Bacterial polypeptide expressing nucleotide sequence isolated from the Sargasso Sea
ataatagagagagaacttaatagtattggttgtacaaaattactattaccccaacttcatcctgcagatttatggagaaaaagtgaaaggtgggaaggatatactgcaggggaaggaataatgtttaatctaaaagatagacaaggtaaagaatttggtttagctccaactcacgaagaagttatcacgagtattgcatcagagaccatcaactcctataagcaattaccacaatgtttttatcaaattcaaacaaaatttagagatgaaataaggccaaggtttggattgatgagaagtagagaatttattatgaaagatggttattcttttcattcttcagaaaacgatctagcttctttctatgaaaagatgggcaatgcttatgaaaatatttttaaatcttgtggacttcagacagtaggggttgaagctgatagtggagcaattggcggagcttcatctaaagaatttatggtcactgccgatgctggagaagattccattttgtttactcaaagtggttcttatgctgccaatattgaaaaagctgtttctctcccctctcaacctattccacttagagataatattgcagattggttagaaacacctcatcaaaaaacaatcctagatatttgcgataataataatttagaccctactcagattattaaagttgtaatattccttgcacagttcgaagatgaatttgaggttccaattcttgcatgcataagaggcgatcaacacgttaatgaagtaaagctttttaacttaatcaataaacttcataatttcaatctccttaatcttaaaaagattgaagacaaaaatactatcgaaaaaa

SEQ ID NO: 298885 - DNA, 830 bp, Unknown
  Bacterial polypeptide expressing nucleotide sequence isolated from the Sargasso Sea
tcatgtttttatcaaattcagacaaaatttagagatgaaataaggccaaggtttggattaatgagaagtagagaatttataatgaaagatggttattcttttcattcttcagaaaacgatctggcatctttttatgaaaaggttggcaatgcttatgaaaatatttttaaatcttgtggtctgcagacagtaggggttgaagctgatagtggagcaattggcggtgcctcctctaaagaatttatggtcactgctgatgctggagaagattccattttgtttactcaaagtggttcttatgctgcaaatattgaaaaagctgtttctctaccctctcaacctattccacttaaagatgatattgctgagtggttggagacacctcaacaaaaaacaatattagaggtttgcgataataataatttagagcctagtcagatcattaaagtagtaatattccttgcacagttcgaaggtgaatttgagttcccaattcttgcttgcataagaggcgatcaacacatcaatgaagtaaagctttttaacttaatcaataaacttcataatttcaatctccttaatcttaaaaagattgaagacaaaaataatatcgaaaaaaatctaattgattttcccttaggttttatcgggccagatttagataataaaactattaaagctacttctaattgggataaaaaatggataagaataattgaccattctgcaagtggcctttcaaagtttgtaagtggtgggaataaagttaatttccataaagtttttcaagaattttcttttgattcgaaagactatctaattggggatat

SEQ ID NO: 298886 - DNA, 466 bp, Unknown
  Bacterial polypeptide expressing nucleotide sequence isolated from the Sargasso Sea
atgaaagcttctttatatcactataaaaccttgagagacacgccttctgatgcagaattaataagccatcagctgatgattaaatcaaatatgattaagccaatagcgtctggtatttatacttggcttccattgggaaccttaattttaaagaaagtagaaaacataataagggctgaactttcgaatggtggttgtctagaaataattatgcctttagttcagcctaaagatctttgggatctatcaggaagatcaagtgaatatggtccagaattacttgggttcaaagatagaaatgaacgagacttttatctcggtcctactcatgaagaaatagtgaccgaattagctaaaaaagaggttaaaagccataaggatctaccagtaactttttttcaaatacaaaataaatttagagatgaaattagaccaagatttggggttatgagagctagagaattct

SEQ ID NO: 298887 - DNA, 823 bp, Unknown
  Bacterial polypeptide expressing nucleotide sequence isolated from the Sargasso Sea
aatgtacctttcaaaactatttattccgattacgaaagatcttccctcagaagctaaagttaaatcacaccaactaatgctaagaacaggaatgatcaagcaatcctctgcaggaatttattcatggttgccactgggatttaaagtgatgaaaaagattgagcaaatcgttagagaggaacaaaattctatcggtgcccaagaaatgttaatgcctacaatccaatcatctgagatatggaaagaaagtggaagatatgatgattacggagaagagatgttaagaataaaagatcgtcaagggagagaaatgttgtacggaccaacaaatgaggagctaataactgacgtgtttagatcaagtgtaaagtcctacaaatcattaccccaacttctttaccatatacaatggaaatttagagatgagataagaccaaggtttggtgtgatgagatgtaaagaattttatatgaaagatgcgtattcttttgatatttcggatatggaagcaaaaaaatcttataataaaatgttttattcttatttgaaaacttttgaaagacttggtttgaaggctataccaatggcagcagacaccggcccaattggaggagatctttcgcacgagtttataatacttgcagaaacaggagaaagccaaatttatgctgataaaaatatttttgaaatagatttaaataaatatgaagcaaatgacggttctctggaagtaatgcgagacgatttcaataaattttacgcagtaacagatgaaaaatataaaaaagatgaatttaataagattgtaaaaaaagaaaatcaa

SEQ ID NO: 298888 - DNA, 886 bp, Unknown
  Bacterial polypeptide expressing nucleotide sequence isolated from the Sargasso Sea
gatatatttagatcatcaattaaatcatataaatctcttccacaacttctatatcatatacaatggaaatttagagatgagataagaccaagatttggaattatgagatgtagagaattttatatgaaagacgcttattcatttgatataaatgatgaagaggctttattttcgtataataagttttttttatcatatttaaaaacattcaaaagattagatttgacagcaattccaatggcagctgatacaggacccattggtggaaatctatcacatgaatttattatacttgctgaaacaggagaaagcaaaatctttacagacaaaagaatttttgatttgagtagtgacggaacaaaacttgaaaaaaaatcccttgaagatttaagaaagaaatatgaacaattttattctgtaactgatgaaaaatttaataaagatgagtttgaaaaaaaggtatcagagccaaatcgacttaaaacaaaaggaatagaagtcggacacattttttattttggagataaatattccaaaccaatgggaggatcagtagatttacccggagggaaaaaggattttgttaaaatgggatcttatggaataggtgtatcaaggttagtgggagctattattgaggctaaatatgacgaaaaaaatgaagtcatgaaatggccaatttctgttgcaccatatgatgttgcaataattccaatgattaataagaacgatatttcagcattagaaaaggcaaataaaattaatttagaatttgaaatgaacaatattgaatcaataattgatgatactgatgaaaacctttcatctaagattaaaaaaatgaatcttataggcgcaccttttcaaattatcattggtaagcaaa

SEQ ID NO: 298889 - DNA, 483 bp, Unknown
  Bacterial polypeptide expressing nucleotide sequence isolated from the Sargasso Sea
tttgttcaactggaaccgtaacaacatgcgtactagccaatacatgctctccactcttaaggagacacccgccgacgccgaagtcatcagccatcagttgatgctccgtgctggtatgattcgtaagctggcctccggtttgtacacctggttgcccaccggtttgcgcgttctgaaaaaagtcgaaaacatcgtgcgcgaagagatgaataatgccggtgctatcgaggtgtctatgcccgttgtccagcccgcagacctctggcaggaaagtggtcgttgggaacaatatggcccggaattgctgcgttttgttgaccgtggtgagcgcccgtttgtattaggcccaacgcatgaagaagtgattacagacctggttcgtaacgagttgagctcctacaaacaattaccgctcaactttttccagattcaaaccaaattccgtgatgaagtgcgccctcgctttggtgtcatgcgttcacg

SEQ ID NO: 298890 - DNA, 577 bp, Unknown
  Bacterial polypeptide expressing nucleotide sequence isolated from the Sargasso Sea
atgcttttatcaaattcatttataccaatattaaaaaacaatccttcagaagcaaaaattaaatctcatcaattaatgctgagagtaggaatgattaaacaagcctctgcaggaatttattcatggttacctttgggttttaaagtaatgaaaaaaatagaggaaattgtcagacaagaacaaaacaaaattggagctcaagaaatattaatgccaacaattcaatccagtgaaatttggaaagaaagtggtcgttatgacgattatggagaagagatgttaagaataaccgaccgtcaaaaaagagaaatgttatatggaccaactaacgaagagcaagttactgaaatttttagatcatcaataaaatcttataaatcacttccacaacttctgtatcatatacaatggaagtttagagatgagattagaccaagatttggaattatgcgtggtagagaattttatatgaaagatgcttattcatttgatgtatctgatgaagaagcattttattcttataataaattttttctttcttatttaagaacatttaaaagattatctttgacagcaa

SEQ ID NO: 298891 - DNA, 573 bp, Unknown
  Bacterial polypeptide expressing nucleotide sequence isolated from the Sargasso Sea
aatgtactggtcaaaatcttttattccgactagcaaggaaaatccatcaggcgcgaagataccctctcatcaattattaattagagcaggtatgataaaacaagaaagtgcaggtatttattcctggctaccattaggttttaaagttcttaaaaatattgagtcaatagtaagggaagaacaagaggctgccggagcaatagaaattttaatgccaacacttcaatcatcagatttgtggatagagtctggaagatatgagggttatggcgaagagatgttaaggatatctgatagacatgatgcagatttaatatatggaccaacaaatgaagaacaaataactgaaatttttaggtcatatattaaatcatataaaaatcttcctttaaatctttttcatattcaatggaagtttagagatgaaatcagaccacgttttggtttgttaagaggtagagaattcttaatgaaggatgcttattcatttgatttggataaagagtctgcaaaaatatcatattttaaaatgttcacttcatatatgagaactttcaaaagattaggtttaaa

SEQ ID NO: 298892 - DNA, 839 bp, Unknown
  Bacterial polypeptide expressing nucleotide sequence isolated from the Sargasso Sea
tagcagtggcatttatgcatacatgccaataatgcttagagtgattgaaaatttttcctcaataatacaaaaagaacttaatagtattggttgcactaaattactcctaccacaacttcatcctgcagatttatggaaaaaaagtgaaaggtgggaaggatatactgcaggggaaggtataatgtttaatctaaaagataggcagggaaaagaatttggcttggctccaactcacgaagaagtcataacgagtattgcatcagagattattaactcctataagcaattacctcaatgtttttatcaaattcagacaaaatttagagatgaaataaggccaaggtttggattaatgagaagtagagaatttataatgaaagatggttattcctttcattcttcaggtaaagatttaacttcattttatgaaaaggtgggaaatgcttatgaaaatattttcaaatcttgtggactacagacagtaggggttgaagcagatagtggagccattgggggtgcctcctccaaagaattcatggtaactgcagatgctggggaagataccatcttgtttacccaaagcggttcttatgccgccaatattgaaaaagctgtttctttaccctctgaacctattccattaaaagataatatttcaggttggctagaaacacctcaacaaaaaacgatccgcgaagtttgtaaaaataataatttagacccaagtcagattattaaagtcgtaatattcattgcaaagttcgaaagtaaatcagaggtccccattcttgcctgcataagaggcgatcaacacattaatgaaataaagctttttaact

SEQ ID NO: 298893 - DNA, 983 bp, Unknown
  Bacterial polypeptide expressing nucleotide sequence isolated from the Sargasso Sea
tcctcaagaagcagaagttgttagtcacaaattaatgcttcgtgcagggatgatacgtaaagttgcttcaggtatctatacttggctgccgctaggtttaaaagttctaaaaaaagtagaaaatattgtaagagaagaaatggataattctggtgctcaagaggtatttatgccaatggttcagcccagagaattatgggaagaaacaaaaagatgggaaaaaatgggtcctgagttacttagaatcaaagataggcatgatagagatttttgtttaggtcccacacacgaagaagttattaccgacataatcagggataatgttaaaagctataaagaacttccattaaatatttatcagattcaaactaaatttagagacgaggttagacctagatatggaattatgcgtggaagggagtttttaatgaaagattcttacagcttcaatattgatgaggaatcattgcaggaaacatatttaattatgagagaaacgtataaaaaagttcttaaaagaataggacttgaatacaaaatttctgctgcagactctggggccattggtggcgacagctctgaggaatttcatgtgcttgctgaaaatggtgaagatactattgccattagtgatgcgtctgaatttgcaatcaataccgagcttcttttaaaagatggagaagatataagcacgcttgaaggtaagccttctccagatggaaatggaacgatccaaataaagaaaggaatagaagttggtcatatttttaaacttggtaggctttacgctgagtcaatgaaaacgaatgttctaaattctgaaggaaatgcttcaactttattcatgggttgttatggaattggagtttcaagacttgttgcagcaacaatagaacaaaatcatgatgaaaaaggtattatttggcctcacagcattgctcccttcgacataaatattatatccgttggacatgaaaaaaata

SEQ ID NO: 298894 - DNA, 892 bp, Unknown
  Bacterial polypeptide expressing nucleotide sequence isolated from the Sargasso Sea
agttactgaaatatttagatcatcagtaaaatcttataaagcattacctcaacttttatatcatatacagtggaaatttagagatgagataagacctcgttttggaattatgagaggtagagaattttatatgaaagatgcatattcgtttgacattactgatgatgatgcattttattcatataataaattttttttatcttatcttagaacttttaaaagattatcgttaacagcaatacccatggcagcagacactggaccaataggtggaaatctatcgcatgagtttgtaattcttgctgatacaggggagagtaaaatttttacagataaaagaatttttgaattaaattgtgataatacaaaattggataaatcatcactagaacaaatgagaaaaatgtatgagcaatattatgctgtaactgatgaaaaatttaataaagatgattttgaaaaaattgttaataaagaaaatagattaataactaaaggtattgaagtagggcatattttttattttggtgacaaatattcaaaatcaatggatgcagcagttgatctaccacttggaaaaaaggattttgttaaaatgggctcttatggaattggtgtatcaagattagtgggagcaattatagaggctaaatatgatgataaaaatgaaatcatgaaatggccattgtctgttgctccttatgacattggcattatacctatgataaataaaaacgatacctcggcattagataaagctaataatatttatcttcatttaaaaaaaaataatattgatgcaattattgatgatacagatgaaaatttttcatcaaaattaaaaaaaatgaatttaattggcgcaccatatcattttattataggaaaaaaa

SEQ ID NO: 298895 - DNA, 766 bp, Unknown
  Bacterial polypeptide expressing nucleotide sequence isolated from the Sargasso Sea
ttattcttggttacctttaggcttaaaggtaatgaaaaaaattgaacaagttgttagagaagagcaaaacaaaataggtgcacaagagctacttatgccaactattcaatcggctgatatttggaaagaaagtggtagatacaatgactatggcgaagagatgttgagaataaaagataggcaaggaagggaaatgttatatgggccaactaatgaggagttgataacagacatatttagatcatcaatcaagtcttataaatctttgccacaaatgctttatcacatccaatggaagtttagagatgaaataagaccaagatttggagtaatgagatgcagagaattttttatgaaagatgcatattcttttgatctagatgactctagcgctaaatcttcttacaacaaaatgtttttttcatatctaaaaacttttaaaagattaggtttagaggctattccaatggcagcagatactggaccgataggaggagatctatctcatgaatttataattttagctgaaactggggaaagtaaaatttatacggataagagtatttttgaaatagatcttagtaattatagttttaacaattcctctttagaaaaaatgattaaagattactcatcaatttacgcagtaacagatgataaatttaaaaaagatgaatttgataaaaaagtgccaaaaaaaaatcaaatgattaccaaaggcattgaggttggacatattttttattttggtgataaatattcaaaa

SEQ ID NO: 298896 - DNA, 815 bp, Unknown
  Bacterial polypeptide expressing nucleotide sequence isolated from the Sargasso Sea
ggtggtgcagcccgccgagctctggcaggaaacgggccgctttgagaaaatgggtcctgagctgctgcgcatccaggaccgccatggccgcgactttgtggtgcagcccaccagcgaagaagtgatcactgacatcgcacgccaggagctcaagagctacaagcagctgccgaagaacttctaccagatccagaccaagttccgcgacgagcgccgcccccgttttggcctcatgcgcggccgcgagttcatcatgaaggacgcctacagcttcgactgcgaccaggccgctgccaaggccagctaccaagtgatggcggctgcgtaccgccgcatctttgaccgcttcggcctgacctaccgcgccgtggccgctgacagcggcgccatcgggggcgatttgtcggaagaattccaggtgattgccgctacgggggaagacgccatcgtctactgtccgcagagcgactacgccgccaacatggaaaaggccgaagcgctggcccccaccggaccccgcggcgctgccacgcaggcgctgaccaagacggcgaccccgggcaagagcacctgcgccgatgtggcggaactgctgggtgttccgctcaacaccaccgtgaagtcgctggtgctggctacagacgaaaccaacgaagccggtgagattgtcaagacccaggtctggctgctgctgctgcgcggcgaccatgacatgaacgagatcaaggtcggcaaggtgcccggactggcgggcttccgcttcgcgacgctgggcgaaatcgaggaccactttggctgcaagccggggtacctgg

SEQ ID NO: 298897 - DNA, 705 bp, Unknown
  Bacterial polypeptide expressing nucleotide sequence isolated from the Sargasso Sea
agttattgaaaaaatatctttaataattgatagagaactaaatagtattggctgcgtaaaattattcttgcctcaactccatccagcagatttatggaaaaaaagtgaaagatgggaaggttatactgctggggaagggataatgtttaatctcaaagatagacaagggaaagaatttggtttagccccaactcatgaagaggtaatcacaagtattgcatcagagaccatcaattcctataaacaattacctcaatgtttttatcaaattcagacaaaatttagagacgaaataaggccaaggtttggactgatgagaagtagagaatttataatgaaagatggctattctttccatgcttcagaaaacgatctggcttcattttatgaaaaggtcggaaaagcttatgaaaacatttttaaatcttgtggacttgagacagtaggggttgaagcagatagtggagccattggcggtgcatcctcaaaagaatttatggttactgcagatgctggggaagattccatcttatttactcaaagcggttcttatgctgcaaatattgaaaaagctgtttccattccctctcaacctattccattaaaagataatatttcgcagtggctagaaacacctcggcaaaaaacaatccttgaagtttgcgaaaaaaataatttagactccacgcagattattaaggttgt

SEQ ID NO: 298898 - DNA, 955 bp, Unknown
  Bacterial polypeptide expressing nucleotide sequence isolated from the Sargasso Sea
agggattaaagacaggcaaggccgagaaatgttgtatggaccaactaacgaagaatttttaaccgatatatttagaacaagcatcaaatcatataaaacacttccacaaatgctttatcatatacagtggaaatttagagatgagataagaccaagatttggagtgatgcgatgtcgtgagttttttatgaaagatgcatattctttcgatttaagtgatcaagatgcaaaaaaatcatacaataaaatgttttactcttatataagaacttttaatcgtcttggcttgaaagctatacctatggctgcagaaactggaccgatcggaggagatctatctcacgaatttgttattttagctgagacaggggaaagccaaatttttgcggataaaaagatatttgaaatagatcttgataaatatgatttttcggaaaaatcattgcaaaaaatgagagaagatttttcttctatttacgctgtaactgatgaaaagtatagagaagaagattttaataataaagttaaacaagcaaatcaaattaaaacaaaaggaattgaagtagggcatattttttactttggtgataaatattcgaaaccgttaaattgtttaattgatgctcaagatggtaaaaagattgcagttaaaatgggatcttatggtatcggaatttcaagattagttggagcaacaatagaggccaattataataaagaagtaatgaaatggccaaaatctatctctccttttgatgttgttattattccaagtattagtaaaaataataaggaaaacctagaaaaagctgaaaaaatttataaagaattaaaaaaacaaaatattgacgtattgttagacgatgtagatgaaaatatgtcaaataaatttaaaaaacatgatttaataggtattccttaccaaataataataggctctaaatctgcacaagat

SEQ ID NO: 298899 - DNA, 898 bp, Unknown
  Bacterial polypeptide expressing nucleotide sequence isolated from the Sargasso Sea
ggtaaccgggtgcggctcaatattgaaaatgttgtacggaagcacatgaatttgtcaggtgcgcaggaaatactgatgcctgcgctccagccgatagagatctgggagcaatcgggtcgagcagccaagatgaaggatgtgctattccgattatcagatcgtagggggcgctcgctcgccctcgggccgacccatgaagaggtggttactcaactcgccggtaaatttatttcttcacaccgggatcttccccttacgacatatcaaattcagacaaaatttcgggatgaagctaggccaagaggtggattagtccgagtgcgtgagttcactatgaaagacgcttattcatttgacctggatgaggatgggctgagtgattcctacgacaagatgtttcaggcatacaagaacattttctctgagtgtggggtgcctgtggttccagttgacgccgattcaggtgcgataggcggaaaaggatcccaggagtttattttcataaccgagatgggcgaagacactgtggtgcagtgttcgggatgtgaatatgccgccaacttagagaaggcaaccttccttcaggagagttctgcagaagctcaaaagtccttggaggaggtcgagacaccgaatgtcgcgaccatcgaggatctcagtgagtttctctccattgcaaattcgagcactgcgaaagccgttttgttcatggccactaaatttgagtcagatgaagagtttccagtattagcagtgatacgtggagattttgaagtaaatgatgtgaagctctctaatgcgctagggggcgctgaagtacgaccgatggaggcctcagaggccgcaaatgttggattggtgcctggatatatttcgcccagtcaatcttgcaagtgag

SEQ ID NO: 298900 - DNA, 750 bp, Unknown
  Bacterial polypeptide expressing nucleotide sequence isolated from the Sargasso Sea
tcaggagcgaagataccctctcatcaattattaattagggcaggtatgataaaacaagaaagtgcaggtatttattcctggctaccattaggttttaaagttcttaagaatattgagtcaatagtaagggaagaacaagaggccgcaggagcaattgaagttttaatgccaacactgcaatcatcagatttatggatagagtctggaaggtatgacggttatggcgaagagatgttaagagtatctgatagacatgatgcagatttaatatatggaccaactaatgaagaacaaataactgaaatttttagatcatatattaaatcgtataaaaaccttcctttaaatctttttcatattcaatggaagtttagagatgaaatcagaccacgttttggcttgttaagaggtagagaattcttaatgaaggatgcttattcatttgatttggataaagaatctgcaaaaatctcatattttaaaatgtttaactcatacatgaaaacattcaaaagattgggcttaaatgcaatacctgtagttgctgacagtgggcctataggtggtgaactaagtcatgagttttctattattacgaatactggtgaaacagagatatattatgatagcaggatactggaaatagaaaactataattttgattactcaaataaagattccttaaaaaattcttataataatttcacaaacttttattcttcaacagatgataaatattctgaagatttg

SEQ ID NO: 298901 - DNA, 534 bp, Unknown
  Bacterial polypeptide expressing nucleotide sequence isolated from the Sargasso Sea
acttaatagtattggttgcacaaaattactcttaccccaacttcatcctgcagacttgtggaaaaaaagtgagagatgggaaggatatactgcaggggaaggaataatgtttaatctaaaagatagacaaggtaaagaatttggtttagctccgactcacgaagaagtgatcacaagtattgcatcagagatcatcaactcctataagcaattacctcaatgtttttatcaaattcaaacaaaattcagagatgaaataaggccaaggtttggattaatgagaagtagagagttcataatgaaagatggttattcttttcattcttcagaaaaagatcttgcttcattttatgagaaggtgggcaaggcttatgaaaatatttttaaatcttgtggactagagacagtaggagttgaggcagatagtggagctattggcggtgcctcctccaaagaatttatggtcactgcagatgctggagaagattccattttatttactcaaagcggatcttatgctgcaaatattgagaa

SEQ ID NO: 298902 - DNA, 925 bp, Unknown
  Bacterial polypeptide expressing nucleotide sequence isolated from the Sargasso Sea
cataacaaaagatttaccagctgatgctaaaataaaatctcatcaattaatgttgagaactggaatgattaaacagtctgcagctggaatatattcttggctgcctcttggattcaaagtgatgaaaaagattgaaaaaatagttagggaagagcaaaatattattggagcccaagaaatgttaatgccaactatacaatctgcagaaatttggaaagaaagtggcagatatgaagactatggtgacgaaatgttaagaataaaagatcgtcaaggtcgtgaaatgttatatggaccaactaatgaagaattaattactgatatttttagatcaagtataaagtcttacaaatctcttccacaaattctttatcatattcagtggaaatttagagatgaaataagaccaagatttggagtaatgcgttgcagggaattttatatgaaagatgcatactcattcgatttaagcgatgctgaagctaaaaattcctataataaaatattttactcatacataaaaacttttaatagacttgggttgaaagcaatccctatgtcagcagatacaggtcctattggtggagacttatctcatgaatttgtaatattagctgaaactggagagagtaaaatttatgcagataaaaaaatttttgatattgatttaaacaaatataatttttctgaaaagtctttacaaaaaatgagagatgatttttcaactatttatgctgtcacagatgaaaagtttaatgaaaaaactttcaatgagagggttaaaaaagaaaatcaagttacaacaaaaggcatagaagttggacatattttttattttggagataaatattcaaaacctcttaattgcgttatagacacaaaagatggaaaaaaagtaacagttaaaatggggtcatacggaatt

SEQ ID NO: 298903 - DNA, 785 bp, Unknown
  Bacterial polypeptide expressing nucleotide sequence isolated from the Sargasso Sea
aaactcctataagcaattacctctatgtttttatcaaattcagacaaaatttagagatgaaataaggccaaggtttggattaatgagaagtagagaattcataatgaaagatggttattctttccattcttcagaaaacgatctggcttctttttatgaaaaagtgggtaatgcttatgaaaatatttttaaatcttgtggtctgcagacagtaggggttgaagctgatagtggagcaattggtggtgcctcctctaaagaattcatggtcactgctgatgctggggaagactccatactgtttactcaaagtggttcttatgctgcaaatattgaaaaagctgtttctctaccctctcaacctattccactaaaagatgatatttcagagtggttggagacacctcaacaaaaaacaatcctagaggtttgcgataataataatttagaccctagtcagattattaaagtagtaatattcctggcacagttcgaaggtgaatttgaggtaccaattcttgcatgcattagaggcgatcaacacattaatgaagtaaagctttttaacttaatcaataaacttcatgatttcaatctccttaatcttaaaaagattgaagacaaaaataatatcgacaaaaatctagttgatcttcccttaggttttatcgggccagatttagataataaaactattaaagctacttctaattgggataaaaaatggacaagaataattgaccattctgtaagtgacctttcaaagtttataagtggtgggaata

SEQ ID NO: 298904 - DNA, 868 bp, Unknown
  Bacterial polypeptide expressing nucleotide sequence isolated from the Sargasso Sea
gatgaaaaaaatagaatctatagttagacaggagcaagataaaattggtgcacaagagatattgatgcctacaattcaatcaagtgaaatttggaaagaaagtggtcgttatgaagattatggagaagagatgttaagaattaaagatcgtcaaaatagagaaatgttgtatggaccaacaaatgaagaacaagtcactgaaattttcagatcctcttttaaatcttacaaatcattacctcaactcctttatcatatccaatggaagtttagagatgaaataagacctagatttggaattatgagaggtagagagttttatatgaaagatgcatattcttttgatattacagacgaggatgcatttttttcctacaataaattttttttatcttatttaagaacttttaaaagattatcattaactgctataccaatggcagcagaaactggtccaataggaggaaatctttctcatgaatttataattctggcagagacaggtgaaagtaaaatttttacagataaaagaatttttgaagtaaatagtgatggaacagaattaaaaaaagattctctgcaaaatttaagaaaaaaatacgaaaaattttactctgttacagatgagaaatttaataaagatgaatttgaaaaaaaagtttcagaaacaaatagattaataacaaaaggaattgaagtaggtcatatattttattttggtgacaaatattcaagacctatgaatgcatcagttgatttaccaggaggaaaaaaggattttgttaaaatgggatcttatggaattggtgtatcaagattagttggcgccataattgaaagcaaatatgatgaaaaaatgaaatcatga

SEQ ID NO: 298905 - DNA, 1282 bp, Unknown
  Bacterial polypeptide expressing nucleotide sequence isolated from the Sargasso Sea
aatgttgtggtctaaggtttttttacccactcttaaggatactcctcaagacgctgaagttataagtcatcagctaatgttgagagcaggaatgattagaaaagtaacttcaggaatatataactggcttccactaggtttaagagtgcttaaaaaaattgaaaatattgttcgtgaggaaatggatgcatctggagcacaagaggtcttgatgccaatggtacaacctaaagaattatgggaagaaactcaaaggtggaaaaaaatgggtccagagcttttgcgcattcaagacagacatgaaagggacttctgccttggaccgactcatgaagaggttataactgacttagtaagaaataatgttaaaagttataaagaattgccattaaatctttatcagattcaaacaaagtttagagatgaagtaaggcctcgttatggtgtcatgcgaggaagagaatttcttatgaaagattcttatagcttcaacatcaatgaagactctttaaatgaatcatatcttttaatgaaagaaacatacaaaaagatcatagagagattaggtctcgaatataaaatcgtaaaagctgattctggtgcaattggcggtgatgcatctgaagaatttcatgtacttgcagaaaatggcgaagacacaattgccgtaagcgactcatctgaatttgcaattaactcagaacttttactcaatgagggagaggatattaactctcttcagggaaaaccatcaccagatggcaaaggaactattgaaattaaaaaaggtatagaagttgggcatatctttcaacttggaaaaatatatgctgacgcaatgaaagctaatgtcttagataatgaaggtaaatcacaaactctctatatgggatgttatggaataggaatttcaaggttagtggcagctgcaatagagcagaatcacgatgaaaaaggtattttatggccagaagccattgctccatatgaagtaaatattattgccataggatttgataaggatcagaaaatagcaaaagctgcaacagatttttataacgaattatcatccatgggctacgaggtgatgctggatgaccgaaaagatggctatggaattaagatgaaagattccgaattaattggcgtaccaattaatgtaattattggcagacaatatcttgaaagtaatgaaatagagctaaaacatagagatggtctaagctctattggaactgtagaagatattacaactatctttgagcactacaaagaaaaataa

SEQ ID NO: 298906 - DNA, 530 bp, Unknown
  Bacterial polypeptide expressing nucleotide sequence isolated from the Sargasso Sea
tatgcgcgtgaccacctcatttcctctggggacacttcgtgacaaaccttctgaagctgagattatttcacatcaattactcttaaaagctgggtatattcgcagaattagcagcggtatttatgcatatatgccactaatgcttaaagttattgaaagaatatccgcaataatagagaaagaacttaataatattggttgtacaaaattactattaccccaacttcatcctgcagatttatggaaaaaaagtgaaagatgggaaggatataccgcaggtgaaggaataatgtttaatctcaaagatagacaaggtaaagaatttggtttagcaccaactcacgaagaggtgatcacgagtattgcatcagagaccatcaactcctataagcaattacctcaatgtttttaccaaattcagacaaaatttagagatgaaataaggccaaggtttggattgatgagaagtagagaattcataatgaaagatggttattcttttcattcttcagaaaacgatctagcttctt

SEQ ID NO: 298907 - DNA, 1039 bp, Unknown
  Bacterial polypeptide expressing nucleotide sequence isolated from the Sargasso Sea
atgcttttatcaaattcatttataccaatattaaaaaacaatccttcagaggcaaaaattaaatctcatcaattaatgttgagagccggcatgataaagcaagcttcggcaggaatttattcatggttgcctttaggttttaaggtaatgaaaaaaatagaggatattgttagacaagagcaaaataaaattggagctcaagaaatattaatgcctacaattcaatccagtgaaatttggaaagaaagtggtcgttatgaagactatggtgaggagatgcttagaataactgatcgccaaaatagagaaatgttatatggaccaactaatgaagagcaagttactgaaatttttagatcttcaataaaatcttataaatcacttccacaacttttgtaccacatacaatggaagttcagagatgaaattagacctagatttggaattatgcgtggtagagaattttatatgaaagatgcttattcatttgatgtgtctgatgaagaagctttttattcttataataaattttttctttcatatttaagaacatttaaaagactatctttgatagcaatacctatggctgctgatacaggacctattggtggaaatttatctcatgaatttattattcttgctgatacaggtgaaagtaaaatttttacagataaaagaatatttgatcttaatagtgatgatactcagctagaaaaagcatcactggaaagtatgagaaaaaaatatgaacagttttattctgtaactgatgaaaagttcaataaagaagaatttgaaaaagctgtttctaaggaaaatcaattgatcacaaaaggtatagaggtaggtcatatattttattttggtgacaaatattcaaaaccaatgggagcatctgttgatttgccaggaggaaaaaaagattttgttaaaatgggatcttacggaattggggtatcaaggcttgtaggggctataatagaggcaaaatatgatgacaaaaatgaaatcatgaaaatggccattgtctgttgctcct

SEQ ID NO: 298908 - DNA, 966 bp, Unknown
  Bacterial polypeptide expressing nucleotide sequence isolated from the Sargasso Sea
tatgcggacaagtcagtatttactctccactatgaaagaaaccccggccgatgccgaaattatcagccatcaattgatgttacgtgccggtatggtgcgtcgtctggcgtcaggtttatacacctggttgcccagtggcctgcgggttttacgtaaggtagagaacattgtccgcgaagaaatgaacaaagcaggcgccatcgaaatactgatgcctgtggttcaacatgctgaactgtggcaggaatctggtcgctgggaaaagatggacgctgaactgctgcgttttaaagaccgtcaccagcgtgattttgtgttaggcccaacccacgaagaagtagtgacagatttagtccgtaaagaaatcagcagctacaaacagctgcctattaatttataccaaattcagaccaagttccgtgacgaacgtcgtccacgttttggtgtgatgcgtgcccgcgaattcttaatgaaagacgcctactctttccacttaagtcaggaaagtttgcagcaaacctatgacgctatgtaccaggcctactgcaatatctttacccgcctgggtttagatttccgtcctgtattggcggacactggcgccattggtggcagcatgtcgcacgagttccatgtactggccgcctcaggtgaagatgcaatcgtattctctgatggcagcgattacgccgccaatattgaaaaagccgaagctctgccccctcaaggtcagcgtcctgctgcaacccaggctaaaactgaagtagcaacgccaaatgccaaaagcattgacgaagtgtcggcctttttaaagctggatgcctctgctatagcaaaaactttattggtgcaactgaacccggaattgagctttgatgagttaaaagcgctgctggctaatgcagatgctgaaaccatcgaaaatacctggcgttctaaaattgtggcgctggtattgcgcggcaa

SEQ ID NO: 298909 - DNA, 1324 bp, Unknown
  Bacterial polypeptide expressing nucleotide sequence isolated from the Sargasso Sea
aatgtactggtcaaaatcttttattccgactagcaaggaaaatccatcaggcgcgaagataccctctcatcaattattaattagagcaggtatgataaaacaagaaagtgcaggaatttattcctggctacctttaggttttaaagttcttaaaaatattgagtcaatagtaagggaagaacaagaggctgcaggagcagtagaaattttaatgccaacacttcaatcatcagatttgtggatagagtcaggaagatatgagggttatggcgaagagatgttaaggatatctgatagacatgatgcagatttaatatatggaccaacaaatgaagaacaaataactgaaatttttaggtcatatattaaatcatataaaaatcttcctttaaatctttttcatattcaatggaagtttagagatgaaatcagaccacgttttggtttgttaagaggtagagaattcttaatgaaggatgcttattcatttgatttagataaagagtctgcaaaaatctcatattttaaaatgttttcttcatatatgagaactttcaaaagattaggtttgaatgcaataccggtaattgctgatagtgggcctataggcggtgaattaagtcacgagttttcgattattacgaataccggtgaaacagagatttattatgatagcaggatacttgaaatagaagactatgattttgattattcaaaaaaagattctttagaaaattcttataataaattcacaaacttttattcttcaacagatgataagcattctgaagatttattccaaaaaatacctgaggaatttcgaaataagggtaaggcaattgaaattggtcatattttttcttttggttacaaatattcagaacctatgaacgcatttgttaataatgacaaaggtgaaaatattcctgtatatatgggttcttacgggattggtgtatccagattagtatcagctattattgaagcctaccatgacgatagaggaatattgtggccaacctctgtagcgccttttcaagttggtataattaatttaggtaagaatgatgagaaatgtaaaaaaacctcagaaaatatttatcaagaattaagaagcagtaatatagatgttatttatgacgacagggatgaaagcgcagggaaaaaatatgctgatatggatttaattggaattccatatcaaattattttaggcccaagggacttagaaagtaataaatgtgaattaaaaaatagattaaacgaccaaagagtgagtatcgatataaataatattattaaagaattattaaaattaatctaa

SEQ ID NO: 298910 - DNA, 1012 bp, Unknown
  Bacterial polypeptide expressing nucleotide sequence isolated from the Sargasso Sea
gatgcttttatcaaattcatttattccaatattaaaaaataatccttctgaagcaaaaattaaatctcatcaattaatgttgagagttggtatgattaagcaagcttctgcaggaatatactcatggttacctttaggatttaaggtaatgaaaaaaatagaacaaattgtaagagaagaacaaaataaaattggtgctcaagaaatattgatgccaacaattcaatccagcgatatctggaaagaaagtggtcgatatgatgattatggtgaagagatgctcagaataactgatcgtcaaaaaagagaaatgctttatggacctactaatgaagagcaagttacagaaatttttagatcttcaattaaatcatataaatcattacctcaacttatgtatcacatacaatggaaatttagagacgaaataagacctagatttggaattatgaggggaagagagttttatatgaaagacgcttattcttttgatgtatcagatgaagaagcttttttttcatacaataagttttttctttcatatttaaaaacttttaaaagattagatctaacagcaatacctatggctgctgacacaggtccaattggaggaaatttatctcatgaatttattatcctagcagaaacaggggaaagtaaaatttttactgacaaaaaaatttttgacttaaacagtgatgacactcaattagaaaaatcttctttagaggaaatgagaaaaaaatatgagcaattttatgctgtgactgatgaaaagtttaataaggatgaatttgaaaaaatagtatctaaagaaaatcaattaatcacaaaaggtattgaggtaggccacatattttattttggagacaaatattcaaaacccatgaatgcatcagtagatttaccaggtggaaaaaaagattttgttaaaatgggttcttatgggatcggtgtatcaaggttagtaggagctataatagaagcaaaatatgatgaaaaaaatgaaatc

SEQ ID NO: 298911 - DNA, 461 bp, Unknown
  Bacterial polypeptide expressing nucleotide sequence isolated from the Sargasso Sea
catgcgcactagtcaatatttgcttgccacgcagaaagaaacacctgcagatgcagaggttatcagccaccagcttatgctaagagctggtatgatcagaaagcttgcctcgggtctatacacgtggttgccatctggtcttcgtgtacttaataaagtagccaatattgttcgtgaagaaatgaacaaagcaggcgcgattgaagtgctaatgcccgttgttcagcccgcagacctgtgggaagaatctggacgttgggaagaatacggtccagagttacttcgtattaaagaccgccaccagcgtgatttcgtattaggtccaacgcacgaagaagttattaccgcgcttgtgcgtaatgaaattagcagctataagcagcttccgctcaatctataccagattcagactaaattccgcgacgaagtgcgcccccgtttcggcattatgcgtggtcgtg

SEQ ID NO: 298912 - DNA, 986 bp, Unknown
  Bacterial polypeptide expressing nucleotide sequence isolated from the Sargasso Sea
tatgcgccaatcaaaaatcctgattccaaccctcaaagaagacccgtccgacgctgaggttgtcagtcacaagttgatgatgcgagctgggcttgtgagacagctagcgagcggcttgtacagctggctacctttaggccttcgagtcctacgaaaagttgaaaacatcatacgtgtagaaatggataatgctggcgcgcaagagctactgatgccagttgttcaaccctcagaactctgggtagaaaccggcagatgggaaaagatgggggccgagctatgccgcttaaaagatcgacatgagcgtgaattttgcttgggacctacccatgaggaagtgatcaccgatatctttagaagagaagttaatagttataaagatctacccgcaacttattatcaaatccaaacgaagtttagagacgagccaagacccagattcggcttgatgcgcgcgcgcgaattcataatgaaagatggctactcctttcacttggaccaggcaagtttcgacgaaacctatcaggcgatttacgattgctactgtgtaattctcaatagaatgcagctggattatcgagcagtaatagctgataccggcaacataggcggagaaaactcccacgaattccacgtactggcaaactctggagaggacgtcatcgtttacgcttcagacggggattatgcagcgaacatagagaaagccgaatccgcccgactggaggaggtatctgaagcatcgacaattgaattagcagaaattcacacaccaggcgccttatctatcgatgatgtcgcaacacaattgtctaaaccagctaaagagattttgaaaactctcttagtcgaaaacgatgggggtttgacggcattggttcttagaggcgaccacgaattgaatatcgttaaagctgaaaaattactaggcgtgacagcgcccattagttttgctactgacgaacaaatcctgaaacacactggtg

SEQ ID NO: 298913 - DNA, 1324 bp, Unknown
  Bacterial polypeptide expressing nucleotide sequence isolated from the Sargasso Sea
atgtattggtcaaagtcttttattcctactagcaaggagaacccatctggcgcaaaaataccttcacatcagctattaattagagctggtatgatcaaacaagaaagcgcaggaatttattcttggctacctatgggttttaaagttttaaagaaaattgaagaaatagttagagaggaacaaaaagctgcgggagctattgaagttttaatgccaactcttcaatcatcagaattatggatagaatctggtaggtatgacggctatggagaggaaatgctccgtatatcggatagacatgatgcaaatttgatatatggaccaactaatgaggaacaaataactgaaatttttagaacatatgttaaatcttacaaaaatcttcctttaaatctttttcatatccaatggaagtttagagatgaaattagacctcgttttggattattgagaggtagagaattcttaatgaaagatgcttactcttttgatttagacaaagagtctgcaaaaattgcatactataaaatgtttctttcatatatgagaacatttaaaagattaggtttaaatgcaattcctgtagttgctgatagtggtccaattggaggcgaattaagccatgagttttcaattattacgaatactggtgagactgaagtttattacgatggaagattactggatatcgaagatgataatattgattatacgaacgaagactcactagaaaatgcatataataatttcactaatttttactcctcaactaaagacaaacatgttgaggatttatataaaaaaataccattagattttcagaaaaagggtaaagcaattgaaattggtcatattttttcttttggatataaatattccgaacctatgaatgcttttgttactaacgattttggtgagaatgttcctgtttatatggggtcatatggaattggcgtatcgagattagtagcggcaataattgaagcctatcacgatgataagggaatattatggccgacttcaattgctccatttcaaattggtttaattaatttggggcaaaataatgatgagtgcataagggcatctaaagagatttacaaagaacttaaaaaaaataattttgatgtgatttatgacgatagaaatgaaagtgcaggaaaaaaatacgctgatatggatttgattggaattccattccaaataattttaggtccaagagacttagaaaataacaaatgtgagttaaaaaatagatttaatgaccaaagagtaagtatcgatattagtgagcttgttaaagaattaaataaattaatctaat

SEQ ID NO: 298914 - DNA, 1372 bp, Unknown
  Bacterial polypeptide expressing nucleotide sequence isolated from the Sargasso Sea
atgcgcgtgacaacctcatttcctctggggacacttcgtgacacaccttctgaagctgagattatttcacatcaattacttttaaaagctgggtatattcgcagagttaacagcggtatttatgcatacatgccaataatgcttaaagttattgaaaaaatatccgcaataatagagagagagcttaatagtattggttgtacaaaattactgttaccccaacttcatcctgcagatttatggaaaaagagtgaaagatgggaaggatatacagcaggagaaggaataatgtttaatctcaaagataggcaaggtaaagaatttggtttagccccaactcacgaagaagtgattacgagtattgcatcagagaccatcaactcctacaagcaattacctcaatgtttttatcaaattcagacaaaatttagagatgaaataaggccaaggtttggattgatgagaagtagggaatttataatgaaagatggttactcttttcattcttcagaaaacgatctggcttctttctatgaaaaggtgagcaatgcttatgaaaatatttttaaatcttgtggactacagacagtaggggttgaagctgatagtggagcaattggtggtgcctcctctaaagaattcatggtaactgctgatgcaggggaggattccattttgtttactcaaagtggttcttatgctgcaaatattgaaaaagctgtttctataccctctcaatctattcctttaaaagatggtatgtcaggattgatagaaactcctcaacaaaaaacaatcctagaagtttgcgataataataatttagaccctagtcagattattaaagtagtagtattccttgcgcagttcgaaaataaatttgaggttccaattcttgcatgcataagaggcgatcaacacattaatgaagtaaagctttttaacttaataaataaacttcaaaatttcaatctccttaatcttaaaaagattgaagataaaaatgctatcgaaaaaaatctagttaattttcccttaggttttatcgggccagatttagataataaaactattaaagctagttctaattgggacaaaaaatggaccagaataattgaccattctgcaagtagcctctcaaagtttataagtggtgggaataaagttgatttccataaagtttttcaagaattttcttttgcttcgaaagactatctaattggggatatcaggaatgccaaaaaaggagataaagtaagtatttatgatgatgaagaacttaaagaaaaaaaaggtatcgaaattggacatattttccaactaggtcagaaatatagtgaaaaattaaatgcaaagttctctgataaggacg

SEQ ID NO: 298915 - DNA, 592 bp, Unknown
  Bacterial polypeptide expressing nucleotide sequence isolated from the Sargasso Sea
atgcgcgtgacaacctcatttcctctggggacacttcgtgacacaccttctgaagctgagattatttcacatcaattacttttaaaagctgggtatattcgcagagttaacagcggtatttatgcgtacatgccaataatgcttagggttattgaaaaaatatccgcaataatagagaaagaacttaatagtattggttgtacaaaattactattaccccaacttcatcctgcagatttatggagaaaaagtgaaagatgggagggatatactgcaggggaaggaataatgtttaatctaaaagatagacaaggtaaagaatttggtctagctccaactcacgaagaggtgatcacgagtattgcatcagagactatcaactcctataagcaattacctcaatgtttttatcaaattcagacaaaatttagagatgaaataaggccaaggtttggattgatgagaagtagagaatttataatgaaagatggttattcttttcattcttcagaaaaagatctggcttctttctatgaaaaggtgggtaatgcttatgaaatatttttaaatcttgtggactacagacagtagg

SEQ ID NO: 298916 - DNA, 922 bp, Unknown
  Bacterial polypeptide expressing nucleotide sequence isolated from the Sargasso Sea
gtatcatatacaatggaaatttagagatgaaataagaccaaggtttggagtgatgagatgtcgagaattttttatgaaagatgcttattcatttgatttaagtgatgaagatgcaaaaaaatcttacaataaaatgttttactcttacataagaacttttaatcgccttggtttgacagctataccaatggcagccgagacagggccaattggaggagacttatctcacgaatttattattttagctgaaactggtgaaagtcaaatctatgcagataaaaagatatttgaaatagatttaaataaatatgatttttctgacaaatcattgcaaaagatgagagaagatttttcttcaatttatgctgttacagatgaaaaatttaaagaaaaagattttaatgaaaaagtcgaaaaaaaaaatcaaatcaaaacaaaaggaattgaagttggtcatattttttactttagtgacaaatattctaaaccattgaattgtttaattgatgcgcaagacggaaagaagattgctgttaaaatgggatcttatggtattggaatttcacgattggttggggctactatagaagctaattataataacgatgtaatgaaatggcctaaatcgatctctccttttgatgttgttatcattcctagtattactaaaaataataaagaaaacctgcaaaaagctgcaaaaatttataaagaattaaaaaaacaaaatattgacgtattgttagacgatgtagatgaaaatatgtctaataaatttaaaaaacatgatttaataggtgttccttaccaaataatactaggctctaaatcggaaaaagataagttcgaatttaaagagcttaattcaaaaagcgcaatgttaaatttggaagatattaagtctcaacttaagaaaagataa

SEQ ID NO: 298917 - DNA, 1279 bp, Unknown
  Bacterial polypeptide expressing nucleotide sequence isolated from the Sargasso Sea
tatgttattttcaaagctactattacctactcttaaggatgctccccaagaagcagaagttgtgagtcacaaattaatgcttcgttcaggcatgatacgtaaagttgcttcaggtatctatacatggctaccactaggcttaaaagttcttaaaaaagtagaagatattgtaagagaagaaatggataattctggtgctcaagaggtttttatgccaatggttcagccaagggaattatgggaagaaacaaaaagatgggaaaaaatgggtcctgaattacttagaataaaagacaggcatgatagagatttttgtttaggtcccacacacgaagaaattattactgacatcattagggataatgtcaaaagctacagaaaacttccattaaatatttatcagattcaaactaaatttagagacgaggttagacctagatatggaattatgcgtggaagagagtttttaatgaaagattcttacagctttaatatcgatgaggagtcgttacaggaaacatatttaattatgagagaaacttataaaaaagttcttgaaagaataggacttaaatacaaaatttctgctgcagactctggagccattggcggggatagttctgaggaatttcatgtgcttgctgaaaatggtgaagatacaattgccataagtgattcatctgaatttgcaatcaatactgagcttcttttaaaagatggagaagatataagcacacttgaaggcaaaccttctccagatggcaatggaacaattcaaataaggaaaggaattgaggttggtcatatttttaaacttggaaagttatatgcggaatcaatgaaagcaagtgttctgaattctgatggaaatgcttcaacattatttatgggttgttatggaattggggtttcaagacttgttgcagcagcaattgaacaaaatcacgatgaaaaaggtattatttggcctcatagcattgcaccctttgacataaatattatttccattggatatgataagaataaagatattgctaaagcatcaaaagatttatacaaagaactttcagaaatgaattattctgttctgctagatgatagaaaagatggatacggagtgaaaatgaaagattcagaacttataggaatacctctaaatattgtaattggtaaaaaatttactgaaaataatgaagttgagctcataggaagaaatggcgaaatctcatcaaactcaattgaagatattaaaacaatacttgagttctttaaaaattaa

SEQ ID NO: 298918 - DNA, 983 bp, Unknown
  Bacterial polypeptide expressing nucleotide sequence isolated from the Sargasso Sea
acatgaaagagatttttgtcttggtcctactcacgaagaagttattacagacataattagagacaatgttaaaagttataaagaacttcctctaaatatttatcaaattcagacaaaatttagagatgaggttcggcctagatatggaatcatgagaggcagagaatttttaatgaaagattcatatagttttaatattgatgaagaatctcttcaagaaacatacctagcaatgagggaaacttataaaaaagttttagaaagaattggactccaatacaaaatatctgcagcagattctggttcaattggtggagatagttctgaagaatttcatgttctagctgaaaatggtgaagacacaattgctattagtgattcatcagagtttgcaataaataccgaacttcttttaaaagatggagaggatattagctcgcttgaggggaaaccttcgccagatggtaatggaacaatacaaattaaaaaaggaattgaggttgggcatatttttaaacttggaaaactttatgcagaatctatgaaagctaatgttttaaatgctgaaggaaaagcttccacattgtatatgggctgctatggtatcggtgtatcaagattagttgcagcagcgatagagcaaaactttgatgataagggaataatttggccacacagtattgctccttttgatataaatatcatctcaattggctttgataaagataagaagatagcatctgcttctttagaactatacaatgagttgtctgatatgggttacgatgtccttttggatgacagaaaagatggctatggcgcaaaaatgagcgattctgagcttattggaattcctttaaatataattattggtaaaaaatatcttgagaataaagaaattgaattagttggtagaaatggagacagttcaataaacccgattgatgacattaaaacaatattagatttttttaaaaattaat

SEQ ID NO: 298919 - DNA, 1330 bp, Unknown
  Bacterial polypeptide expressing nucleotide sequence isolated from the Sargasso Sea
atgttattatctaaatcatttgtacccatactaaaaaataatccttcagaagctaaaattaaatcccaccagttaatgttgcgggtagggatgatcaaacaagcttcagcaggaatttactcttggttgcctttaggtttcaaaataatgaaaaaaattgaagagatagtaagacaggaacaaaataaaattggtgcacaagaaattttaatgcccacaattcaatcaagcgaaatttggaaagaaagtggtaggtatgaggattatggtgaggaaatgcttagaattaaagatcgtcaaaaccgtgagatgctttatggtccaaccaatgaagagcaggtaacagaaatttttagatcctctttaaaatcatataaatcactcccacaacttctttatcatattcagtggaaatttagagacgaaattagaccaaggtttggaattatgagaggtagagaattttatatgaaagatgcttattcatttgatgtttctgatgaagaagcattttattcttataataaattttttttatcttatttaagaacttttaaaagattagctttaactgcaatcccaatggctgcagacacaggacctattggaggaaatttatctcatgaatttattatattagctgacaccggtgaaagtaaaatttttacagataaaaggatttttgatttaaatagtaatgacacagaattggaaaaaaattccttacaacagatgagaaaaaaatatgaacagtattattctgtgactgatgaaaaattcaataaggatgaatttgaaaaagttgtatctgaagaaaatagattgatcacaaaaggtattgaagtaggacacattttttattttggtgacaaatattcaaaagcaatgggggcatcagttgatttaccagggggtaagaaagattttgttaaaatgggctcatacggaattggtgtatccaggctagttggtgcaattatagaggctaaatttgatgacaaaaatgaaatcatgaaatggccattgtctgttgctccttatgatattgcgttagtacccatgataaacaaaaatgatacatcagctctagataaagcaattaatattaacaaagaattaattaaaaataatattgatgctttgattgatgatactgatgaaaattattcatcaaagataaaaaaaatgaatttaataggtgcgccttatcaaatcattattggtaaaaaatcagagggtgatttattagagtttaaagaaataggtgaagaaactcaaaatttatctttaaccaaaattatagaaattattaaaaaacaaaaaaattaaa

SEQ ID NO: 298920 - DNA, 990 bp, Unknown
  Bacterial polypeptide expressing nucleotide sequence isolated from the Sargasso Sea
tatgaggcgaagtaaattatttcttccaacattaaaggaaaacccttccgaggcgtcaattaactcacatagattaatgcttagagctggtatgataaggcagtcttcctcaggaatatatacttggttgccactaggttataaagttttaagaaaaatagaaaaaattataagatttgagcaaaatttaatatctcaagaattattaatgccaactatacaagattctgaaatatggaaaaaatctggcaggtttaatgattatggtaaagaaatgcttaaatttaaagataggcatgaacatgaattattatatggtccaactaatgaagaattgattacagatattttttctaaaaatataatgagttataaaagtttgccactttgcttatatcatatccaatggaagtttagagatgaaataaggcctagatttggagttatgagaggtagagagtttttaatgaaggatgcctattcattcgataaaaataaagatgatgcaattgagtgttataatagaatgttcttaaattatttaagaatatttgataaaatggagctcaaagcgataccagttgcagctgatactgggcctattggtggagatttaagtcatgaatttattattttagctgaaacaggagaatctgatgtttttcttgataaaaatatattaaatgaaaaaatcccgaatataaaatatgatgatccaatatctatttctaaattagtaaataaattaacttcttattatactgctgcagatgacaagcatgatcacgatagatatttaaaatcggtaaaagaggaaaacagaattaaaactagaggtattgaggtaggacatttattttattttggagataagtattctaggccattaggagcaaatattgctaatgaaaaaggggtaaacattcctgtagaaatgggttcatatggaattggagtatctcgattagtaggaggtataatagatgctca

SEQ ID NO: 298921 - DNA, 1184 bp, Unknown
  Bacterial polypeptide expressing nucleotide sequence isolated from the Sargasso Sea
agttgcatcgggggatctatacattggcttccctattggattaaaagtattaagaaaggtagaaaatattgtccgagaagagatgaatgcgtctggagcacaagaagttctgatgccaatggttcaaccaaaagacctatgggaagaaactcaaagatgggaaaagatgggtccagagctattacgaattcaagatagacatgaaagagatttttgccttggcccaacacacgaagaagtaataacagacttaatcagaaataattttaaaagctataaagaattacctctaaacctttatcaaatccaaactaagttcagagatgaagtgaggccaagatatggcgtaatgagaggaagggagtttttaatgaaagactcctatagctttaatctaaatgaagaatcattaaacgaatcatatctcgcaatgaaagaagcctacaaaaaaattctagataggttgggtttaaaatttaaaattgtaaaagcagattcaggggcaattggtggcgatacatcagaagaatttcatgttttagcagataatggtgaagataccattgcggtcagtgactcctcggattttgctattaataccgaactattactcgaggatggagatgatctagaatctcttcaaggaaaaccatcacctgatggaaaaggtgttattgaaattaaaaagggaattgaagttggtcatatttttcaacttggcaaagtttatacagatgctatgaaagcaaatgttcttgataatgaaggaaaagcaacgagcctctttatgggttgctatgggataggagtatcaagacttgtagccgcagcaatagagcaaaacaatgatgaaaaaggggtcatatggccggaggctatgactccgttcgaagtaaatatcgtcgctataggttttgacaaagataaaaaaattgcaaaagctgcgacagatttatataaccaattattatccatgggatacgaggtaatacttgatgaccgaaaagatgggtatggagtaaaaatgaaagatgctgaattaattggtattccaataaatattattattggtaaacaatatctgcaaaataacgaaatagagcttaaacacagaaatggtcaaagctctattggaaaaattgaggatattacaactatttttgagcactacaaaagtagctaat

SEQ ID NO: 298922 - DNA, 730 bp, Unknown
  Bacterial polypeptide expressing nucleotide sequence isolated from the Sargasso Sea
tatgaaattatcgaattatcctctaaaaacattcaaagatgctccgtctgatgccgaactcatttcacatcaactcatgctgagggcaggactcataaaaaaattggcttctggaatattcacatggatgccgtttggattgaaagtcttaagaaagattgagcaaacggtgaggaaagaaatggatgcgtctggagcttttgaagtaatgatgccaacgatacaaccttcagaattatggcaagaaaccaatagatgggaagactacggtgatctgcttttacaaattcatgaccgtcatgatcgtcttttttgttatggtcctacgcatgaagaggttattacagatatactcagaaaaagtgtaaagagctataaacagctaccagtcaacttctatcagattcaaactaagtttagagatgaaatcagacctcgattcggcgttatgagagcgagagaattcctgatgaaagatgcttactcatttcatctgaaccaagaatcccttgaagaagaatatgaaaatatgaatcaaacgtatcaaagcatattcaaaaaattggagcttaattttaggagggttgaagctacaagcggagaaatcggtggttcggtctcgcatgaattccatgtgatagcagattctggtgaagatgaaatcgctttttgtgatgatgaaaactttgccgcaaacgtagaaacattagaggataaaaatgcgccgaac

SEQ ID NO: 298923 - DNA, 947 bp, Unknown
  Bacterial polypeptide expressing nucleotide sequence isolated from the Sargasso Sea
tatgcggaccagtcagtatttactctctacgatgaaagaaaccccggccgatgccgaaataatcagccatcaattgatgttacgtgccggtatggtgcgtcgtctggcgtcaggcttgtacacctggttgcccagtggcctgcgggttttacgtaaggtagagcaaattgtccgtgaagagatgaacaaagccggcgctattgaagtgttaatgccggtggtacaacatgccgagctgtggcaggaatccgggcgttgggaaaagatggacgccgaattgctgcgttttaaagaccgtcaccagcgcgattttgtgttaggcccaacgcatgaagaggtgatcaccgatttagtccgcaaagaaatcagcagctacaaacagctgcctattaatttgtatcaaattcagaccaagttccgtgatgaacgtcgtccacgttttggtgtgatgcgtgcgcgcgaatttttaatgaaagatgcctactcttttcatttaagtcaggaaagtttgcagcacacttatgacgctatgtatcaggcgtactgcaatattttcacccgcttaggtttagatttccgccctgtgttagccgatacaggcgccattggtggcagcatgtcacacgaattccacgtactggccgcttctggtgaagatgcgattgtattctctgatgagagcgattatgccgctaacatcgaaaaagcagaagcactgccaccacaaggtcagcgccctgctgcaactcaacccaaaactgaagtggcaacacccaacgcgaaaagcattgatgaggtggcagcctttttaaagcgagatgccgcggccattgctaaaaccttactggtgcaactgaacccggaattaagctttgatgaagtaaaagcgctgctggcgaatgcagatgccgaagttcttgaaaacacctggcgctctaaagtcgttg

SEQ ID NO: 298924 - DNA, 1108 bp, Unknown
  Bacterial polypeptide expressing nucleotide sequence isolated from the Sargasso Sea
atgcatatttctaaatcttttattcctattttaaaaaataacccctcagaagcaaaaataaagtctcaccagctaatgttaagagttggaatgataaaacaatcttcagcaggcatatactcttggttgccccttggttttaaagtaatgaaaaaaattgaaagaattgtcagagaagagcaaaacaaaataggtgcacaagaaatactaatgcccacaatacaatccagcgagatttggaaagagagtggacgttatgaggattatggtgaggaaatgttacgaataaaagatcgtcaagatcgagaaatgctttacggaccaacaaacgaggaattagtaactgatatttttagatcttctctaaaatcatataaatcattacctcaacttctttatcatattcaatggaaatttagagatgaaatcagaccaagatttggaattatgcgatgtcgagaattctatatgaaggacgcatactcttttgacattacagatgaagatgctttgttttcttataataaatttttcttatcttacttaaaaacttttaaaagattagatcttacagcaattccaatggcagctgacactggtcctattggtggaaatctttctcatgaatttattatcctagcagaaactggagagagtaaaatttatgcagataaaagaatatttgacttaaattttgagggaacaaaacttgaagttaaatccttacttgaattgagaaatcaatatgaaaaattttattcagttactgatgataaatttaaagaggatgagtttaatgaaaaagttttagagaaaaatagattgaaaacaaaaggtatagaagttggtcatattttttattttggagataaatactccaaaccaatggatacagcagtcgatttacctggaggaaaaaaagactacgttaaaatgggatcttacggaataggagtttcaaggttagtaggagcaattatagaggcaaaatatgacgaaaaaaatgaaaatcatgaatggccaatttctgttgcaccatatgatatttgcgatattcctatgattaataaaatgatacatctgcacttgataaagcaaacaaaataaa

SEQ ID NO: 298925 - DNA, 1113 bp, Unknown
  Bacterial polypeptide expressing nucleotide sequence isolated from the Sargasso Sea
tatgttagtttcaaagctacttttaccaactcttaaggattcacctcaagaagcagagattgttagtcatcagttaatgcttcgagcgggtttaattagaaaagttgcatcaggcatttatacgtggctgccccttggattaaaagttcttaaaaaaattgaaaatattgtcagagaagaaatggatttatctggtgctcaagaagtttgtatgcctatggtgcttccaagagaactatgggaagaaacaaatagatgggaaaaaatgggtcctgaattgcttagaataaaggatcgacataatagagatttctgcttgggtccaacacatgaagaaatcataactgacattataagaaataatgtcaaaagttataaagaacttcctttaaatatatatcaaatacaaactaaatttagagatgaagtaagaccaagatatggaattatgagaggaagagagtttttaatgaaagattcttacagttttaatattgatgaagaatcgttacaagaaacatatttaactatgagagaaacatataaaaaaatattagatagaattggactggaatataaaatttctagagctgattcaggttccattggaggagatagctctgaagagtttcatgttttagcagaaaatggtgaagatattatagccataagtgatagttcagagtttgcagttaatagtgaactactattaaaagacggagaagatataagctctttagagggaaagccctctccagatggtcaaggtacaattcaaattaaaaaaggtattgaggttggtcatatcttcaaactaggaaagatttatgctgagtcaatgaaagcaagtgttcttgattcaaatggaaaagcctctttactatacatgggctgttatgggattggggtttcaaggttggttgcagcagcaattgaacaaaattatgatgataaaggtattatttggcaccatagcatttctccatttgatataaatataatttcaataggtcatgataaaaataaagaaatcgcgacggcctctaataaattatataaagatttaaatgaaatgggctattcggttcttcttgatgatagaaaagatgggta

SEQ ID NO: 298926 - DNA, 1714 bp, Unknown
  Bacterial polypeptide expressing nucleotide sequence isolated from the Sargasso Sea
atgcgcgttagcaaatacctactttctactcaaaaagaaacacctgcgaatgcagaagtcatcagccatcaattaatgctacgtgcgggtatgatccgccgtaacgcttcaggtctatacagctatctgcccacgggcctgcgtgtattgcgtaaagtcgaagccattgttcgtgaagaaatgaacaaagcgggcgcgattgaaatccttatgccaatggtgcaaccggctgatttatgggtagaaacgggtcgttgggacaaatttggtcctgagctgctgcgttttaaagaccgccataaccgtgacttcgttcttgggcctacccacgaagaagtaatcaccgacttaatccgtaaagaagtcagctcttacaagcaattaccgctgaatctttaccaaatccagaccaaattccgcgacgaagtgcgcccacgctttggcgtaatgcgttcgcgcgagttcctgatgaaagatgcgtattctttccatctggacgtggataccatgaatgaaacctatgaggccatgtatcaagcctatagcaacattctgtcacgcatgggcttggccttccgcccagttttagcggacacaggttctatcggtggcagcatgtcacacgagttccacgtattggcgcaaagcggtgaagacttaatcgcctactctactggcagcgactatgccgctaacatcgagaaagccgaatcgccaatgccaaccgaagcgcgtggcgcggcaactgaagaattacgtttagtcgataccccaaatgcgaaaaccattgccgagttagttgagcaattcggtttagatatcactaagacagtgaaaaccttgattgtgaaaggtgcgacggaagaagccccactggttgcgctgattgtacgcggcgaccacgagctgaacgaaatcaaggcagacaagttagatttagtggcatcaccattagaatttgccccagaagccctgatccgtgatgccattggcgcaggtcctggctccttaggccctgtcggcctgaatatgcctatcatcatcgaccacagtgttagcgtgatgagcgacttcgctgccggcgctaaccaagatgacaaacactactttggcatcaactgggagcgcgatctgccactggcacaagcagccgatatccgtaacgtggttgaaggcgagccaacacctgatggtttaggtacttacgctatggcgcgtggtatcgaagtgggtcatatcttccaactcggtactaactattctaaatcgatgaatgcgactgttctcgatgagaacggtaaatcacaagtgctgctgatgggttgttatggtgttggcgtgagccgtatcgtggcggctgctattgagcaaaacttcgatgaccgcggcattgtatggccagaagccattgccccattcagtgtaggcattctgccaatgaatatgcacaagtcacaccgcgtgaccgatatcgccgagcagttatacaaagacttaagtgctgcgggtatcgatgtgctactggatgaccgtaaagagcgcccaggcgtcatgttcgccgatatggaactgattggtattccacatacagtggtgatcggcgatcgcaatatcgacgctggcgtatttgaatacaaaaaccgccgcaccggtgaaaagcaagatgtgccattcgaccaaatcgtcgatttcttaaagaatctgcaagcttaag

SEQ ID NO: 298927 - DNA, 1138 bp, Unknown
  Bacterial polypeptide expressing nucleotide sequence isolated from the Sargasso Sea
atgttattttcaaagctactaatacctactttaaaagatgccccgcaagaagctgaagttatcagtcacaaattaatgcttcgagcaggaatgattcgaaaagtggcatctggaatatacacatggctacctttaggtttaaaagttctcaaaaaaatagagaatatagttcgagaggaaatggattcatctggggcacaagaagttttcatgccaatggttcaaccaaaagaattatgggatgaaacaaaaaggtgggagaaaatgggtccagaacttttaagaattaaagataggcatgagagagatttttgtctgggccctactcacgaagaagttataacagacataattagagataatgtaaaaagctataaagaacttccacttaatatttatcaaattcaaactaagtttagagatgaagttagaccaagatatggaattatgaggggaagagaatttctgatgaaagattcatatagcttcaatattgatgaagaatctcttcaagaaacttacctactaatgagggatacctataaaaaagtactagaaagaattggacttgaatataaaatttctgctgctgattctggagcaattggtggagacagttctgaagaatttcatgtcttggctgaaaatggagaagatactattgctgtcagtgactcatctgaatttgcaataaatacagaactcctcttaaaagaaggtgaagatataaattcacttgagggaaaaccttctccagacggaaatggaacaatacaaattaagaaaggtattgaggttggtcatattttcaaacttggtaagctttacgccgaatcaatgaaagctaatgttttaaatgctgaaggtaaagcttcaacattgtatatgggttgttatggtatcggtgtatcgagactagtggcagcagctatagaacaaaattttgatgacaaaggaattatttggcctcatagtatagctccgtttgatattaatattatcgcgatcggttttgataaagataaagaaattgcgtcggcatcaataaaattatatgaagaattaactgacatgggttatgacgttcttctggatgataggaaaggacggttatggtgcaaaaatgaaagattctgaa

SEQ ID NO: 298928 - DNA, 1282 bp, Unknown
  Bacterial polypeptide expressing nucleotide sequence isolated from the Sargasso Sea
atgttattttcaaagctactaataccaactttaaaagaagctccacaggaagcagaaattgtaagtcacaaactaatgctgcgagcgggaatgattaggaaagttgcatctggcatatatacttggctcccattagggctcaaagttcttaaaaagatagaaaatatagttcgagaggagatggatgcttctggagcgcaagaggttttcatgccaatggttcaacccagagaactttgggaagagactaatagatgggaaaaaatgggtcccgaactactaagaattaaagataggcacgatagagatttttgtcttggccccactcatgaggaggttatcaccgatattattagagataatgtaaagagctacaaagaactacccctgaatatttatcagattcaaacaaaattcagagatgaagttaggccaagatatggaattatgaggggaagagaatttttaatgaaagactcttatagttttaacaatgatgaggaatcattgcaagaaacatacctcttgatgagagaaacgtataaaaaaatccttgaaagaattggtcttgattacaaaatttctgcagctgattcaggtgcaataggtggtgatagctctgaagaatttcatgttcttgctgaaaatggtgaagatacaatagctgttagcgatgcttcagaatttgcgattaatacagaacttctcttaaaagatggtgaagatataaaatcacttgaaggaaaaccttctccagatggtaaaggcataattcaaattaaaaaaggaattgaggttggtcatatttttaaacttggtaaactttatgctgaatctatgaaggcaaatgtcctaaattctgatggaaaagctcaagtactttgtatgggttgctatggaattggtgtttcaagacttgttgctgcatctattgaacaaaattatgatgaaaaaggaattgtttggccacatagcatagctccatttgatataaatataatttctattggtcatgataaaaataaagacattgaaaaggcttcaatgaaactttacaaagatcttaccaagatgaattattcagtactgctagatgatagaaaagatggttatggtaagaaaattaaagactctgagctaataggaattcctttaaatataattgttggtaataaatatctagaaaatgaagaagtcgagcttctagcaaggaatggagagagttcaataaatccagttagtgatttaaaaacaatattagatttctttaaaactaaataat

SEQ ID NO: 298929 - DNA, 1714 bp, Unknown
  Bacterial polypeptide expressing nucleotide sequence isolated from the Sargasso Sea
aatgcgcgttagcaaatacctactttctactcaaaaagaaacacctgcgaatgcagaagtcatcagccatcaattaatgctacgtgcgggtatgatccgccgtaacgcttcaggcttatacagctatctgcccacgggcctgcgtgtattacgtaaagtcgaagcgattgttcgtgaagaaatgaacaaagcgggcgcgattgaaatcctaatgcctatggtgcaaccggctgatttatgggtagaaacgggtcgctgggacaagtttggtcctgaactactgcgttttaaagaccgtcatagccgtgacttcgttctgggaccaacccacgaagaagtgatcaccgacttaatccgtaaagaagtcagctcttacaaacaattaccgctgaatctttatcaaattcaaactaaattccgcgacgaagttcgcccacgttttggcgtgatgcgttctcgcgagttcctgatgaaagatgcttattctttccatcttgatgtggataccatgaatgaaacctatgaggcgatgtatcaagcctatagcaacattctgtcgcgtatgggcttagccttccgtccggttttagcggacacgggttctatcggtggcagcatgtcacacgagttccacgtactggcgcaaagcggtgaagacttaatcgcctactctacgggtagcgattatgccgctaacatcgagaaagccgaatcgccaatgccaaccgaaacgcgcggcgcggcgactgaagcattacgtttagtcgatacccccaatgcgaaaaccattgctgagttagttgagcaattcggtttagatatcactaaaacagtgaaaaccttgattgttaagggtgcgactgaagcggcgccactggttgcgctgattgtacgtggtgaccacgagctaaatgaaatcaaggcagataaattagatttagtggcatcaccattagaatttgccccagaagccctgatccgtgacgccattggcgcaggtccaggctcattaggccctgtcggcctgaatatgcctatcatcatcgaccacagtgttagcgtgatgagcgattttgctgccggcgcaaacgtggatgataaacactactttggtatcaactgggagcgcgatctgccactggcacaagcggccgatatccgtaatgtggttgaaggcgagccaacaccggatggtttaggtacctatgccatggctcgtggtatcgaagtgggtcatatcttccaactcggcactaactactctaaatccatgaacgcgactgtacttgatgagaacggtaagtcacaggtgctgctgatgggttgttacggtgttggtgtgagccgtatcgtggcagctgcgattgagcaaaactttgatgaccgtggcattgtatggccagaagcgattgcaccatttagtgtgggcattctgccaatgaatatgcacaagtcgcaccgcgtcaccgatatcgccgagcagttatacaaagacttaagtgctgcgggtatcgatgtcctgttggatgaccgtaaagagcgtccaggcgtgatgttcgccgatatggagctcattggtattcctcacactgtggtgattggtgatcgcaatatcgacgcgggtgtatttgaatacaaaaaccgccgcactggtgagaagcaagatgtaccattcgaccaaatcgtcgatttcttaaagaatctgcaagcttaa

SEQ ID NO: 298930 - DNA, 1282 bp, Unknown
  Bacterial polypeptide expressing nucleotide sequence isolated from the Sargasso Sea
tatgttattttcaaagctactaatacctactttaaaagatgctccgcaagaggctgaagttattagtcataaattgatgcttcgagcaggaatgattcgaaaagtagcatcaggtatatatacttggttacctttaggattgaaggttcttaaaaagatagagaatattgttcgagaagaaatggatgcatcaggagctcaagaagttttcatgccaatggttcaaccgaaagaattatgggatgaaaccaaaagatgggaaaaaatgggtccagaattattaagaattcaggatagacacgagagagatttttgtcttggccctactcatgaagaagttataacagacataatcagagataatgtaaaaagttataaagagcttccattaaacatttatcaaattcaaactaaatttagagatgaggttaggcctagatatggaattatgagaggaagagaatttcttatgaaagattcctatagcttcaatattgatgaagaatctctacaagaaacctatctgctaatgagagacacctataagaaagtattagaaagaattggtcttgaatataaaatttctgctgctgattctggagcaattggtggagatagttctgaagaatttcatgttttggctgaaaatggagaagatactattgctgttagtgactcatctgaatttgcaataaatactgaactccttttgaaagaaggtgaagatataaattcacttgaaggaaaaccttctccagatggaaatggaacaatacaaattaagaaaggtattgaggtaggtcatatttttaaacttggcaagctttatgctgaatcgatgaaagctaatgttttgaatgctgaaggtaaagcttcgacattgcatatgggttgttacggaattggtgtatcaaggcttgttgcagcagctatagaacaaaattttgatgaaaaaggaattatttggcctcatagcatagctccatttgacattaatattattgcaatagggtttgataaagataaagaaatcgcatcagtatcactaaaattgtatgaagagcttactagcatgaattatgacgttctacttgatgataggaaagatggttatggtgcaaagatgaaggattcagagctcataggcattccattgaatattattattggtaaaaaattcctagaaaacaaagaaattgaattaaagggtagagatggacaatcctcaactaattcaattacagacataaaaacaatattagaattctttaaagataaataa

SEQ ID NO: 298931 - DNA, 1282 bp, Unknown
  Bacterial polypeptide expressing nucleotide sequence isolated from the Sargasso Sea
atgttatttacaaagctactaatacctactctaaaagatgcgcctcaggaagcagagattgtaagccatcaattaatgctaagagcaggaatgattagaaaagttgcatcaggaatatatacatggctcccacttggtctaaaagtacttaaaaagatagaaactatagttagagaagaaatggatgcttcaggtgctcaagaggtttttatgccaatggtacagccaagagagctatgggaagaaactaacagatgggaaaaaatggggccagaattattaagaataaaagatagacatgaaagagacttctgcctaggtccaactcatgaagaagttattacagatatcataagagataacgtaaagagctataaagaattacctttaaatatatatcaaatacaaaccaaatttagagatgaggttcgacctagatatggaattatgagaggaagagaatttttaatgaaagattcatatagtttcaatattgatgaagaatcattacaagaaacttacatactgatgagggaaacgtataaaaaagttcttgaaagaattggtcttgaatacaagatatcttcagcagattcaggctcaataggcggtgacagttcagaagaatttcatgttttagcagaaaatggtgaagatacaattgcagtaagtgattcttcagagtttgctatcaatactgaacttttattaaaggatggtgaagatataagctcacttgagggcaagccatctccagatggaaaaggaacaatacaaattaaaaaaggaattgaagttggacatatttttaaattaggaaaattatatgctgaatcaatgaaagcaaatgtcctcaactctgatggggaggcatctactttatatatgggttgctatggtattggtgtatctagactggttgcagcagcaatagagcagaactttgatgataaaggaattatttggccacatagtattgcaccatttgatataaatattatttcaattgggcatgataaagataaggagatagcctctgcatcaatagatctttataaagaattaattaaaatgggttactcggttttactagatgataggaaagatggatatggtacaaaaataaaagattcagagttaataggtatacctttaaacatcatagtgggtaaaaattatctagaaaataaagaagttgaattaaaaggcagagatggagaaagttcaacaaatccaatcactgatataaaaacaatcctagatttttttaaaaataaataac

SEQ ID NO: 298932 - DNA, 965 bp, Unknown
  Bacterial polypeptide expressing nucleotide sequence isolated from the Sargasso Sea
tgttagagaagagatgaacaatgcgggagcgcatgaagtgctaatgccgatggtacaaccaaaggacttatggaatgaatcaaagagatgggacaaatttggtccagaattgcttagatttaaagatcgtcacgatagagatttttgcctaggccctactcatgaagaagtaataactgatttaattaaaaataatgtcaaaagttataaagagcttcctttgaatatatatcaaatacaaactaaatttagagatgaaataagaccaagatatggagtgatgaggagtagagaattcttaatgaaagattcttacagctttcatctttctgaagaaagcttggaagaaacataccaaataatgagaaatgcctactcaaaaatttttgagagaataggactagatttcaaaatagtaaaagcagactcaggcgcaattggtggagataaatctgaggaatttcatgtacttgcagaaaatggtgaagatactcttgcagtatctgataaatctgattatgcggttaatgctgagcttttgcttgaaaatggtcaagattcaaaatcactagttggacaagaatcacctgatgggaatggattgctggaaattacaaaaggtattgaagtgggacatatattccaattgggcaagctgtatagcgaaaatatgaatgcgactgttttagatgactcaggtaaagctaaaaacatgcacatgggatgttatggaataggtatctcaaggatagtcgcggctgcaattgaacaaaattttgatgataagggaattatttggccaaaatctatttctccttttgatttaaatataattacaatcggggctgataaagacaaaactattgaagcatcatccagaaaactttataaagagctcactcagaaaggggtcgaggtagtattggatgatcgagatgatggttttgggaaaaagataaaagatt

SEQ ID NO: 298933 - DNA, 811 bp, Unknown
  Bacterial polypeptide expressing nucleotide sequence isolated from the Sargasso Sea
ctgccccagctgcatccagccgaattgtgggagcgcagtggtcgctggcagggatacacggccggcgaagggatcatgttccaccttgaagatcgtcagggtcgggaactgggtctcggaccaacccatgaggaggtgatcaccagtcttgccggtgagttgttgcgctcatacaaacagttacccgtcaacctttatcaaatccagaccaaattcagagacgagatcagaccgcggtttgggttaatgcgcggacgggaattcatcatgaaggatgcctattcgtttcacgccgacgagtcggatttaaaggcgacgtacgcggtgatggatcaggcctaccgccgcatcttcgagcgttgtggactggacgccgtgcccgttgatgctgacagcggcgccattggcggagcagcatcgcaggagttcatggtgaccgccgaagctggcgaagacctcgttctgatcagcgatgacggggtttacgccgccaatcaggagaaggcggtttctctggcctccacggccgtccccctggacaccacggaagcagcattgccaaccggtggcttgctgatcgacacgcctggacaggtcaccatcgccgatctgtgtgcggcccagggttggcacccctctcaggtcgtgaaggtgctgcttcttttggcacacctggaagacggcacagatcaaccggtgttggtcagcctccgcggcgatcaagagctcaacgacgtgaaactgatcaatgccatctcccgcctgagtgaacagggcgtgctcgattgccgtccgatcagcagtgaggcgc

SEQ ID NO: 298934 - DNA, 888 bp, Unknown
  Bacterial polypeptide expressing nucleotide sequence isolated from the Sargasso Sea
gcttagatttaaagatcgtcatgatagagatttttgcctaggccctactcatgaagaagtaataactgatttaattaaaaataatgtcaaaagttataaagagcttcctttgaatatatatcaaatacaaactaaatttagagatgaaataagaccaaggtatggagtgatgaggagtagagaattcttaatgaaagattcttacagctttcatctttctgaagaaagcttggaagaaacataccaaataatgagaaatgcctactcaaaaatttttgaaagaataggtctagatttcaaaatagtaaaagcagactcaggagcaattggtggagataaatctgaggaatttcatgtacttgcagaaaatggtgaagatactcttgcagtgtctgataaatctgattatgcagttaatgctgagcttttgcttgaaaatggtcaagattcaaaatcactagttggacaagaatcacctgatgggaatggattgctggaaattacaaaaggtattgaggtgggacacatattccaattgggtaagttgtatagcgaaaatatgaatgcgactgttttagatgactctggtaaagctaaaaacatgcacatgggatgttatggaataggtatctcaaggatagtcgcggctgcaatagaacaaaattttgatgataagggaattatttggccaaaatctatttctccttttgatttaaatataattacaatcggggctgataaagacaaaaatattgaagcatcatccagaaaactttataaagaactcactaagaaagggtttgagctaatattggatgatcgagatgatggttttggaaaaaagattaaagattctgagttaattggcgttcctgtatcgatcgtttt

SEQ ID NO: 298935 - DNA, 762 bp, Unknown
  Bacterial polypeptide expressing nucleotide sequence isolated from the Sargasso Sea
agagatgagataagacctagatttggattaatgagaagtagggaatttataatgaaggatgcttattcttttcactcttcaaaagaagatttgtcttctttttacgaaaaaatggaaaaagcttatgaaaatatttttaaaaattgtggattagatacagttggcgtggatgccgatagtggagcaattggaggagcagcatccaaagagtttatggtaacagcagatgcaggagaagattctattttatttactgagagtggttcatatgcagccaatattgaaaaagccgtttctttgccgtccgaagagattcctttaataatgtcccatgaagaatggatagaaacccctaatcaaaaatcgattgttgatatttgtcaaaataataatttagatgcaagtcaaataattaaggtggttatattccttgcaaaatttgaagataaatctgaagtcccaatcctcgcatgtatcagaggagatcagaatattaatgaagtcaagctttttaatttgatcaacaaaaaatatatttcaaacttgattcacctaaaaatagtcgaagacaatgccattattaataaaaatctaactaattttccattaggttttattggcccagacataaatgatgaaacaataaaaactaattccagttgggataaaagttggataagaatcgctgactactctgccagtaatctttcaatttttgtgagtggtggtaataaagttgattttcacaaagtattccgtgcg

SEQ ID NO: 298936 - DNA, 859 bp, Unknown
  Bacterial polypeptide expressing nucleotide sequence isolated from the Sargasso Sea
aaatcatataaatcacttccacaaattctttatcacatacagtggaagtttagagatgagataagaccaagatttggtgtgatgagatgtaaagagttttttatgaaagacgcatactcctttgatcttacagatgatgatgcaagaaaatcttataataaaatgtttttctcttatttaaaaacttttagcagattagggttaaaagccatcccaatggctgctgacaccggaccaatcggtggagatctttctcatgaatttattatattagctgaaactggtgaaagccagatatttgctgacaaaagaatatttgagattaatttagataaatatgattttagcgactcttctctctttaaaatgagaaaagattttacagatatttatgcagctacagatgaaaaatttgatgaaaaaaagtttaataaagaagttgataaaaaaaatcagataaaaacaaaaggaattgaggtaggacatattttttactttggtgataaatactcaaaaccaatgaattgcttaatagatgataaaagtggaaaaaaaatttctgtgaaaatgggatcatatggtattggcgtatccagacttgtaggtgccgcaattgaagcaaattatagtaatggtataatgaaatggccaaaacctatatctccatttgatgtagttattataccaagcatcagtaaaaacagtaaagaacacttacaaaaagcagaaaaaatataccaagatttaaaaaaacaaaatattgacgtattgttggatgatgttgatgagaatatgtcaaataaatttaaaaaacacgacttaataggtattccttttcaaataattattggatcaaaat

SEQ ID NO: 298937 - DNA, 913 bp, Unknown
  Bacterial polypeptide expressing nucleotide sequence isolated from the Sargasso Sea
atgagagcatcaaaatatcctctattcactcaaaaaaatgatctttcagatgctgatatagtcagtcataaattgatgataagaggtggttttatccgtcaacaatcatccggacaatatacattaatgccaatgggaataagagtccttaagaagattgaaaaaattattaggcgacagatggaaaatattggttgtttagaagtgttaatgccatcagtccaaccagcagaactatggattcaatcaggtagatgggataattatggacctgaacttctccggctgcaggatagacacaagagagattattgcttaggtccaacttttgaggaagttattactgatttaattaaaaaagatttaaatagttataaacagctgcctattaatttattccaaatttcatcaaaatttagagatgagatacggccaagatttgggttaatgcgcgcaagagaatttattatgaaagacgcctattctttccatttgaatagagaatgtttagatgaaacatatttaaagtataagagtgcatataaaaatatatttgatgagattgggttagaatatacaattgtagatgctgatagcggtaatataggtggaagtgaatcacatgagtttcatgtccttgccgatactggcgaggatgatctacttatagatgaaacaggtaaaggggtaaatctagaaattgctaaatctaaatatgattcagatgacgtagctaaaataaaggagacaaataaccttattcacaaaaaaggtatagaagttggacatattttcaaattgggaactaagtatagccaatcaatggatttaagtatacttgatgcagaatctaaaaaacaaacaattgaaatggggtgttatggtattggtgtatctagaattatgtccgcgg

SEQ ID NO: 298938 - DNA, 853 bp, Unknown
  Bacterial polypeptide expressing nucleotide sequence isolated from the Sargasso Sea
catgaaagcatctaaatatccattatttactcagaaaaatattccttcagatgcagaaattataagtcataaattaatgcttaaggcaggactcgccagacaacaatcctctggtcaatatagctttcttccagttggatatcgtgtcttaaagaaaattgaaaatattataagagaagagatggatgctataggctctgctgaaatacttatgccatcagtccaaccctcagagttatgggaagaatcaggtcgatgggaaacatatggtctagaactactgaggctgaaagataggcatcaaagagactattgtttgggacccacttttgaggaagtaataacagacttagttagaaaagatttaaacagctataaacaattgcctattaatatgtatcaaatttcttcaaaatttagagatgagattagaccaaggtttggaatcatgcgtgcaagagaattcataatgaaagatgcctattcatttcatttgaatcaagaatgtcttgatgaatggtatgaaaattataaaaaagcttacaacaaaatttttactcgattacaacttgaatacacaatggttgatgcagatagtggaaacataggcggcaataaatcaaatgaattccatgttattgctgatacaggtgaggatgatttattgattgatcaagatggtattggtgttaattatgaaattgcaaaaacaaaatataattctgatgatattaaaaaaattattaaagaaaataatctagttcacaaaaaaggtatcgaagtcggacatatttttaaactcggagataaatatagcaaatcaatgaatctctcaatgccgatgcaggatcaa

SEQ ID NO: 298939 - DNA, 844 bp, Unknown
  Bacterial polypeptide expressing nucleotide sequence isolated from the Sargasso Sea
ccgatggtacaaccaaaggacttatggaatgaatcaaagagatgggacaaatttggtccagaattgcttagatttaaagatcgtcacgatagagatttttgcctaggccctactcatgaagaagttataactgatttaattaaaaataatgtcaaaagttataaagagcttcctttgaatatatatcaaatacaaactaaatttagagatgaaataagaccaagatatggagtgatgaggagtagagaattcttaatgaaagattcttacagctttcatctttctgaagaaagcttggaagaaacataccaaataatgagagatgcctactcaaaaatttttgagagaataggactagatttcaaaatagtaaaagcagactcaggcgcaattggtggagataaatctgaggaatttcatgtacttgcagaaaatggtgaagatactcttgcagtatctgataaatctgattatgcagttaatgctgagcttttgcttgaaaatggtcaagattcaaaatcactagttggacaagaatcacctgatgggaatggattgctggaaattacaaaaggtattgaagtgggacacatattccaattgggcaagctgtatagcgaaaatatgaatgcgactgttttagatgactctggtaaagctaaaaacatgcacatgggatgttatggaataggtatctcaaggatagtcgcggctgcaatagaacaaaattttgatgataagggaattatttggccaaaatctatttctccttttgatttaaatataatcacaatcggggctgataaagacaaaaatatgaagcatcatccagaaaactttataa

SEQ ID NO: 298940 - DNA, 832 bp, Unknown
  Bacterial polypeptide expressing nucleotide sequence isolated from the Sargasso Sea
gaaataaagtcatataaaaatctaccaataacaatttatcagattcaaccaaaatttagagatgaaataagacctaggtttggagtaatgagggctcgagagtttataatgaaggatgcctatagttttgatatagacgaaaattcagcagacttatcttataaaaagatgtttgaagcatataataggattttcgaaagatgtggcttagaatttcgtgcagttgaggcagattctggaaacatcggcggaagtttttctcatgaatttatggttttggctgaaacaggtgaagatttaataatggtttgtgatgaatgtgattatgcatcgaatattgaaactactcccgttgtttttactcaagatgatttaaatcaaaaaaaacatgaaaaaaatagtggtgctggtcgagaaatgccagagaataaaattgaaaaagtttctactccttcatgtattactgtagaagaagtatcagattttttaaagattaaaattaataaaattgtaaaaactatgattttatctacaaatcaaggaattgaagcagttttaataagaggggatcacgaacttagtttgacgaaatataaaaaaaatagagatctagagtttgcagatcttgctaccaatgaagaaatttcaaaaattaatactgtaaaaggatttagcggtccagttaatctggacataaacatttttgccgataatgaattaagaaatatgacctcctatgttactggatcaaatgaaaaagactttcatttattgaatgtaaaccatgaaaaagattttaaaattaaaggttttttagattgtagacaatccg

SEQ ID NO: 298941 - DNA, 756 bp, Unknown
  Bacterial polypeptide expressing nucleotide sequence isolated from the Sargasso Sea
attgaatgaggagattatagtgtatttctcaaaatttttcgtccctactacaagagaagatccctctgatgcggatcttataagtcataaacaaatgattaaatctgggatgataaaaaaaactgctgccggtatatataattggctccccctaggtctcatgataatgagaaatgttgaacaaattgttagaaaaaacatggatcaatcaggtgcacaggaaatacttatgccaatggttcaaccagcagaattatggaaggaatctttgagatatgatcaatatggtaaagagcttttgaaattctcggatcgatctgaaagagaatttgtattgggcccaacacacgaagaggttatttgtgaaatttttagatcgtatcccattagctataaagaattgccgattaacctctaccaaattcaaacaaaatttagggatgaaataaggcctagatttggtgtaatgagagctcgtgaatttttaatgaaggatgcatatagtttcgatataagtcaaagtggattacaaaaaagttatgaagaaatgagaaaagcatacataagaatttttgatgatattgggcttaattacagaatagtaagtgccgatggggggaatatcggtggagataaaagtgaagaatttcatattattgcagactcaggtgaagacttgcttgctttaagtgatgagagtgagttcgctgcaaatgttgagattcttgattacggaaaggatccaattgagctgca

SEQ ID NO: 298942 - DNA, 823 bp, Unknown
  Bacterial polypeptide expressing nucleotide sequence isolated from the Sargasso Sea
ctgtacacttttttgcctgccgggctaagagtactccaaaatattgaggcgattgtgcgccaagagattgatcgagcgggagccttggaggttttgatgccggccgtgcagccgccggaaatctggaagaccagcggccgctatgagcaggcgcacgacgtcctgtttaaggtgcgcgacagcaagcagcgagaatggctgcttggccccacgcacgaggaagtgatcaccacgatggccagtaccgagatcaattcgtaccggcaattaccgctcaatttttatcaggtacaaaccaaattccgcgatgaaatccgcccgcgctttggcctcatgcgcgcgcgcgaattcatcatgaaagatgcctatagctttgacgccaatgacgaaaccgcccttgtcagctaccaaaaaatgtacgacgcctacgtgcgcatttttcaacggtgcggcgtgcaggcttttcccgtggaggcagacaccggtgtaatgggcggcaattactcgcatgaattcatggtgccggcccaaaccggcgagagtgaagtggcctacaccgaagacggcagctacagcgccaaccttgaaaaagcagccagccaaggtcccgccacaaccacaccaaccgagtgcaccggagaggcagagacctttggtacacctggagtaaaaaccattgaagatttggaacaaaatccgttcaacgttcccgcacaccaacagatcaaaacactcgtttacattgccgaagacaaaccagccctggtgctgttgcgcggcgatgacacgctaaacgaagccaagctcaccggtgctttgggca

SEQ ID NO: 298943 - DNA, 821 bp, Unknown
  Bacterial polypeptide expressing nucleotide sequence isolated from the Sargasso Sea
tagagaatttataatgaaagacgcttattcttttcatgcagataaaaattgtctcgataaaacatatgattcttataaaaaagcgtatagtaatattttcaaaagacttggccttaacttcactttagtttcagctgatagtggtaatattggtggagatgaatctcatgagtatcatgttattgcagatactggcgaggatgatttattaatatctgatagtggccatggaatgaatgtagagattgctaaagaaaaatattctcttgaaaatttagatgatctcattgataaaacatctatgaaacataaaaaaggaatagaagttggtcacatatttaaactaggtcagaaatatactaaatcaatggattctaaaattactaacgaaaatggtactatgaataatatttttatggggtgctatgggattggagtaactaggattgtcgcagcagctatagaacaaaatcatgatgattctggaatcatttggccaacaactatatctccatttaaatgtgtaatcattgaaattgatgcttccaaaaatagtactgtcaagaatcagtcggatattttgtacaacatacttaaagataaaaatatagatgtaattgttgacaatagagatgtaggttttggaattaagatgaaagattgggaattaattggaatacctcacttttttattattggaaaaaatgaagctgaaaaaaatatcgtaactcataaattaagaactttacctaataaaaattcacttcagattgaagacatggagatgtttatagaaaaaaatattctacatgaagtgtaat

SEQ ID NO: 298944 - DNA, 901 bp, Unknown
  Bacterial polypeptide expressing nucleotide sequence isolated from the Sargasso Sea
aaaaataatccttcagatgcagaaattataagtcataaattaatgcttaaagcaggacttgctagacaacaatcttccggtcagtatagcttacttccagttggatatcgtgtcttaaagaaaattgaaaatattatacgagaagaaatgaatgctataggttctgcagaaatacttatgccatcagtccagccctcagagttgtgggaagaatcaggtcgatgggaaacgtacggtctagaattactaagattaaaagatagacatcaaagagactattgtttggggcctacttttgaggaagtgataacagacttagttagaaaagatttaaatagctataaacagttgcctattaatatgtatcaaatttcctcaaaatttagggatgagattagaccaaggtttggaatcatgcgtgcaagagaattcatcatgaaagatgcatattcattccatttaaatcaagaatgtcttgatgaatggtatgaaaattacaaaaaagcttacaacaaaatttttactagattacaacttgaatacacaatggttgatgctgatagtgggaacataggtggtagcaagtcaaatgagttccatgttattgctgatgcaggtgaagatgatttattgattgaccaagatggtattggtgttaattatgaaattgcaaaaaaaaaatataattctgatgatatcaaaaagattattaaagaaaataatctagttcacaaaaaaggtatcgaagttggacatatttttaaactcggagataaatatagtaaatcaatgaatctgtctattgctgatgcagaatcaaaaatatgcaatatagaaatgggttgttatggtataggtgtttcaagaattattgctgcagcaatagaacaaaatcatgatg

SEQ ID NO: 298945 - DNA, 727 bp, Unknown
  Bacterial polypeptide expressing nucleotide sequence isolated from the Sargasso Sea
ttgaaattatcaaactatttaatagcaactttaaaagaggccccctcagatgcagaaaccactagccatcagttaatggttagagctggaatgattaggaagattgccgcaggtatttataacttcttgcccacaggtcttagagtttttagaaaggttgaaaatatcattagggacgaaatgaataaagcaggcgcaatagaagtgatgatgccttttgttactcctgcagatttatggcaaaaaagcggtagatgggatatttatgggaaggaattattaaggttaaatgatagagcagagagggatttttgtcttgggccaacacacgaagaagtagtaaccgatttagttgatagagaagttaagtcttataaaaatctacctgtaaccatatatcagatacaacccaaattcagagatgaaataagaccgagatttggagtgatgcgtgctagagaatttaccatgaaagatgcttatagttttgatgtagatgaaatgcaagctgaaagatcatatttaaatatgtttgatgcttataaaagaatttttgacagatgcgggctaacttataaagctgttgaagctgattctggaaatattgggggaagcttctctcatgaattcatggttcttgcagaaacgggagaagaccttgttttaagctgtgactcatgcgatttcgcagcaaatgtagagaccacaagtgttagagttcgtgaac

SEQ ID NO: 298946 - DNA, 835 bp, Unknown
  Bacterial polypeptide expressing nucleotide sequence isolated from the Sargasso Sea
tgagcgcgagttttgtttgggcccaactcacgaagaaattattactgatttgataagaaataatgttaaaagttacaaagagcttcctctaaatatctaccaaattcagacaaaatttagagatgagataagaccaagatatggtgttatgagaagcagagaatttttaatgaaggattcatatagctttcacttaactgaagaatgcttatcagatacctacagcataatgaaaaatgcttacaaaaatgctttagatagaataggtttgaaatataagatcgtaaaggcagattctggtgcaataggtggagataagtcagaagaatttcatgtattagctgaaaacggtgaagatactcttgcggcatctgattcttccgattatgcagtaaatgcagagctattattggaagatgggcaaaatgctagcatgcttgtaggaaaagaatctcctgatgggaaaggtattttagaggtcaaaaaaggtattgaagtaggtcatatttttcaacttggcaaactgtacagtgaaaatatgaatgccactgtattagatgaaactggcaaagctaagaatatgtttatgggttgctatggtattggtatttcaagaatagttgcagctgcaattgaacaaaataatgatgaaaaaggtattatttggccaaaaacaatagcaccatttgatatcaatttaattaccattggagcagataaggactcaaatattgaaaaaacttcaaaaaaaatataccacgagttaagagaaaagggttttgaagtaatcttggatgacagagatgatggtttgggaaaaaaatcaaagatgcag

SEQ ID NO: 298947 - DNA, 534 bp, Unknown
  Bacterial polypeptide expressing nucleotide sequence isolated from the Sargasso Sea
catgcgattatcacagactattatagccacccagcgacacgatcccgccgatgccgaagtccccagccaccgtcttttggtgcgggccggttatatccaaaagattgccgcgggcctttatgtttattcccctttgatgtggcgaacgctgcagaaggtctcggctatcgtccgtgaagaaatgaaccgggaggggtcctacgaaatcctgatgccgattttgcagccgaaggagatgtgggaagaaagtggccgctgggcccgttatatcgccgatgggatcatgtttcatttgcaggataaaagagacgcctccctttgtttgggacccacccacgaagaggtggtgaccacctatgtgaaaaaggcgattcaatcccacaaacaattgccggtgaatgtttttcagattcaggataaattccgcgacgagatcaggccccgctttgggttgatgcgcggccgcgaatttatcatgaaggacgcctactccttcgatgtcgacgaagccgggctcgataagagctacgaggg

SEQ ID NO: 298948 - DNA, 726 bp, Unknown
  Bacterial polypeptide expressing nucleotide sequence isolated from the Sargasso Sea
gaagtttagagatgaaataagacctaggttcggtgttatgaggtgtaaagaattttatatgaaagatgcatattcttttgatttaacaggtgaagatgcaaaaaaatcttacaataaaatgtttttttcttatttaaaaacttttagaagattgggattaaaagcaataccaatggctgcagacacaggtccgattggaggtgatttatcacatgaattcgtcattttagctgaaactggagagagtcaaatttttgctgataagcgaatatttgaaattgatttgaacaagtatgattttacagacgagtctttatcaaaagtgagaaaagactttacaagtttttacgctgttactgatgaaaaatttagtgaaaaaaaatttaatgaacaagttgataataaaaatcaaattaaaacaaaaggtattgaggtaggacatatattttactttggtgataagtactcaaaacctatgaattgtttaatagatgacaaaagtggtaaaaaaatctctgttaaaatgggatcgtatggcattggtgtatctagactagttggtgcagcaatagaggcaaattataatgatgatgtaatgaaatggccgaagccaatttcaccgtttgacgtagttatactgccaagtattaataaaaataataacgaaaatttacaaaaagctgaaaaaatatacaaagaattaaaaaaacaaaatgttgacgtatt

SEQ ID NO: 298949 - DNA, 1255 bp, Unknown
  Bacterial polypeptide expressing nucleotide sequence isolated from the Sargasso Sea
atgaaaactagctcttatcactataaaacgttaaaagactcgccatctgacgctgagttgataagtcataaactcatgctcaggtcttcaatgattaagctaaatgcttcaggtatctacacctggttgcccttaggattaagatctctgaagaaggttgaaaacatagtcagaaggaatatggacgaggcaggagctcaagaaatgttaatgccaatggttcaaccctctgatttatgggaagaatctaaaagattatcagagtatggtccagaattacttagatttgaagacagaaatgatagaagttttgtattagggccaactcatgaagaaataattacagatattgcaagaaaaactttgaacagtccaaaagatcttcctgctaattattatcaaattcaaacaaagtttagagatgaaattagaccaagatttggagtaatgcgttcccgggagtttcttatgaaggatgcctattcatttgatattgatgagaaaggcatgaaaggaagttacgaattgatgagagatgcatatcaaaaaatatttaatgaaattggatttgattacagaatagtttcagctgattctggagcaattggtggatctacatcagaagaatttcatgtgttagcagactcaggagaagataaaataatttttagcgaggatgaattttttgctagcaatctagagttatttgaagagaaatctgagcaagaaataattgatcagcttcataaaaaagatgggaaaaaatattcaattaaaagaggaattgaggttggtcatatatttcaactgggtgataaatacagcaaatcattatctctttctattcaaactaaagaaggcaatgtaaaccctttgatgggatgttacggaattggcatatcaagaataattgctgcttcaatagaacaaaattatgatgaggatggaattatctttccaagatcaattgctccatttgaagcaataataattatcattggtgataataaaaatcttcttaatgaagctgaatttattcaaaaagacctaacaaaaattggtatagatacgataatagatgatagaaatgattcgccaggaaagaaattcaaggatgcagacctaactggtattccatttcaattgataatcagtgaaaaaaatcagaaggaaaaccttctcgagctaaagattagacatgaaagaacttctctcaaagaaaataaaaaaaatatcttaactaggctgaagcctt

SEQ ID NO: 298950 - DNA, 868 bp, Unknown
  Bacterial polypeptide expressing nucleotide sequence isolated from the Sargasso Sea
tatgcgcgtctcccgcctgatgctggtgacgctgcgcgatgtgccagccgaagccgaaatcaagtcccaccagctgctgctgcgtggaggtttcatccgccgtgtgggctccgggatctacgcctatctgccgatgatgtggaaggtgctgcagcgcatcacaacgatcatccgagaagagatgaatcgtgccggggcactggaaacactcctgcctcagctgcatccttcggagctctggcaacgcagtgggcgttggcagggatataccgccggcgaaggaatcatgttccacctggaggatcgccaggggcgtgagcttggtctggggcccacccatgaagaggtgatcaccagccttgccggcgagctgctgcgttcctaccgacagctccctgtgaacctgtaccaggttcagaccaagttccgggatgaaattcgcccccgttttggcctgatgcgggggcgtgaattcatcatgaaagacgcctattcctttcacgccgacgaagcggatctgcaggcgacctacgccgtcatggacagggcctacaaacgtattttcgagcgctgtggcctggaagctgtgccggtggatgccgacagcggcgccatcggtggtgccgcttcgcaggaattcatggttacggcggaggccggagaggatctgcttctgatcagcgacgacggtgcctacgccgccaaccaggaaaaagcggtgtcactccctgacgaggtcactcccctgagcccggcttcactgagctgcctcgagacccctgggcagacctcgatcgactccctctgctccgcccagggctggcagccggggcagctgctgaaggtgctgctgctgctggccgttctg

SEQ ID NO: 298951 - DNA, 1258 bp, Unknown
  Bacterial polypeptide expressing nucleotide sequence isolated from the Sargasso Sea
aatgaaggcatctaaatacccacttttcacccagaaaaatgaaccatctgacgctgagatcatcagtcacaagcttatgattaaagcaggcttagtgagacaacaatcttcgggccaatataattttctaccaataggcctacgaatactaaaaaagatagaaaatatcattcgccaagagatgaatgcaattggatctgctgaaattcttatgccctcaattcagccacgtgaactatggcacgaatcagggagatgggatgattacggtcccgagcttctcaggctcactgatagacatgacagagagtattgtgttggcccgacgtttgaagaagttataacagatttgataagaaaagaacttaatagctataaacaacttcctataaatctttatcaaatatcttcaaagttcagagatgaaataaggccaaggtttggaataatgcgtgcacgagagttcataatgaaagatgcttactcatttcacttagatacgtcgtgtctagatgagtggtatgaaatctacaaagaggcatacaataaaatattcatgcgcctgcaattagaatacactatggttgatgcagatagtggtaacattggtggtagtaaatcaaatgaatttcatgttattgcgaacactggtgaggatgatcttctaattgataaagatggtgttggtataaattttgaaatcgcaaaagaaagatataaaacagataatatagaaaaaatcagaaatgaaaatagccttattcacaaaaaagggatagaagtaggtcatatcttcaagttaggtgataaatatagcaagtcaatgaatctctctatcgcagattcagaaaataataatcattatcttcaaatgggctgctacggtattggggtatctagaataatagcggcggctattgaacaaaactacgatacgaacggaatcatttggcctaaaagtatttcaccttttgatgtagtcattatcgaaatcgacggcgataaaaatgaagaagtgagaaaatattctgaaagtatttatgaaatgctaattaatagagacatggatgttattttagatgatagaaatgcaaaactgggcaataagctccatgactgggagctgataggtgttcctcagtttattatcattgggagatctgaagcccaaaacaacgaggtcacatataaaaagagaggagctgcggaaaaagatacactaaaacacgatgaactttataatgttctaaaaagttaa

SEQ ID NO: 298952 - DNA, 1282 bp, Unknown
  Bacterial polypeptide expressing nucleotide sequence isolated from the Sargasso Sea
atgttattttcaaagctactattacctactcttaaggatgctccccaagaagcagaagttgtgagtcacaaattaatgcttcgttcaggcatgatacgtaaagttgcttcaggtatctatacttggctaccacttggcttaaaagttctaaaaaaagtagaaaatattgtaagagaagaaatggataattctggtgctcaagaagtgtttatgccaatggttcagccaaggaaattatgggaagaaacaaaaagatgggaaaaaatgggtcctgaattacttagaataaaagataggcatgatagagatttttgtttaggtcctacacacgaagaagttattactgacattattagggataatgtcaaaagctacagagaacttccattaaatatttatcagattcaaactaaatttagagacgaggtaagacctagatatggaattatgcggggaagagagtttttaatgaaagattcttacagctttaatatcgatgaggagtcgttacaggaaacatatttaattatgagagaaacttataaaaaagttcttgaaagaataggacttgaatacaaaatttctgctgccgactctggagccattggtggagatagttctgaggaatttcatgtgcttgctgaaaatggtgaagataccattgccataagtgattcatctgagtttgcaatcaatactgagcttcttttaaaagatggagaagatataagcacacttgaaggcaaaccttctccagatggcaatggaacaattcaaataaagaaagggatagaggttggtcatatttttaaacttggaaagttatatgcggaatcaatgaaagcaagtgttctaaattctgatggaaatgcttcaacattatttatgggttgttatggaattggggtttcaagacttgttgcagcagcaattgaacaaaatcatgatgaaaaaggtattgtttggccgcatagtattgcaccctttgacataaatattatttctattggatatgataagaataaagatattgctaaagcatcaacagatttatacaaagaactttcagaaatgaattattctgtactgctagatgatagaaaagatggatatggagtgaaaataaaagattcagaacttataggaatacctctaaatattgtaataggtaaaaaatttacagaagataatgaagttgagctcataggaagaaatggtgaaacttccacgaaccccattacagaaataaaaactattttagatttttttaagaataaataat

SEQ ID NO: 298953 - DNA, 1279 bp, Unknown
  Bacterial polypeptide expressing nucleotide sequence isolated from the Sargasso Sea
tatgaaagcttcacatttaatattaggaactcagagagaaaatcctgcagatgcagaaataataagtcatcaattgatgattagagcaggtcttgtaagacaggtctcttcagggatatacaattggctacctataggaaaaaaagtattacaaaaggtagaaaatatcatccgaaaggagatgaatatagcaggagcccaagaaatcttaatgcctatggttcaacctgcttcattatgggaagaatctggaaggatagatcaatatggtcaagaactactggtattccttgatagacatgaaaataaattctgtttagggcctacccatgaagagataattactgacttatgcaagaatcttttgaccagttataaacaactcccagtaacgttatatcaaattcaaactaaatttagagatgagataagaccgagatttggtgtaatgagatcaagagaattcttgatgaaagatgcctattcatttgatttagataaagaaagtttagatcaaagttattctgtaatgaaagaagcctacaaaaagatttttgatagtttaggattagattaccgaatagttaaagctgatagtggtgcgattggaggttctgattctgaggaattccatgttcttgcagattcaggggaagatcttttagcttttagcgataagagtgaatatgcaataaatgctgaattactaactgaactacaagacggtcaagatccctactctcttgaaggtaagccgagtcctgatggtaaaggtcttcttaaactaaaaaagggtatagaagttggccatatctttaaactaggaagaaagtattcagaaatactcaatctgaggatacaaggagaaaataatgatatccatcctgaaatgggatgttatggtattggtgcatcaaggatagttgcagcagcaatagaacaaaatcatgacgaaaaagggataatttggcctaaggccctgacacccttcgaagttgctttggttgaagttaatcccaagaaaaaagacgaaataaaagaaaagagttctgaaatttataacttacttaaagaaaatgatatagatgtcttgtgggatgatagagaaaaaagaccaggagtgaagtttaccgatatggaagtgacaggaatacctttaacaataattattggcgagagaacactagaaactggtgagattgaaataaagaaaaggcaagatgagaaaccacaactagtctctcatcaaaaccttatatcgactgttaaaactaattaa

SEQ ID NO: 298954 - DNA, 1291 bp, Unknown
  Bacterial polypeptide expressing nucleotide sequence isolated from the Sargasso Sea
ttgattgaggagattatagtgtatttctcaaaatttttcgttcctactactaagcaagagccttcagatgctgagcttgctagccataaattaatgctaagaagtgggatgataaagaaaactgcagcaggaatatacaattggcttccaattggtctaagagttcttaaaaaagttgagaatatagtaagaaacagtatgaatgcatttggtgcacaagagatcttaatgccaatggttcagccagctgaactttggaaagaatcagagagacatgatgaatatggaaaagaacttctaaaatttcaagatagatccgaacgtgattttgttcttggtccaactcatgaagaagttatttgtgacatatttagaagttatccaatcagctataaagaattgcctgtaaacctttatcaaatacagaccaaatttagagatgagataaggcctagatttggtgtaatgagatcaagagagtttgttatgaaagatgcatatagcttcgatatcaatgaagatgggcttattgaaagctatgaaaatatgaaaaaagcttatattgacgccttcaacaagatagggcttgattacagaatagttaaagctgatgctggcgttataggtggtgatgtaagtgaagagttccatattgttgctgattctggagaagatcttattgcaataagtgattctagtgatttcgctgctaatgtagaagttcttgattacagcaaagatccaagtgaattaaatggtcaaaagtctcctgacggtgaaggaaaacttcaagttaagagaggaattgaagttggtcatatttttcagctaggtaaaaaatatagcgaaaaaatgaaagtctcattgaaaaatgaaaaaggcaaagagcaagacctttatatgggttgttatggtattggcatttcaagaattgttgccgcttctattgagcagaatcatgatgataaaggaattatttggccttattctatagctccatttcatttaaatataatttgtttagatccaagcaaaaaagaaatattagaagagtgtgaaagtgtttataacattctgaaaaagtctggtcatgatgttttattagatgatagggatataagagcaggaataaagtttactgaacatgaaatgttaggcatacctttttcaataattatcgggcctaataatttcaataagaataattatgagtttactgttagaaaggacaacgtaaaagcagaattaaatattgatgaaattaaacaaaaattggaggaattaaaatgat

SEQ ID NO: 298955 - DNA, 1270 bp, Unknown
  Bacterial polypeptide expressing nucleotide sequence isolated from the Sargasso Sea
tatgaaagcaaaaaacctatttttccctactttaagagaggatccttccgaagccgaagttataagtcataagttaatgataaagtcaggattaattaggaaagttgcatctggtgtatataactggttgcctttaggagtaaaaatcctaagaaaagtagaaaatattgttagggaagaaatgaattcttttggtggacaagaagtcttgatgcctatggttcaacccggagaattatggaaggaaacagaaagatggcaaaagtacggaaaagaattgttagtttttcaagatcgccatgaaagagaattttgcttaggaccaactcatgaagaggtcattactgacttgctaagaagagaagtaaagagtcataaacaactcccaatgacactttaccaaatacaaacaaagtttagagacgaaattaggccaagattcggagttatgagatctagagaattcttgatgaaggatgcttattcttttgatttaacaaaggaaaatttagatctaagctataaaaatatgaaagaagcttatgtaaagatttttgatagattagggttggattatagagtagttaaagcagatacaggtgaaattggaggtagtgactcagaagaaatacatgtccttgcagatactggagaagacctactagtgtttagcaatgaaagtgattttgcatctaatgttgagttaatgttagaggaaggacaagatccacaatctttaaaaggtaagcctagtcctgatggaaaaggtactttggaactcaagaaaggtatagaagttggccatatcttcaaactaggtacaaaatactctgaaagcatgaacttcaagatacaagttgaaaatgaaaataaattcctagaaatgggttgctatgggataggtatatctagaatagttgcagctgcaatagaacaaaataatgatgaaaaaggaataatctggcctgaagctcttgctccatttaatgtttgtataattgaagttaaccctaaaaatgaccaaaaggtttcaaataaatgtgaggaactttataaagaactatcgaatcaaggatttgatgtcctttgggataatagagaccaaggaccaggggtaaaattttcagatatggaacttataggtataccaaatatagtaactataagtaaaaaaacaatcgaaaataatcattttgaatttagaacaagggaagaagaacaaggagctcacttatctctaaatgaactcctaacgaaaattaaaggttaa

SEQ ID NO: 298956 - DNA, 1267 bp, Unknown
  Bacterial polypeptide expressing nucleotide sequence isolated from the Sargasso Sea
tatgttttggtcaaattatttcattcctacactaaaagatactgcttctgaggatgctcaagttataagtaatagcctcatgcttaagtctggcatgataagaaaaaatgcctctgggatttatacatggcttccgcttggtttaagggtcttaaataaagttgaaaatattgttagagaagagatgaacaatgcaggagcgcatgaagtgctaatgccgatggtgcaaccaaaggacttatggaatgaatcaaagagatgggacaaatttggtccagaattgcttagatttaaagatcgtcacgatagagatttttgcctaggccctactcatgaagaagtaataactgatttaattaaaaataatgtcaaaagttataaagagcttcctttgaatatatatcaaatacaaactaaatttagagatgaaataagaccaagatatggagtgatgaggagtagagaattcttaatgaaagattcttacagctttcatctttctgaagaaagcttggaagaaacataccaaataatgagaaatgcctactcaaaaatttttgagagaataggtctagatttcaaaatagtaaaagcagactcaggcgcaattggtggagataaatctgaggaatttcatgtacttgcagaaaatggtgaagatactcttgcagtatctgataaatctgattatgcagttaatgctgagcttttgcttgaagatggtcaagattcaaaatcactagttggacaagaatcacctgatgggaatggattgctggaaattacaaaaggtattgaagtgggacatatattccaattgggcaagctgtatagcgaaaatatgaatgcgactgttttagatgactcaggtaaagctaaaaacatgcacatgggatgttatggaataggtatctcaaggatagtcgcggctgcaatagaacaaaattttgatgataagggaattatttggccaaaatctatttctccttttgatttaaatataattacaatcggggctgataaagacaaaaatattgaagcatcatccagaaaactttataaagagctcactcagaaagggttcgaggtaatattggatgatcgagatgatggttttggaaaaaagattaaagattctgagttaattggcgttcctgtatcaatcgtttttggtaaaaattttacggatcataacaaggttgaaattatcttcaggaatggagagaaagtagcttctgctttaaatgaagtagaggaaataatttaa

SEQ ID NO: 298957 - DNA, 1267 bp, Unknown
  Bacterial polypeptide expressing nucleotide sequence isolated from the Sargasso Sea
tatgttttggtcaaattatttcattcctacacttaaagatactgcttctgaggatgctcaagttataagtaatagcctcatgcttaagtctggcatgataaggaaaaatgcctcaggaatttatacatggcttccacttggtttgagggtcttaaataaagttgaaaacattgtaagagaagaaatgaataatgcaggagcgcatgaagtattaatgcctatggtgcaaccaaaagatttatggaatgagtcaaagagatgggacaaatttggtcctgaattgcttagatttaaagatcggcatgatagagatttttgcttaggtcctactcatgaagaagttataactgacctaattaaaaataatgtaaaaagttataaagagcttccactgaatatttatcaaatacaaactaaatttagagatgagataagaccgagatatggagtgatgaggagtcgagaatttttaatgaaagattcttatagctttcatctttctgaagtaagcttagaagagacataccaaataatgagaaacgcctactcaaaaatctttgaaagaataggtttagattttaaaattgtaaaggcggactctggcgcaattggtggagataaatctgaggaatttcatgtccttgcagaaaatggtgaagatactctagcagtatctgatacatctgattatgcagtcaatgcagagcttttgcttgaagacggtcaagattcaaaatcactagtaggtcaaaaatcaccagacgggaatggattgcttgaaattacaaaaggtattgaggtgggacatatattccaattgggtaagctgtatagcgaaaatatgaatgcgactgttttagatgattctggtgcagctaaaaacatgcatatgggatgttatggaattggtatctcgaggatagttgctgctgcgatagaacaaaattttgatgataaaggaattatttggccaaaatccatttctccctttaatttaaacataatcacaattggagctgataatgacaaaaatattgaagcatcatctagaaaactctatgaagatctcactcagaaagggtttgaagtaatactagatgatcgagatgatggttttggaaaaaagattaaagattctgagctaattggagttcctttatcgatcgtttttggtaaaaattttacggataacaatgaagttgaaataatctttagaaatggaaagaaggtagcttctgctttgaataaaatagaagaactaatttaa

SEQ ID NO: 298958 - DNA, 1018 bp, Unknown
  Bacterial polypeptide expressing nucleotide sequence isolated from the Sargasso Sea
gatgattaaggctggcatgattagaaaactctcgtctggacagtattcttggctacctataggtttacgtattattaaaaaagttgaagaaataatcagatgtgaacttaataagattggttgtagtgaaatactaatgccgtcagtccagccagcagagttatggaaagaatctgaaagatgggatcagtatggacctgaattactcagatttaccgatagacataaaagagatttttgtttggggcctactttcgaggaagttataactgatcttataagaagagatgtttcaagttataaacagttgcctataaatttatttcaaatttcatcaaaatttagagatgagattaggcctaggtttggtgtaatgagagcgagagaattcataatgaaagatgcttattcatttcatgagactaatgaatgtcttaatcaaacctttgaaaaatataaggaagcatacaaaaatatttttaataatctaatgttagattttactatagttgatgctgacagtggcaatataggtggtaatgaatcaaatgagttccatgtcattgccgatacaggagaagatgatcttcttttggatagagaaatgaatgggatgaatattgaaattgctaaacaaaaatataatgaagacaacattgacaatttggttaaaaaaacaggtctcattcataaaaaaggaatagaggttggacatatatttaaactgggacaaaaatattctgaaaaaatgagtgccataattaccaccaaagactccaaatcagtgaatatttttatgggatgctatggtattggtgtcacaagaatcgttgcagctgctatagaacaacttcatgatgaagatggaattatatggccaaaatcaatagctccatttaattctgtcataattgaaattgatggaaacaaaaattcaagtgttagaaatcatgcccaatctgtttatgaattattgaatgaaaaaatattgatacaatctttgatgatagagacttaa

SEQ ID NO: 298959 - DNA, 1288 bp, Unknown
  Bacterial polypeptide expressing nucleotide sequence isolated from the Sargasso Sea
tttggagattatagtgtatttctcaaaattattcgtcccaacagtaaaggaagacccctcagatgcagagcttattagtcataagttgatggtgcgttctggaatgattaaaaaaactgcagctgggatttacagctggttacccttaggtcttaaagttcttaaaaaagtagaggaaattgtcagaaaaaatttaaataacttcgatgctgaggaaattcttatgcctatggttcaacctgcagaattatggaaagaatcaggaagatatggtgagtatggcaaagaacttcttaaatttgacgacaggtcaaatagaggatttgtattgggcccaactcatgaagaaataatatgcgaaatttttagatctcatccaaagagttataaagatttgcctgtaaacctttatcaaatacaaactaagtttagagatgaaattaggccaagatttggtgtcatgagatcaagagaatttttaatgaaagatgcatatagcttcgatattgatgagaaaggtctagttaaaagttatgggaaaatgaaggatgcttacataagtatatttgatgaaattggcttagattatagaattgttaaggcagattctggaaatatcggtggagatgtaagtgaagaatttcatattcttgctgattcaggtgaagatttgattgccgtaagcgatagtagtgattttgcagcaaatgtagaggttttaaattacgataaagatcccagtgagcttgagggaaaaaaatctcctgatggtaaaggtaaacttaaaattaagaggggaattgaagttggtcatatctttcaattaggtcaaaaatatagtcaagcgatgaatgttggggttaaagatatgaatggaaactctatacatccttttatgggctgttatggaatcggagtatctagaattgttgctgccgcaatagaacaaaatcatgatgatagaggaattcaatggccagataagattactccttttggagtgaatattatttgtttagatcctgaaagtgatgaaatcatgaaagtttgttctgaaatttatagtatcttacaaaaatctggctttgatccattattagatgatagagatataagggctggaataaagtttaaggaacatgaacttttaggtataccttattcaattattattggtcctaataactttaaaaatacaaaactagagtttggtatcagagcacaaaatgaaaaaatagatatgaaattagacgatattaaaaaatatttaggagaaaaatatgattag

SEQ ID NO: 298960 - DNA, 1141 bp, Unknown
  Bacterial polypeptide expressing nucleotide sequence isolated from the Sargasso Sea
tatggaagtatctatgccaatagttcaacccgcagaattatggcaagaatcaaagcgatggtctcaaatgggacctgaattgctccgaattcaagatcgtcataaaagagatttctgtcttggaccaactcatgaagaagtaataactgatttggtgagaaatgattatagtagctacaagcagctacccgcaattttgtaccaaatacaaaccaagtttagagacgaacgccggccccgctttggcgttatgaggtctcgtgaatttattatgaaggatgcatattcatttcatattaatcaagaatcactggatgaatcttataagataatgcataaaacgtattgtaatatttttactcgtctgggattaaatttccgttcggtcgctgccgattcgggtagtattggcgggagtatttcgcatgaatttcatgcccttgcagattctggagaagatgaaattgtttttagtaaagatggtaagtatgcagcgaacgcagagcttgctggaggtaatcttcgaattccaaaccaaacggaagacaaaaaagattaccaactagtcgatactggaacggcagtgactatagaagaaatcacgaatcttttaaaagtagattcgaacaaaactgtgaaaaccttgcttgtgcatagtgaagatgaagaaggcaatgtctccgataaattagtggccctgcttctgcgcggcgatcaagaactaaacatcacaaagactgaaaaattaaaaggaattttttcacctctaaaatttgccagcagtcagttgatagaaaaacaaataggcgcttccatagggtcgttaggcccccaaaaccttgatatttataaatttgctgatttgagcgttgagggactttgcaacttcgtttgcggtgcaaatgaaacgggcaagcatttcattaacatgaattggtcagataattgctcctataatgaggtggctgatatacgcaaggttaaggagaacgataccagcttgttagagagcagtccgctagagataaaaagaggcattgaggtagggcacattttccaactaggaacaaaatatagcgactcgatgaacgcgagtgtactcgataaaaacggaaaagcaacttcgatacaaatgggctgc

SEQ ID NO: 298961 - DNA, 1279 bp, Unknown
  Bacterial polypeptide expressing nucleotide sequence isolated from the Sargasso Sea
atgagagtttcagattttcctatttttacacttaaagataatccgtcagacgctgagatagtgagccacaagttaatgataagagctggcttgattagaaaaatctcatcaggtcaatatagctggctgcctataggtatgcgtgtactagaaaaaattcaacaaatcatcagaagtgagttaaataacataggttgcatggaaatttccatgcctttagttcagccatcagaattatggagagaatccggaagatgggataaatatggtcctgaattattgcgatttaaagataggaatgatcgagatttttgttttggtcccacttttgaagaagttgtaacagatctcgtaagaaaagacgttagtagctataaacaattaccactaaatttttttcaaattacaacaaagtttagagacgaaataaggccgcgctttggagtaatgagagctagagaatttataatgaaagatgcgtattcttttcatgcagataaaagttgtcttgataaatcatatgattcttataaaaaagcgtatgaaaatattttcaaaagattgggtctcaatttcacagtagtttcagctgatagtggtaatattggtggagacgaatctcatgaatatcatgttattgcggatactggtgaggatgatttattgatatctgatagcggagatggcatgaatgtagaaattgccaaagaaaaatattctcttgaaaatttagatgaacttattgataaaacatctatgaaacataaaaaaggaatagaggtcggccacatatttaaactaggtcagaagtatactaagtcaatggatactaaaatcacttatgaaaatggtactatgaataatatttttatgggatgttatgggattggggtaactaggattgttgcagcagccatagaacaaaatcatgatgattctggaatcatttggcctacaactatatctccatttaaatgtgtaattattgaaattgatgcttccaagaataattctgttagaaatcagtctgatcttttgtacaagatgcttagagataaaaatgtagatgtaattgttgataatagggatgtaggttttggaattaagatgaaagattgggaattaattggaataccacacttttttattgttgggaaaaacgaagctacaaaaaatatcgtgactcataaactaagaacaatgccaaataaaaattcacttcaaattgaagacatggagatgtttgtagaaaaaaatattctacatgatatgaaataat

SEQ ID NO: 298962 - DNA, 1204 bp, Unknown
  Bacterial polypeptide expressing nucleotide sequence isolated from the Sargasso Sea
catgaaagcttcacagttaatatttgctactcaaagagaagatccttctgatgctgaaatagtcagtcataaactaatgataagagctggtttaatccgtcaagtttctgcaggcatatacaactggcttcccactggtaaaaaagtactgcataaagtagagaatatcattagagaagaaatgaataacgctggagctcaagaaatacttatgccgatggttcaacccatatccttatgggaagaatctggaagaagaaatcaatatggtcctgagctcttaatctttcaagatagacatgacaatgatttttgtttaggtcctacccacgaagaagtgataactgatctctgcaaaaatattcttacaagctacaaacaacttcctgttactttatatcaaatacaaactaaattcagagacgaaataagacctagatttggtgtcatgcgatcaagagaatttgttatgaaagatgcctattcctttgatttaaatcaagaagggcttgaccttacttataaaaatataagagaagcttatttaaaaatatttaacaggtttgggttagattatcgtctagttaaagcagatagcggtgctataggtggatctgactctgaagaattccacgtcttagcggattcaggcgaagacctgttggcatttagtgataaaagtgattatgcaatcaatgctgaattacttgttgagttacaagaggatcaagatcctacttccttagaagggaaagatagtcctgatggtaatggtaagttaaagttgaaaagaggtatagaagcaggtcatattttcaaactaggtacaaaatattctgaaagttttaatttaaagatccaaggagacaaagagaatataactccctacatgggctgttatggaataggagcatctagaattgtagctgcggctatagagcaaaaccatgatgaaaaaggaataatctggcctaattctttaagcccttatgaagtagtaattgtagaagctaatcctaagggtaaagaggacataaaagctaaatgcgaagatatttataatctccttttaggaaatggggtagatgtactttgggaagatacggataaaagaccaggagtaaaatttgctgacatggagcttataggtataccggttatgataataattggagataaggccttgaaaaacaaccaattagaa

SEQ ID NO: 298963 - DNA, 1030 bp, Unknown
  Bacterial polypeptide expressing nucleotide sequence isolated from the Sargasso Sea
gatgccaacgatacaaccttcagaattatggcaagaaaccaatagatgggaagactacggtgatctccttttacaaattcatgaccgtcatgatcgtcttttttgttatggtcctacgcatgaagaggttattacagatatactcagaaaaagtgtaaagagctataaacagctaccggtcaacttctatcagattcaaactaagttcagagatgaaatcaggcctcgatttggcgttatgagagcgagagaattcctgatgaaagatgcttactcatttcatctaaaccaagaatcccttgaagaagaatatgaaaatatgaatcaaacgtatcaaagcatattcaaaaaattggaacttaattttaggagagttgaagctacaagcggagaaatcggtggttcggtctcgcatgaattccatgtgatagcagattctggtgaagatgaaatcgctttttgtgatgatgaaaactttgcagcaaacgtagaaacattagaggataaaaatgcgccgaaaggtggagagttaacgtatgctcgcggaattgaggtaggacacatatttcaactgggcgataaatacagcaaatcaatgaaactcgaggttttggattccaatggtaaaaatgtcaatccatacatgggctgttacggtatcggtatatccagaattgttgcagctgcaatcgaacaaaaccacgatgaaaagggaatcatttggccaaaagccatttcaccttttgagattttaattattgtcttgaatgataagaatgactcaagtgtcttggatcaagcattaaaaatttatcaagagctcaaatcggatggcatagatgtcttgatagatgatcgcgatgaaagagcaggagttaaattcgcagatgcagacttgttgggcattcctaagcaagtcattgttggaaaaagagggatcgagaaaaatataattgaagtgacgtcaaggataacgggtgagaaaagagatattaagatcagtgaggttgccagtcagctaaaagattga

SEQ ID NO: 298964 - DNA, 568 bp, Unknown
  Bacterial polypeptide expressing nucleotide sequence isolated from the Sargasso Sea
aatgttagcatccaaaactttcatacctaaaattaaagatatacctcaagatgctgaaataattagtcatcaactcatgcttcggtctggcatgattcgtaaagtagcctcaggtatatacaactggctgccacttgggcttatcgtcctcaaaaaaattgaaaatgttgttagagaggagctaaataatattggcgcccaagaaatttttatgccaatggtacagccaaaagagctttgggacgaatcaaatagatggggtaaatttggacctgagcttctaagaataaaagataggcatgatagagatttttgtttagggcctacacatgaggaagtaattacagatttagtcaaaaacaatatcaatagttataaatccttacccctaactctttatcaaattcaaacaaaatttagagatgaaataagacctcgttatggagtaatgagaggaagagaattcttgatgaaggatgcctatagctttcacatgaatgcagaatgcttaaatcaaacatatcaagactttagagctgcttataaaaaaatacttgaatgtttagag

SEQ ID NO: 298965 - DNA, 1804 bp, Unknown
  Bacterial polypeptide expressing nucleotide sequence isolated from the Sargasso Sea
atgcgcgtgacaacctcatttcctctggggacacttcgtgacacaccttctgaagctgagatcatttcacatcaattacttttaaaagctggttatatccgcagaattaacagcggtatttatgcatacatgccaataatgcttagagttattgaaaaaatatccgcaataattgagagagaacttaatagtattggctgtacaaaattactattacctcaactgcatcctgcagatttatggagaaaaagtgaaaggtgggaaggatatactgcaggagaaggaataatgtttaatctcaaagatagacaaggtaaacaatttggtttagctccaactcacgaagaggtgatcacgagtattgcatcagagaccatcaactcctataagcaactacctcaatgtttttatcaaattcagacaaaatttagagatgaaataaggccaagatttggattgatgagaagtagagaatttataatgaaagatggttattcttttcattcttcagaaaacgatctggcttctttctatgaaaaggtgggtaatgcctatgaaaatatttttaaatcttgtggactggagacagtaggggttgaagctgatagtggagcaattggcggggcttcatctaaagaatttatggtcactgctgatgctggggaagattccattttgtttactcaaagtggttcttatgctgcaaatattgaaaaagctgtatctctaccctctcgacctattccactaaaagataatattgcagagtggttggagacacctcatcagaaaacaatcctagaagtttgcgataagaataatttagaccctagtcagattattaaagtagtaatattccttgcacagtacgaaggtgaatttaatgtccctattcttgcttgcataagaggcgatcaacacattaatgaagtaaagctttttaacttaatcaataaacttcataatttcaatctcattaatctaaaaaagattgaagacaaaaatactatcgaaaaaaatctagttgatttacccttaggttttatcgggccagatttagataataaaactattaaatctagttctaattgggaaaaaaaatggacaagaataattgaccattctgcaagtgacctttcaaagttcataagtggtgggaataaagttaatttccataaagtttttcaaaaattttcttttgattcgaaagactatctaattggggatatcaggaatgccaaaaaaggagataaaataagtaataatgatgatgaagaacttaaagaaaaaaaaggtatcgaaattggacatattttccaactaggtcagaaatatagtgaaaaattaaatgcaaagttctctgataaggatggtcagctaaaaaatttatggatgggttgttacggaataggagtgacaagaatagctcaagccgctatcgaacagaatcatgatcaaaaagggatttgttggcctatccagatttgtccatttgaagttattattatcccaacaaacctaaaagatcctattcaaagtgatcttactgagcatatctataacaattttttaattaataaaattgatgtccttcttgatgatagaaacgatagagctggagtgaaatttaaagatgcggaattaattggtattccttttcagataattattggcagagattctattaataaagaagtagaacttttatgcagaacaaataatactaagcttaaaattagtactgataaattgttagaaacatttatttccgaatctgaaataatgtacaataaaaagtcttgag

SEQ ID NO: 298966 - DNA, 1240 bp, Unknown
  Bacterial polypeptide expressing nucleotide sequence isolated from the Sargasso Sea
atgaaattatcgaattaccctattaaaacgtttaaagatgccccatctgacgctgaactaatctcgcatcaacttatgttgagaacggggctcataaagagattggcttcaggaatattcacttggatgcccttcggtttaaaagttttaagaaagatcgagcaaactgtcagagaggaaatggataactcaggtgcttttgaggtcctcatgccaaccatacaaccttcagagttatggcaagaaaccaagaggtgggatgattatggtgatctgcttttacagattcgcgatcgtcatgaacgtctgttttgctatggtcccacgcatgaagaggtcatcactgatattctcagaaaaagtgtaaaaagctataaacagctacctgttaacttctatcagattcaaacaaaattcagagacgagattcgacctcgatttggtgttatgagggcgcgtgaatttctaatgaaagatgcttattcatttcatttgaatcaagattctcttgaagaagaatatgaaaaaatggaccaaacgtatgaaaagatcttcacaaaactggagcttgatttcaggaaagttcaggccaccagtggggagattggcggttctgtttctcatgagtttcatgtgattgcagaatctggcgaagataaaatcgcattttgtgatgatgagaactttgctgcaaatgttgagacgttggagagtggaaatgcgcccaatggtggagaattaacatatgcaagaggcattgaagtgggtcatatttttcaactgggtgataaatatagtgaagcgatgaaacttgaagtattggactctaatggaaaaaacgtcaatccatatatgggttgttatgggattggtatctcgaggattgtagcagctgcgatagagcaaaatcatgatgataaaggaatcatatggccaagtgccatctcacctttcgagatattgatcattgttctcaatgacaaagatgattcaaatgtaataaatcaagcaatgaaaatttaccaagaactcagatcagatggcatagaggttgcgatagatgatcgagatgaaagagctggggtcaaatttgcagatgcagacttattgggcgtgcccactcaagtcattgttgggaaaagaggtttagaacaaaagaagctagagatcacctcaagaagcacaggagaaaaaagagaggtcaagatagacgagatcgttaatcacctcaagaattgat

SEQ ID NO: 298967 - DNA, 1033 bp, Unknown
  Bacterial polypeptide expressing nucleotide sequence isolated from the Sargasso Sea
catgcgcactagtcaatatttgcttgccacgcagaaagaaacacctgccgatgcagaggttatcagccatcagcttatgctaagagctggtatgatcagaaagctagcctcaggtctttacacttggttgccttctggtcttcgtgtacttaataaagtagccaatattgttcgtgaagagatgaacaaagcaggcgctattgaagtgctaatgccagttgtacagcccgctgacttgtgggaagaatctggacgttgggaagaatatggaccagagctgcttcgcattaaagaccgccaccagcgtgatttcgtattaggcccaacacacgaagaagtgattactgcgctagtgcgtaacgaaattagcagctacaaacagcttccactgaacctgtaccaaattcagactaagtttcgcgacgaagtacgccctcgttttggcatcatgcgtggtcgcgaatttaccatgaaagatgcgtacagctttcacttagaagacagctgtttagaagaaacgtatcagaaaatgtatgacgcttactgcgctattttctcgcgtatggacctagatttcagagcagtcattgccgattcaggttctatcggtggtaatcattctcacgaattccatgtacttgcagcatcaggtgaagacgacatcgctttctcaaatgaaagtgattacgcagcaaatgttgaaatggctgacgctgtggctcctgaaaaggctgtcgcctcgggtgcagcggtagaaactaaagatgccaagggcaaagattttaatgccattctaaaaagcgtagaagcagaagcatcaaacgccgttaaagtagtattagttaaagccgctaacgaagtagatagtaaaggcgaagaagtggttgctgacaaatgggtagcccttgtacttcgtgctgatcatgaactaaatgatgttaaagctgagaaattagacggtgtttgcagcccgcttgtagaggcttcgtttgacaagcaaaagatatctaggtgtgtcacctttgtttgctga

SEQ ID NO: 298968 - DNA, 1291 bp, Unknown
  Bacterial polypeptide expressing nucleotide sequence isolated from the Sargasso Sea
attgattgaggagattatagtgtatttctcaaaatttttcgttcctactactaagcaagagccttcagatgctgagcttgctagccataaattaatgataagaagtgggatgataaagaaaactgcagcaggaatatataattggcttccaattggtctaagagttcttaaaaaagttgagaatatagtaagaaacagcatgaatgcatttggcgcacaagaaatattaatgccaatggttcagccagctgaactttggaaagaatcagagagacatgatgaatatggaaaagaacttctaaaatttcaagatagatccgaacgtgattttgttcttgggccaactcatgaagaagttatttgtgacatatttagaagttatccaatcagctataaagaattgcctataaacctttatcaaatacagaccaaatttagagatgagataaggcctagatttggtgtaatgagatcaagagagtttgttatgaaagatgcatatagttttgatatcaatgaagatggtcttattgaaagctatgaaaatatgaaaaaagcttatattgatgccttcaataagatagggcttgattacaggatagttaaagctgatgccggcgttatagggggtgatgtaagtgaagagtttcatattgttgctgattctggagaagatcttattgcaataagtgattctagtgattttgctgctaatgtagaagttcttgattacagcaaagatccaagtgaattgaatggtcaaaagtctcctgacggtgtaggaaaactgcaagttaagagaggaattgaagttggtcatatttttcagctaggtaaaaaatatagcgaaaaaatgaaagtctcattgaaaaatgaaaagggcaaagaacaagatctttatatgggttgttatggtattggcatttcaagaattgttgccgcttctattgagcaaaatcatgatgataaaggaattatttggccttattctatagctccatttcatttaaatataatttgtttagatccaagcaaaaaagaaatattagaagagtgtgaaagtgtttataacattctaaaaaaatctggtcatgatgttttgttagatgatagggatataagagcaggaataaagtttactgaacatgaaatgttaggcatacctttttcaataattattgggcctaataatttcaataagaataattatgagtttactgttagaaaggacaacgtaaaatcagaattaaacattgatgagattaaacaaaaattggaggaattaaaatga

SEQ ID NO: 298969 - DNA, 1621 bp, Unknown
  Bacterial polypeptide expressing nucleotide sequence isolated from the Sargasso Sea
gcctccggcatgtatgcctggctgccgtccggtctgcgggttctgaaaaaaatcgagaacattgttcgcgaagagatgaacaatgctggtgccatcgaagtctccatgccggtggtgcagcccgccgagctgtggcaggagtccggccgctgggatgactacggtcccgagctgtgccgtctgaccgaccgtcacaaccgccccttcgtgctgggtccgacccacgaagaggtgatcacctcgctggtgcgttacgaagtgaacagctacaagcagctgccgctcaacctctaccagatccagaccaagttccgcgatgaagtgcgtccccgcttcggcgtgatgcgcggtcgcgaattcctgatgaaggacgcctactccttccacatcgacaaggcttcgctgatcgagacctacgagcggatgcacgccgcctactgcgccgccttcacccgcatggggctgaacttccgtccggtgcaggccgataccggctccatcggtggtaccggctcccacgaattccaggtgctggccgagagcggtgaagatctgatcgccttctccgatacatcagattacgccgccaacatcgagatggccgaagcactggcaccggctggcgagcgcgctgctgccaccgcagccctgaccagggttgccaccccgaatgttcacaccatcgacgaagtggccgctttcctgaacgtggcaccgaccgccatcgccaagaccctgctggtactggcagaggaagatgagcacggcaaacaggccgtcatcgcactggtactgcgtggcgatcacgagctgaacgaaatcaaggcagagaagctggccggcgttgccaacccgctgaccttcgccaacgacgagcagatcaaggctgccgccggttgcgacgcaggctccatcggtccggtcggctttgccggtcgcatcatcgccgatcgcagcgccgcccatctggccgacttcgtctgtggcgccaacgaaaccggcttccacctgaccggtgccaactgggatcgcgatatcgcctcctatgaagtggccgacctgcgcaacgtggtagaaggcgacccgagcccgtgcggccagggcaagctgctgctcaagcgcggcatcgaagtgggccacatcttccagctgggtaccaagtactccgaagccatgaaggcgagcgtgctgaacgagggcggcaagtccgtcaccatggagatgggttgctacggtatcggggtttcccgcctggtggctgccgccatcgagcagaacaacgaccagtacggcatcatctggccggaagccattgccccgttcgaagtggccatcgtgccgatgaacatgcacaaatccgagcgcgtggccgagcaggcacagcagttctacaccgagctgaaagccgccggtgtggatgtgctgttcgatgaccgtaaagagcgcccgggcgtgatgttcgcagacatggagctgctgggtgtgccgcatgccatcgtcatcggcgatcgcggtctggacaacggtgtggtggagtacaagtgccgccgcaccggcgagaagcaggaagtggctatcagcgagatcgttgccctgctcaaggccaagctgggccgctaat

SEQ ID NO: 298970 - DNA, 1288 bp, Unknown
  Bacterial polypeptide expressing nucleotide sequence isolated from the Sargasso Sea
aatgttttggtctaaaatttttttacctactttaaaagattctcctcaagacgcagaagttataagtcatcagctaatgttgagagcgggaatgattagaaaagtaacttcaggaatatatacttggcttcctcttggattaagagtattgaaaaaaattgaaaatattgtccgagaagaaatggatgcatctggcgctcaagaggttttaatgccaatggtccaaccaaaagaattatgggaagaaactaaaaggtgggaaaaaatggggccagaactcttgcgttttcaagataggcatgaccgagatttctgccttggacctactcatgaagaagttataactgacttggtaagaaataatgttaaaagttataaagagctgccattaaatctttatcaaattcaaacaaagtttagagatgaaataagacctcgttatggtgtgatgcgtggaagagaatttcttatgaaagattcttacagcttcaatatcgataaagattctttagatgaatcatatcttcttatgaaagaaacatataaaaagataatagaaagattgggcctagaatataaaattgtaaaagctgattcaggttcaattggtggtgatgcatctgaagaatttcatgtacttgctgaaaatggtgaagatacaattgctgtaagtgattcatctgaatttgcaattaacactgagcttttacttggtgagggtgaggacattaactcccttcagggaaaaccttcgcctgatggtactgggactattgaaataagaaaaggtattgagattggtcatatctttcaacttggagaaatttatgcagacgaaatgaatgctaatgtcttagatcatgaaggtaaatctcaaactctttttatgggctgttatgggataggagtttctagactggttgctgcttcaatagagcagaatcatgatgataaaggtattatctggccggaagtaattgctccatttgaagtaaacattattgcgataggatttggaaaagacaaaatgattgcacaagctgcaattgatatatacaacaaattatcgtctatgggctatgaagttatcttagatgacagaaatgacagttttggaacaaaaatgaaagattcagaattaattgggataccaattaatatcataattggtaaacaatatactgagaaaaatgaaatagagctgagacatagggacggtcatagttcaataggcatggttgatgacattgaaactatcttcgagtacttcaaaaaagaagagagttag

SEQ ID NO: 298971 - DNA, 760 bp, Unknown
  Bacterial polypeptide expressing nucleotide sequence isolated from the Sargasso Sea
atgaaagcatcgaagttaatatttgctactcaaagagaagatccatcggatgctgaaatagttagccataaactaatgataagagctggattaatacgtcaggtttcttcaggtatatataactggcttccaacaggtaagaaagtgcttcacaaagtagaaaatattataagagaagaaatgaacagtgctggagcacaagaaatacttatgcctatggtacaacctgtctctttatgggaggagtcaggaagaatagaacaatatggtaaagaacttttagttttcaaagataggcatgataatgagttttgtttagggcctacccatgaagaagtaataacagatttatgcaaaaacatcctaactagctataagcaacttccaattactttatatcagattcaaactaaatttagagatgaaatcagacctagatttggtgtaatgagatccagagaatttgttatgaaagatgcatactcctttgatctagatcaggagagtttagatcttacctatgaaaatataagagcagcctacttaaatatatttaaccgctttggtttagattatcgtttagttaaagcagatagtggagctataggtggatctgactccgaagaatttcatgtattagctgattcaggggaagatttattagctttcagtgataaaagtgattatgcaatcaatgctgaactacttattgaattacaagaagaacaagacccagcttctttagaaggcccaagatagt

SEQ ID NO: 298972 - DNA, 1276 bp, Unknown
  Bacterial polypeptide expressing nucleotide sequence isolated from the Sargasso Sea
atgaaagcttcacacttaatattaggcactcaaagagaaaatcctgctgatgcagagataattagccatcaactcatgataagggctggtctgattagacaagtttcatctggaatatataactggcttccattaggaaagaaagtacttcaaaaaatagaaaatatcatcagaaaaggtatgaatgatgcaggggctcaagaaatcttgatgcctatggttcaaccagcttcgctgtgggaagaatcaggaagaatcgatcagtacggacaagaacttttagtattttttgaccgacacgagaataagttctgcctcgggccaacccacgaagaaataatcactgatttatgtaaaaatctcataacgagttataagcaacttcctttaaatttgtatcaaattcaaaccaaatttcgggatgaaataagacctagattcggagtgatgagatccagagaattcattatgaaagatgcttattcttttgatcttgataaagaaggtatggataaaagttactctattatgaaggaagcatacatacaaatattcgatgccttagggttagattacagaattgtcaaagcagatagtggcgctataggtggctcggattcagaagaatttcatgttcttgcagattcgggggaagaccttctagctttcagcgacaaaagtgattatgcaattaatgcagagctgttggcggaacttcaagagggccaagaccctgcttcactggagggtatgcccagtccagatggtaaaggattgctaaagttaaaaagaggaattgaagttggacatatctttaaactaggaaggaaatattctgaggttcttaatttgaggatacaaggtgaggataaagatatatatcctgaaatgggatgttacggaatcggcgcttcgagaatagtggcagctgcgattgaacaaaactatgatgataaaggaattatatggccaaaatctctagcaccttttgaagtagctatagttgaagttaatcaaaagaataaagatgaaattaagaaaaaatgtttagaaatttatcaattacttaaagataataatattgatgtactttgggatgatagagataaaaggcctggagttaagtttgctgacatggaagttacaggaattcctttcattataattatcggtgaaagaactatagaaacaggtgaaattgaattaaaggaaagaaaagatgagaaacctaaattagtttctcatcaagatcttgtttcaattattaaaagctaac

SEQ ID NO: 298973 - DNA, 1783 bp, Unknown
  Bacterial polypeptide expressing nucleotide sequence isolated from the Sargasso Sea
atgcgcgtctcccgcctgatgctggtgacgctgcgcgatgtgccagctgaagccgaaatcacttcccaccagctgctgttgcgtggagggttcattcgccgagtcggctctgggatctacgcctatctgccgatgatgtggaaggtgttgcagcgcatcaccacgatcatccgcgaggaaatgaatcgtgctggtgctcttgaaactctgttaccccagctgcacccctcggagctctggcaacgcagtggccgttggcagggatacaccgccggcgaagggatcatgtttcacctggaggaccgccaagggcgcgaactgggtctgggaccgacccatgaggaggtgatcaccagcctggcgggcgagctgctgcgctcctaccggcaacttcccgtgaacatataccaggtgcagacgaagttcagggatgagatccgccccaggttcggcctgatgcgggggcgtgaattcatcatgaaagatgcctattcctttcacgccaacgaagccgatctacaggcgacctacgccgtgatggatcaggcctaccgacgcatcttcgagcgctgcggactcgaggcggtgcctgtggatgccgacagcggcgccatcggtggtgcggcatcccaggaattcatggtcacggcggaagctggcgaagacctgatcttgatcagcgatgacggtgcctatgccgccaaccaggagaaagccgtgtcaatccccgacgcggtcgctcccctaccgcctgcagcactcacccgcctcgaaacgcctgggcagaccacgattgaagaggtctgcacagcccagggctggcagccagggcagcttgtgaaggtgctgctgctgctggcacggcttgaggacggccaacaacagcccgtattggtgtgcctgcggggggaccaggagctgaatgaggtgaagctggtgaatgcagtgagtcgccgcagcgagcagggcgttctcgactgccgaccgatcagcccagacgatcttcagcggcaggggatcaacaccattcccttcggatccatcggcccggatcttgccgatgaggtgctggctgacgccgccagctggacgacctcatttcttcgcctggccgacaccaccgcaacggagctgatgcagttccactgcggcgccaatgctgaagaccagcaccgcagccactgcagctggggtgacctaggcggggctccagtgggcgaagacctacgcaaggcccgtgcaggcgagcgctgcgttcacaacccggacgcccgactccaggagaagcggggcattgaggtgggacatatcttccagcttgggcgtaagtattcccaggctctcgactgttgcttcaccaacgagaacggccgagacgaaccgttctggatgggttgctacggcatcggcgtctcacgcctggcccaggcagcggcggagcagcaccacgacgatgccggcatccgctggcccgccgccatcgctccctatgagctcatcgtggtgatcgccaacattcaggatgacgcccagaccgatctcggagacacgatttacacaacgcttcttgagaagggcatcgatgtgctgctggatgaccgcaaggaacgggctggggtgaaattcaaagatgctgatctgatcggcattccctggaggctggtcatcggccgcgatgccgccgaaggcaccgttgaactggttcaacggtccaatcgcgagatgcgcaaactgccccaccgcgaagcgatcggcgaactgttgaaggccctgcgcccttaaa

SEQ ID NO: 298974 - DNA, 109 bp, Unknown
  Bacterial polypeptide expressing nucleotide sequence isolated from the Sargasso Sea
gctgcggctcaccaacaccctcacccgccgcacggagccgttcacaccgctgaccccaggcaaagcgagcatctactgctgcggtgtcacggtctacgacctctgccat

SEQ ID NO: 298975 - DNA, 121 bp, Unknown
  Bacterial polypeptide expressing nucleotide sequence isolated from the Sargasso Sea
tatggatatttttttaacaaataatttaaataataaaaaagaacaatttattccaaaagataaaaaaaatattggaatgtatgtttgtgggccaaccgtttatgatgatccacatattggc

SEQ ID NO: 298976 - DNA, 555 bp, Unknown
  Bacterial polypeptide expressing nucleotide sequence isolated from the Sargasso Sea
aatatagtcctagtgtaattagatttttcatattacaagctcattacagaagtgtactagatttttcaaatgaagcattattagcttcagaaaagggacacaaaaagctctttgaatctattaatttattacaaaaacttaatcactcaaaaaaaactaatggattcaatgttaatgaatggaaaaatgattgttacagtgcaatgaatgatgattttaatactccaattcttatttcagaaatttttaaagttgtaaaatatataaatcaggtgaatgatggattagcttcaattgggaaagaagatttaaagttggttaaacactattctagttattttttatatgatattcttggtcttgaaaatgagtttaaaagtgaaattaaatatggtgataaattaaaagaaactttagatattcttataaaaatcagatcagaggcaagaattaataaaaattttcagctttctgatagtattagagataatttagaaaaaataggtattttgttaaaagatgataaagaaggtactaattttacaattgattaat

SEQ ID NO: 298977 - DNA, 728 bp, Unknown
  Bacterial polypeptide expressing nucleotide sequence isolated from the Sargasso Sea
aatcgcccaatcagaagcagccaatggcaaaaagctagcgaactattggttacacaatgggatggtcaatgtaaatggacaaaagatgagtaaatcccttaaaaattttaaaaccatcagagagctaattaattcaggtataagccctatgactttgagatattttgttatgactgtgaattatagaaaaccacttgattttactgaagaagctttaaggagtgcttcagaagcttggaaaaacattaatgtagccctctcttttatggaccttacaaaaggtacttttaaatctattgataaaaatgaatctatcgaagaagaatataaagagaaaataagctttgacttatctcaaaaaaagtttcaattttctgaggctctgggaaatgaccttaatacagccggtgctatcgcgattatttacgatttagcaaaaccattaaaaaactttttaaaccaatttcaaagggtcgaaggttttgaaatagacccaaatgaaaaattctttctacttgagaattttaaaactcttgaaaagttgactgaggtacttggtcttaaaaaagaggttttagtaaaagaaagtaaaataacagaagaagaaatatctacgctaattaatgaaagattgaaagcaaaaaaggaaaaggattatacgaaggccgatgaaattaggaatttattaaaagaaaaaggtattgaacttattgatcaatcaaaagaaa

SEQ ID NO: 298978 - DNA, 115 bp, Unknown
  Bacterial polypeptide expressing nucleotide sequence isolated from the Sargasso Sea
ctgttaatccatctccatgtgagaatctacgcgtgtggtccaactgtatacaactatgctcatattggtaatgcacgaatggcagttgttaatgatttgctggttcgcgtttaaa

SEQ ID NO: 298979 - DNA, 370 bp, Unknown
  Bacterial polypeptide expressing nucleotide sequence isolated from the Sargasso Sea
aatgaattgttacaaagctatgaatgatgactttaataccccactattaatcgctgagctttttaatgcaatacattattctaattctgtattaatgggaaaagaaaaaatttcaaaaaaagatcaaaatcgtcttttgaataaaacttctgtttttttctcagaaatacttgggcttaatttactagttgacaataaaaaccttgaatccgataaactacttggtaaaacattagaccttttaattaaaattcgaaataaatcaagggcaaatagagattttgatacctcagataaaataagggaggagttaaataaaataggaattactttaaatgacaatgaagacgaaacaacctatgagtattaa

SEQ ID NO: 298980 - DNA, 157 bp, Unknown
  Bacterial polypeptide expressing nucleotide sequence isolated from the Sargasso Sea
aatgaataaattacatttaactaattcacttacaaataaaaaagaaatttttaatccaataaataaagaaaacgtttctttatacgtatgtggaccaaccgtttatgacaatcctcatgttggaaacgctcgtgctttagtagtgtttgatcttctt

SEQ ID NO: 298981 - DNA, 415 bp, Unknown
  Bacterial polypeptide expressing nucleotide sequence isolated from the Sargasso Sea
aatgagcttaaaattatataattcactttcaagtaaaaaagaagtcttcaaatcaatttctgataaaaaagttaaaacttatggttgcggtccaacagtttataacgatcctcacataggaaattttagaacctttgtattttatgatttattaaacagagttctacagttaaatggttatgagacggaaactgcagttaatataactgatattgatgacaaaattattgatagagttaatcaggaaaatacttcattaaaggaaattacttcaaaatatgaattatcattcctagaattgtcaaagtccttaaaaattttaccaaacaatcataatccaagagcaacagagtatgttgaaaaaatgattgagttcatttcagctttaataaatcaagatttagcatatgaaatg

SEQ ID NO: 298982 - DNA, 478 bp, Unknown
  Bacterial polypeptide expressing nucleotide sequence isolated from the Sargasso Sea
aatgattcatttgtataatagtctctctaaacaaaaagaggagtttattcctttagatcctaaacacgttaaattttattcttgcggtccaacagtatataacaagattcatataggtaatgctagagcatttctagccgcagatttattatcgaaagtgctgaaaggtatttatccgaaagttacttatgtatctaatatcacagatatagacgacaaaattattgaagcttcaaagcatgaaaatttaccaattaaagatttaacaaaaaaatattttgacatttatatggaagatatagggttgattggaataaatcctccagacatacagccttttgctacagattttattgatgaaatgattgcttatatagaaaaacttatagatttaaataaggcttatgaagctaatggtaatgtattgtttagagtaaattcctttaaaattatggatgtttatcaggtcgaaaaatag

SEQ ID NO: 298983 - DNA, 418 bp, Unknown
  Bacterial polypeptide expressing nucleotide sequence isolated from the Sargasso Sea
tctttacaagacctttcttacgaaacggacgagcatattccttctgaatattcagagaagtttcatgatgcaatgcaggacgactttaattctccgtcagccatatctgttttgtttgagatggtaaagcaaataaacattcttaagaaagaagatcagttaactcatgctaatgctttggcctcagaactcatttcgttatcaaatattctaggaatactctcagaaaatcctgaagaatacttcacaagtggcataaatttaagtgatgaagatattgagcaagcaattgagagaagaaataaagctagacaagaaaaggacttcgaactttcagacaaaatcagagatgatctacttaaagagggaataatcttggaagataaaggtacaaagacgatatggaagaaatcttaat

SEQ ID NO: 298984 - DNA, 355 bp, Unknown
  Bacterial polypeptide expressing nucleotide sequence isolated from the Sargasso Sea
gatgacaattaagttttataactccttaactaatcagaaggaagattttgtacccatacgcgagggtgaggttgggttgtatgtctgtggaatgacggtctatgataattgccatttgggtcatgcaagagcgatgatggcttttgacattcttgcccgctatcttcgatatcaaaattataaagtaaattttattcgcaacattactgatatagacgacaaaattattgaaagagccaatgaaaataaagagacaatagatgctcttacggacagaacaattgcgagcatgcaagaagatttttctatgcttgggttggagcttccacaaatgagcctcgtgcaactgaccata

SEQ ID NO: 298985 - DNA, 939 bp, Unknown
  Bacterial polypeptide expressing nucleotide sequence isolated from the Sargasso Sea
tgttaccgtagctttggtagaacgagaccatcctggtttaatccaagatacgcatcataatccgttgaatgcgggattccccaatggtacgattaagggagagatagatatagatatagatcaagtgattggtggtgcagagaatataggaaatggttggaagatgttgatggaatgtttatcagcgggacgtggcgtaagtttaccggctacggcgaacgccagtagtaaaacggcaacgtatggtatttatcattacatgaaggtacgcgagcagtttcgtatgccgttggcctccatggaggctatacaagagaaattcatgcgcatgatgtatcatacgtgggtcatacaatcttcagtagaaatgacgaatgatttattggatgaaggacattcaccggcggtagtaagtgcaattatgaagcaacaaaccacggagcgtggtcgtgaggtattgaacgatgccatggacattcatgcggggggagcgatttgtttaggtaggaataatttcctggaagcattttaccggagtgcgccgataggtataaccgtagagggttccaatacgttgacccgtagtttgattatatttggacaggggttaaataagagtcatccgcatatatttcctttgttagaatctattttaaacgatgatatatcggcgtttaagaagagttttaatgcgttggtagggcatagtgtgtcattgtatttccgcagttttacattaggaaaagagttagaccaggaggtggtccgttttgccgcattaactaattttgtagcgttaaaaggaggagcgttaaaacgggagcaacaattatcaggggatatggcggatatgtttagtaatttgtatttggcggtaaagtgtaaatattatcagaaaaaacacaacgtctcagaggtatatacggattatgtagtaaa

SEQ ID NO: 298986 - DNA, 361 bp, Unknown
  Bacterial polypeptide expressing nucleotide sequence isolated from the Sargasso Sea
atgaagatcaaactctacaattcaaacaccaagagcaaagagctatttgttcccattgaccccaaaaaggtcacaatgtatgtctgtgggcccacagtatatagttatcctcatattggaaatgcgagaggtcctgtcatattcgatgttctagcaaggcttttaaggagggaatttgatctcacgtacattaggaatataacagacctagacgacaaaatttatcaggcagctgatgatgagggcgtgcatatttctgaagttacacagagatatacaagaatttatcaagaagacatgagtgccttaggtgtggaaaagccaagatttagagccattggctacagagcatattcctgag

SEQ ID NO: 298987 - DNA, 373 bp, Unknown
  Bacterial polypeptide expressing nucleotide sequence isolated from the Sargasso Sea
gtgtcggatttccgcagcacaatggacgatgatttcaattccgccggtgccctgggcgttttattcggctttgtgacgaaggtcaatacggagttggatgcgaaagcaaatgttagcgcgactgatagggatttggcccttggggcgctgagatctatggatagggtgcttggcttgcttgaagtagcgcaggcgtcacgtgtcatagacgctgacctatcatcctgggtagaaaggatgattgaagaacgagcagaagctcgggcttcgagagattttgctcgggcagacgagatccgcgaagagttgtccgcgaagaacatcgtgctcgaggacagtgccgaggggacgcgctggaaggtggtcaactagg

SEQ ID NO: 298988 - DNA, 542 bp, Unknown
  Bacterial polypeptide expressing nucleotide sequence isolated from the Sargasso Sea
cctcaatgagaatgcttcggaagttctccgttttttcttaatttctagtcactatcgtagtccattaaattactctgatgaggggttgaaggaagcaaaaaactcccttgatcgcctttataactctttacaagagctttcttatgaaactgatgagcatattcctactgaatattcagggaagtttcatgatgcaatgcaggatgattttaactctccgttagccatatctgtcttgtttgagatggtaaaagaaataaatattcttaagaaagaaggtaagttaactgaagctggtttcttggcttcagaacttgtttccctatcaaatattttaggaatactgttagatgatcccaaaaattacttcacaagtggcatcgatttgagtaatcaagatattgaggctgccattgagataagaaataaagctagaaaagataaggacttcgaactttctgacaaaattagagatgatcttcttaaaaaagggataactttagaagataaaggaacaaaaacgatatggaagaagtcttagt

SEQ ID NO: 298989 - DNA, 134 bp, Unknown
  Bacterial polypeptide expressing nucleotide sequence isolated from the Sargasso Sea
gatgaataaacaattaaatatatttaatacactttcaggacaaaaagagaaatttgttccaatcaataagagcaaagttggtgtttatgtttgtggacctacggtatacgacttttcacacataggaaacgcga

SEQ ID NO: 298990 - DNA, 349 bp, Unknown
  Bacterial polypeptide expressing nucleotide sequence isolated from the Sargasso Sea
atgattgaaatatacgactctttttcacgaaagtatgcaaggctaggacctgcaaaaaaaattaatttgtacgtttgcggaataactacatcagattattgtcatttaggtcatgcattttcatcaatagtatttgaagttcttgatagatttttgtctcatcaaaaatttgatgtgtatagagtgcaaaattttacagatgtagacgataaaatcttaaataaatcaattgaagaaggaacttccatgaaagaagttgctgaaaaatataccaaagcattctttgaagatatggatgctctaggaattaaaagagcatcaattttcccaaagcaacagaagaaataga

SEQ ID NO: 298991 - DNA, 341 bp, Unknown
  Bacterial polypeptide expressing nucleotide sequence isolated from the Sargasso Sea
gatgacaattaagttttataactccttaactaaccagaaggaagattttgtacccatacgcgaaggtgaggttggagtgtatgtctgtggaatgacggtctatgataattgccatttgggtcatgcaagagcgatgatggcttttgacattcttgcccgctatctccgatatcaaaattataaagtaaattttattcgtaatattactgatatagatgacaaaattattgaaagagccaatgaaaataaagagacaatagatgctctcacagatcggacgattgcgagcatgcaagaagatttttctatgctgggattggaacttccacaaatgagcctcg

SEQ ID NO: 298992 - DNA, 904 bp, Unknown
  Bacterial polypeptide expressing nucleotide sequence isolated from the Sargasso Sea
tgaaaagctaatggagcagggccttgcatatgagtccaatggttcgatatattttgaaataaacaaagacccaaaatatggtgaactctccaacagggacatcgatcagatgcttggaggagctcgtgtagatgtcaggaaagagaaacgtcaccctggtgatttcgcactttggaaacgagcagagccgggacacttgatgcgttggcgtgatccattcagcggatggggttatccaggatggcacactgaatgtgtagtaatgagtattcgctatcttggtgatgagtttgatatacatggaggtggcatggatttaaaattccctcaccatgagtgcgaactttctcaagccagaggactcaagaaaccatttgctagaaagtggatccatacgaatatgctgaccattaatggacagaaaatgagtaagtcctccggaaattttgtaacattgccgaaactatttgaaaacttcgatcccactgtaatacgctacttcattgctgcaagtcattaccgttctgtagtagatttcaatgaaaacgtatttcactctgcagaaaactcactaaaacgcctgcatcaaactgttaaaaaacttcgagaattaaaacctgaaggagttaagtcatccgggaaaaaatttgaagaattcagtaagcgtttctgccagtcaatggacgatgacttttcaacaccgcaagcattggctgcattatttgatttaaatcgagaagcaaacaacctactctcagaaaaaaatccagatcctgaagcaattgctgatgcagaataccttttttccacgttaggcggagacgttttaggcattattcctgaatcaattcaatcaaaccagtcagaacaagatattaacgagataatggcggtaatgggttaa

SEQ ID NO: 298993 - DNA, 622 bp, Unknown
  Bacterial polypeptide expressing nucleotide sequence isolated from the Sargasso Sea
tggtaaaaaatttgcaaattattgggttcataatggtttcgttactgtcgaaggaaacaagatgtcaaagtcagatggtaattttgttacagttaatgaattaaaagataacttccaaggtgaggccattagacttgcaatgatatctactcactacaggcagcccttgaactggactatagctaatctagaagagagtaagaagacactcgataagtggtacagttatttagagagttttaatgaaggcgaactcgacgtagctgataatgatagtgatataatggaagctttgcttgacgatttgaataccccaaaagcaataagtattcttcaccaaaagtttaaaaattgtgaatcaggcaatattagtttagcaagtaactttttatcggcagcaaacatgttaggactcttatcagaaaaaccatcagaatggcttacttggaaacaagaaaatatgaatatcaataaagcccaagttgaattgctcattgcacagagaaatgaggcgcgagtgaacaaaaactttaataaggcggacgagatacgtgatgagttggacaaaatgggtataacacttgaagataaaggtggagaaactgattggaaggtgaaataa

SEQ ID NO: 298994 - DNA, 494 bp, Unknown
  Bacterial polypeptide expressing nucleotide sequence isolated from the Sargasso Sea
aatggaaatatacctttataacacaataaataaaaaaaaggaactttttactccaataaggaaaggtgaggtccatttatatacttgtggtccaaccgtatatgatttttcccatatagggaatttccgaacttttatttttgaagatcttttaaaacgttggttgctgcatatagggtacaaggtaaagcatgctatgaatattactgatgtggatgataaaacaatcaaaaaatcaatgcaaatgaatatccatcttgaagaagtcacaaataaatacctttcagaatttatgtcagatattaattggttaaacatctttcctgctgattattttccaagagcaactgattatataccagaaatgattttaatgattaataaattaataaaaaataatatggcttatatagatattgatggcagcgtttattttgatatttcatcatttccgaaatatggtcagcttgctaatatcaatatagacgatcatc

SEQ ID NO: 298995 - DNA, 172 bp, Unknown
  Bacterial polypeptide expressing nucleotide sequence isolated from the Sargasso Sea
atgggtaaagatatttttttaactaatagtcttggtggtaagaaagaaaaatttatacctaaaaatgaaaaatccataggcatgtatgtttgtggccctactgtttatgatgatccacatattggtaatgccagaccattagttgtttttgatattctttataaaatttaaa

SEQ ID NO: 298996 - DNA, 166 bp, Unknown
  Bacterial polypeptide expressing nucleotide sequence isolated from the Sargasso Sea
atgtcattacagttacaaaacacattaagtggaaaaaaagaaatttttaaacctgttgatccatcccatgtgaggatctatgcgtgtggtccaactgtatataactatgctcatattggcaatgcaagaatggcagttgttaatgatttacttgttcgcgtttaaa

SEQ ID NO: 298997 - DNA, 184 bp, Unknown
  Bacterial polypeptide expressing nucleotide sequence isolated from the Sargasso Sea
aatgaataaagatatttttttaacaaatagctatggtggaaaaaaagaaaaatttcagccaatagataaaaataacgttaaaatgtatgtttgtggtcccacagtttatgatgatccacatataggaaatgcaaggccattagttgtatttgatatcctttttaaagtcttaaaatgtaaatat

SEQ ID NO: 298998 - DNA, 472 bp, Unknown
  Bacterial polypeptide expressing nucleotide sequence isolated from the Sargasso Sea
ctcctagctgcagaaaaaggatacaataaattaaatgatgcgattaatattttagaaagctttaaagattttagcaataagtcagattttgatgtcaaagaatgggtgaataattgttacaaagcaatgaatgatgactttaatacaccaattttaatagcaaatatatttgatgctgtaaagtttataaataaagtgaatcaagaaaagggtaatatttcaaaagaagattgggaagttttattcagatcgataaattcatttgtgtttaatgttatggggcttcaaaaatcaaagcgcaataatgaaaatagcaaaattaatgatgtaattgatgttcttcttgagttaagaaatgatgcaagaaaaaataaaaattatgagctaagtgacaagataagggatatgcttaaaaataaaggcatttctattaacgattcagataaagattcatcatttacaattgattagc

SEQ ID NO: 298999 - DNA, 634 bp, Unknown
  Bacterial polypeptide expressing nucleotide sequence isolated from the Sargasso Sea
gctcaatcaagatgtgcaaatgatagtaaggtttttgctaattattggttacataatgcatttatcacaatgtccaatgaaaaaatggcaaaatcacaaggtaatattttaaaaattaaagattttagaaataataaaagtggtcaagttttaagaatggctttgatgagtgcacattatcgacagccacttgattggaatgataagcttttagaggaatgtgaaaatacaattagtaaatggtataatgtttatttaaacataaaaacaaaattaaaaatttcagatgaaattcttaaacctcttctcgacgatttaaatacaccaggctatattgctaatttacataaattatatgagaaagcagtgaagggttctgatgaagataaaatattatttatttctgcctgcaattttattggattattaaatgaaaataaagaggattggcttaaatttaagaaaaacaaggtatcaatttctgaaaatgaaattttaattaaaattaatcagagaaatgaagctagggtaaataaaaattataaggaagctgacaaaataagagatgagctattagacaaaggtgttttaatagaagataaagatggtaaaacgacttggaaatttaaatgag

SEQ ID NO: 299000 - DNA, 430 bp, Unknown
  Bacterial polypeptide expressing nucleotide sequence isolated from the Sargasso Sea
tttgtatacagcccttcgtggtgttgaagtagatgaaagcactgatctgagctacggtggctatctaacgcgctttgaagcggcaatgaacgacgatttaaacgtacctgaagccttttcggtgttgttcgatgtggcacgtgagcttaaccgccaaaaagataatgtagaagaagcaggtaaactggctgctgttcttaaaggtctaggcgcaattttgggtatacttcaaagtgatccagacaccttcttgaaaggcggtgaaggcaatgacgacgaagcggctgaaattgaagcgttaattaaacagcgtaacgatgcccgtgcctccaaagactgggcagcggcagatgccgcacgcgatgcgttaaacgcaaaaggcgttgtgttagaagacggcccaagcggtactacgtggcgtaaagcgtaa

SEQ ID NO: 299001 - DNA, 183 bp, Unknown
  Bacterial polypeptide expressing nucleotide sequence isolated from the Sargasso Sea
gatgattagaaacttaaatttttttaataccttatcaaacaaaaaggaaaaattttttccaatgaacaatcgtaagatagggatgtatgtttgtggaccaactgtttatgattttccacatatcggcaatgctagaccattagttgttttcgacgttttgtttagacttctaaaaagtcttta

SEQ ID NO: 299002 - DNA, 170 bp, Unknown
  Bacterial polypeptide expressing nucleotide sequence isolated from the Sargasso Sea
tatgaaaagtgaagcacctttcaaaatatttaattctttaaatggccaaaaggaagaatttaatccttgtgattctgatcatataaaaatttatgcatgtggtcctacagtttataactacgcacatattggcaatgctcgtatggcggttgtgtttgatacttttgtaa

SEQ ID NO: 299003 - DNA, 220 bp, Unknown
  Bacterial polypeptide expressing nucleotide sequence isolated from the Sargasso Sea
atgcccctccagattcacaattcattatccggtaaaaaagaagatttcaatcctgttcacaaaggacgggtatccatatacgtttgcggtcctacagtttacggagacagtcacctaggtcacgccaaagcgtatatcagctttgacataattctaagatatttacgctacagtggattaaaaactttttatgtgcaaaacattactgatgttggtcatc

SEQ ID NO: 299004 - DNA, 493 bp, Unknown
  Bacterial polypeptide expressing nucleotide sequence isolated from the Sargasso Sea
catggccctgagactattcgacacgtacacgcgggagatccggccgtttgagccacttgagccgggaagtccagttggcctctatgcgtgtgggccaacggtctatcactacgcacatatcggcaatctgcggacctatctctttgtcgactggctgcgccgcggtcttgaggtgtcggggtacgaagtcaaccacgtgatgaacctgacagacgtcggtcacctgacgtccgacgctgacacaggggctgacaagatggaggaggccaccagacgcgagggtatcgatgcctgggcgattgccgagcgttataccgagtcgttccgggaagatcttactgccctcaacgtcatttatcccaaaacctggtgcaaggctaccgatcacattgaggagcagattgagttcgttcgtgacctcgaagccaaggggtttacgtaccgcacctcggacggaatctatttcgactcgacccgccttcacagctacggg

SEQ ID NO: 299005 - DNA, 221 bp, Unknown
  Bacterial polypeptide expressing nucleotide sequence isolated from the Sargasso Sea
gctgcatttcgttaacattcgccacccccttgatcaggacgatggcatgggactccaaatctacaatagtttgacgcgcaaaaaagaggtttttgagcctctcgtccccggacgagtagggatatacgtctgtgggatgaccgtttacgactattgccatcttggtcacgcccgggtgctggtggtgttcgatatggtggtgcgggctttaagagcctggg

SEQ ID NO: 299006 - DNA, 839 bp, Unknown
  Bacterial polypeptide expressing nucleotide sequence isolated from the Sargasso Sea
ggagacaactacatctataaatagtctcgattatattgaagattactcagattttggaactttaatagaagaggttattgaagatcacttagtagcagactcatctgttgatttgtttttaagtggaggaattgactcctctttattggcttatattactaaaaagaagcttgacaaagacattagacacttttctatgacatttgagaatcaatcttatgatgagaaaaatttaataatgagagtttcagatgaattaaatttaaattctaaaatatttacttttgacaataaaaacatcaataattatgtaaatgaagcgattgaaaacatgaatagtttggttttagactatagttttgtacctacttatttgttatcaaagaaaacatctcaatttactaaagctgtgatttccggcgatggagcagacgaactatttggagggtacgaatggtacagggcagtaagattcttcaatatattgcctccaagcttgttgcaaatatttaaaaagatattcaatacattattaattccatcttctaatggaaaatatatggattcctttacaaagttaaattattttttcaagtatatttcaactgatccatatattcagacaattatctggcaatcagctgataaaaactttagcgaaagtaaagttcagctaatttcagaaaatatatctcaatatatatctaatgatttaagtcagagagacaatcttagaaacattgatttgaatatttttttatattcaaacgtcttaccaaaaatagatacagcttcaatgaaaaattcactcgagattagacccccctttctggatgaaa

SEQ ID NO: 299007 - DNA, 442 bp, Unknown
  Bacterial polypeptide expressing nucleotide sequence isolated from the Sargasso Sea
cgctcgcaacgtttggtacaccgcgctgaaagacgtcacgccggacagcgcggagctcgactggaacgaagcgcatgcgcaacgtttccaggcagcaatgaacgacgacttcaacacgccggttgcagtgtcggtgttgttcgagttggcaactgaagtgaaccgcacgcgcgaccccgcgctggcccgccaattgcgcctgcttgcgcaagtgctcggcttgctcggccgggagccgcgtgcctacctgcaacaggctgcgggcgccgctgcgcaaggcgcgctcgagcccgccgcgatcgaagcgaagatcgccgcgcgcgtggcagccaagcaggcgaaagactatgcggcagcagaccggatccgggccgaattgctcgaagccggcgttgcacttgaagacaaacccggcgggttgaccgagtggcggcgcgtgtga

SEQ ID NO: 299008 - DNA, 555 bp, Unknown
  Bacterial polypeptide expressing nucleotide sequence isolated from the Sargasso Sea
cttggacattaccttctacaattccctgacaaagaaacttgagcccttcgagccaatagagccgccggtcgtgaagatgtatacctgcggcccgacggtctacgacttcgcccagatcggaaacttccgctccttcctgttcgccgacgtcctcaaccgattcctcacagcgacgggttacgaggtgcgccacgtcatgaacatcacagacgtgggtcacatgacggatgacaccgtcgccgacggcagcggcgaagacaagatggcggttgccgggcgtcgcttgaaggaagcgaagcagtcgggtgagatcgccccggattcagttgaagaccccgacaacccgttcgaagtcgcccgctactacacgaaagcctttgtcgaggacgccaagcgtcttgggatgagactgggctgggagtacggcgacaacatcatccacgcaaccgaccacatcgccgagatgcagacccttattagtcagctgatcgacaaggatcatgcatatgtggcggatgacggcgtcatctacttcgacgtccagagcttccccga

SEQ ID NO: 299009 - DNA, 493 bp, Unknown
  Bacterial polypeptide expressing nucleotide sequence isolated from the Sargasso Sea
aatgaaactttacaacacactaaataggaaaatagaagactttaaacccaatgacccaactgaagtaaaggtctacgtatgcggggtaactccttattcctcaactcatgtaggccacgctttgagctatgtcgtttttgatgtattaagacgatatctggaatattcagggttcaatgtgcaccacgtacagaactttactgatgtagacgacaaaatcatattaaaggcacaagaagaagggataagtgaggacgaacttactgaacgatatatccaagatttttttgccaccatggacgccttaaatgttctaagagctacgaagtatccaagagccacacaagaaatcccagatattatagaaactataaataccttaattagcaacggatatgcgtatgctgctggatcagatgtgttcttcagagtcaatgagtccactaattacggtgaacttagtaatcgatcgacagatgacatgatatcaggg

SEQ ID NO: 299010 - DNA, 313 bp, Unknown
  Bacterial polypeptide expressing nucleotide sequence isolated from the Sargasso Sea
tatggttttaaaaattcataacactttatcgggaacaaaagaagtgtttaagcccgtagatgagaaacatgttagagtttatgcctgtggcccaactgtttataactttgctcatattggtaatgccagaatggcagttgcaaatgatcttttaataaatgttttaagaacgcaatataataaagttacttatgtttcgaacataactgatattgatgataaaattattgatgccgctcaagagcttaatgagcccataaataacctaacaacaaaatatacaaagatttacaacgaagatatgggttatctt

SEQ ID NO: 299011 - DNA, 166 bp, Unknown
  Bacterial polypeptide expressing nucleotide sequence isolated from the Sargasso Sea
atggatatttttttaacaaataatttaacaaaaaaaaaagaacattttattcctagagatagaaataatctaggcatgtatgtttgtggaccaactgtatatgatgatccacatataggtaatgccagacctttagtaatttttgacatactttataaattactta

SEQ ID NO: 299012 - DNA, 112 bp, Unknown
  Bacterial polypeptide expressing nucleotide sequence isolated from the Sargasso Sea
atgatcaaaatttttaatacatttggtaaaaaactggaaaattttgtgccaattgataaaaatcatgtaaaaatctatgtctgtggtccaactgtttatgacagaatacaca

SEQ ID NO: 299013 - DNA, 485 bp, Unknown
  Bacterial polypeptide expressing nucleotide sequence isolated from the Sargasso Sea
tatgctaaaattctataattcactaacccaaaaaaaagaggattttaaacctattgaaaaaggaaaagtgaagctatatacatgcggtcctacggtatatgactattctcatatcggaaattttagaacatttttgtttgaagatttattaaaaagagtattaactgcttttggttacgaagtatatcatatcatgaacattactgatgttgatgataaaactataaaaaaagccaatgatgaaaataaagatttaaaagaggttgctttaagatatacagaagcctttaaaaacgatatcaggtcccttaaaataaatgaagctgatctctatcctaatgccacaggccacattgaagagatgatcaaaataattaaaattttaatagataaagactttgcatatgtttcagaagataattcagtattttttaaaatcaataaatacccagattatggaaatcttgtaaaaatatcaaaatcaa

SEQ ID NO: 299014 - DNA, 445 bp, Unknown
  Bacterial polypeptide expressing nucleotide sequence isolated from the Sargasso Sea
tatgctaaggttctacaattcacttactcaaaaaaaagaggattttaagcctattgaaaaaggaaaagtgaagctatatacctgtggccctactgtatatgactattcacatatcggaaattttagaacatttttgtttgaagatttattaaagagagtattaactgcttttggttacgaagtatatcatataatgaatattactgatgttgatgataaaactataaaaaaagccaatgatgaaaataaagatttaaaagaggttgctttaagatacacagaagcctttaaaaatgatatcagatctcttaaaataaatgaagcagatctttatcctaatgccacagaccatattgaagagatggttaaaataattaaaattttaatagaaaaagactttgcctatatttcagaagataattcagtattttttaaaatcaagtaa

SEQ ID NO: 299015 - DNA, 514 bp, Unknown
  Bacterial polypeptide expressing nucleotide sequence isolated from the Sargasso Sea
aatgacacaactaagattatataactctttaacaaataaaaaagaagattttttaccaattgatgacaaccacatcaaggtctatacctgtgggcctactgtttataattattcacatattgggaacgcgaggcctccaattgtctccgatatcttagttaaattattaaaacagctttattctaaagttacatatgtatcaaatataacagatattgatgataaaataattcaggcttcaaaagagcagggtataccgataaaagaattaacaagtaaatatgaggacatttacaataaaaacttaagtgatttaaatatcgctcagcccgacaatcaacctagagcaactgattatattgaagaaatgatttcacaaataaaggaattggttgataatggccacggttatgtaagtgatgggcatgtgttatttagtgtggaaacctttcctaattatggtattctatctgggagagataaagaccaacaaatagctgggagtagagtagag

SEQ ID NO: 299016 - DNA, 385 bp, Unknown
  Bacterial polypeptide expressing nucleotide sequence isolated from the Sargasso Sea
atgaacgacattcttttatatgattctttatcaaatcaaaagaaaacatttgaacctatagacattaacaatatccgcatttatgcttgcggaccaacagtctataactttgctcacattggcaatgccagaatggcaattgtttttgattcttttgtcagattattcagggcaaagtatacaaatgtaacttatgtttcaaatattaccgatatagatgacaagattatcgaagctgccaaggagttgaatgtttctatagatgaacttactcaaaaatatactaaaatttacaatgaggacatgtctaaactcaatgtactacctccagatgttcagcctaaagcaactgagtatgtgaaagaaatggttgattttattcaac

SEQ ID NO: 299017 - DNA, 463 bp, Unknown
  Bacterial polypeptide expressing nucleotide sequence isolated from the Sargasso Sea
gatgtcattaaagttacaaaacacattaagtggtaaaaaagaattttttaaaccagttaatccagatcatgtaagaatatatgcttgcggtccaactgtttacaattttgcgcatataggtaatgcgcgtatggcagttgtaaatgatttattagtccgtgtattaaaaacacaatttaaacaagtaacctatgtatctaatatcactgatattgatgacaagattatagaagcttctaaagaaacaggagaggacataagtgttatcacaaataaatatacagagatttacaataatgacatgagcgcacttggcgttaatcttcctgatattcaaccaagagcaactgatcatattaaagaaatgatcgaattaataaaaagattaattgatgaaaataaagcttatgaaaaagagggtcatgttttatttcatgtgccaagttttgataattatggaatt

SEQ ID NO: 299018 - DNA, 124 bp, Unknown
  Bacterial polypeptide expressing nucleotide sequence isolated from the Sargasso Sea
aatggatatttttttaacaaataatttaactaataaaaaagaacaatttattccaaaaaataaaagtaatattggaatgtatgtctgtggaccaacagtttatgatgattcctcatattggtaa

SEQ ID NO: 299019 - DNA, 205 bp, Unknown
  Bacterial polypeptide expressing nucleotide sequence isolated from the Sargasso Sea
atgaataatgaaattcatatttataattctttaaaaaaccaaattgaactttttaagccaataaaagaaggggaaattggaatttatgtttgtgggccaacagtttattcaagttcccatatgggccatgcaagatctgcaatcgtttttgatgtaatagtaagatttcttaggcaagttggttatagggttaattatgtaagaa

SEQ ID NO: 299020 - DNA, 2317 bp, Unknown
  Bacterial polypeptide expressing nucleotide sequence isolated from the Sargasso Sea
atgaatggattcatttttggctttagtgccaccttattatcagcgatgttgtggccctcgctgctgccaatcaattctttaccctacctttgccttggggcactcatcttattcaaaaaagcgcctagtttgtctggcgtactcttcgcgatgtgttggcttacagggttttgcttagtcttatctcggcaggatcttcctttatcgcaacagccaattcaagtgagggccgaaatcatatcactagttagtcaaaacagcgactgggttagcttcgatattattgtcgataaaccaaatttaatcttttggccaagggctaagttgcgactcacttggcaatctcccgaagcggtgcaagtggggcaagtttggtcatttacgctgatgcctaaaactatctcgagcgtgttaaatcaaggttgctacaacgaacaaaagcaattgattagtcagcatattgttggcaagggacgagtcattcatgcccaactgctcactactcatttttcattaaggaatcacctgattagccaattatcccctaagttgtcgacatttgcgcagggggatattttgctggcgctgattttgggggataagcaactcataccagccagtaagtggcaggcattaaggcaaaccggaactgggcatttagtggcgatatctgggctgcatttatctgtgatcaccgcctgggtgtatgtgtgcacgttgtttctattgagccgcttagcggcgcatccgagccggcgaaatctagtgattgcgctattgctcgccggaggtagtgccttattttatagctatttagcggggtttgcagtttcgacccaacgcgcgttagtgatgattttattgatcatgctgctgagtttattaagacgctactcgagtgcgtgggaccgtttactgtttgcactctttattgtgcttttgctcgatccgcttgcctgtttaagtgctggtttttggctgtcgttttgcgccttggcgattattttatataccttggcaagcgtgccgcgtattcagcccgttgaaggtaacgccacctttagagcaaaagcgagactcgcgcaattttggtcgattcaatggcgtttaagtctggtgttagggctagtgcaggcggtgtttttcggtggccttagcgtacacagtctgtggatgaatatgctggtggtgccatggtttagcttaattgttatccccttgtctatgctggcgtttatcctctggtgggtaggcacatttttggggcaagaatggtttgggctgttccatttggctgatttaacactacttccttatggcaagttactcgaactcagtggtgatttacccgcccattggcattcggtctctgagaccttgctcggcgccagtctgtgcgcactgttggccttgatactgtggcgttatcttccgcatcatagtcggtattggctctggcatttacccttagctttactgtttattccgttcatattagtaatttttccacgtgtgactgagtcctcttcccctcagtggacactgcatctactcgatgtggggcagggattagccgtggtgattgaacaggataaacgcgcacttatctatgatacgggcgccgcttttggtaaggattttagctatagcgaacgggtgattatcccgtttcttaacagcaaaggtttagctcaggtggattatattgtcgtgagtcatggcgataacgaccatgcaggtggtgccgaagtgctggccaaagcctatccaagggcaaactggataaccgatgtggctcatttggctggtatgccttgtgtgccgcagcaaattcactggcagcaattaacgttgaactttatttcgccgcagacggccaagggggggaataacgcctcctgtgtgctgcgtatcgatgatggcgcgcacagtttgttactcagtggtgatattgagaaggaaaccgaagcggtattgattgaacaagcgctcaaaggcaccgagcttaaaagccaagtgctcattgcgccgcaccatggcagccgcacctcatcaactcctgcctttatcgattctgtcgctcctgagttagtattgtttccagcaggtctcaataatcgttatggtttccccaagcccgatgtggtcgcgcgctatcaagcgcgtgatattcattatttaacgacggggcgagaagggcagatcagcgtttcttttgctgctggacggctcgaggtaaagacctatcggcgtgatttggcgccattttggtataaccgcttgtttagatttggtgacttgattaatccagagtaga

SEQ ID NO: 299021 - DNA, 2311 bp, Unknown
  Bacterial polypeptide expressing nucleotide sequence isolated from the Sargasso Sea
catgtttggctttagtgccaccttactgtcagcgatgttatggccttcgctgccgccaattacttatctaccctacttttgctttggggctctcatcttattcaaaaaagcacctagcttatctggcacactctttgcgatgttctggctaacaggattttgcttagtgttatctcggcaggatcttcctttatcccaaaagcctatacaggtgaggggcgaaatcatatcactagttagtcaaaacagcgactgggttagcttcgatattgttgtcgataaaccaaatttaatctttgggccaacggctaagttgcgtttaacctggcaatccgaggcgacactgcaagttgggcaagtttgggatttcacttttatgcctaaaagtatatccagtgtactcaatcaaggaggatataacgaacaaaagcaattgattagtcagcatattgtcggtaaaggccgcgttatgcatgcaaggcttcaagctgagcgtttttcgttaagacatcacttaatcacacgacttgctccaaagttatctgcgttaacacagggggatattctgctggcgttaatcctcggggataaacaacttatctcgcaaactaagtggcaggcgctaaggcaaacgggcacgggccatctggtggcgatatcgggattacatttatcagtgatcaccgcttgggtctatgcttgcgctttgttttttcttacgcgtttggcgccgcatccaagtcggcgaaatatagttattgcgctcatttttgcaggagtgagtgctctattttatagctatttagccggttttgccgtgtcaacacagcgggcgttagtgatgattttattggttatgctgttgagtttattaagacgctactcaagcgcatgggaccgtttgctgtttgccttatttgtggtgttactcattgatcctctcgcttgtttgagtgcgggattttggctttctttttgtgctttggcgattattttatataccttagaaagtgccaaatttacacagtctgttgatagtaaaacaacttttttagccaagtcgcgagtcagagtcatacagttttggtcaatacaatggcgcttaagcctgatattgggactgctgcaagccatcttttttggtggtgtgagtatccatagtttgtggatgaatatgctggtggtgccttggtttagtcttatcgtcattccgctatcgatgctggcttttatcatctggtggttaggtacatttttggggcaatcgtggctgggattattcaatttggcggatttagcactattaccctacggcaagttactcgaactcagcgtcgatttacccgtccattggcatgtggtttccgagacattattagcaggcggcctgtgcacactttttgcgttgattctgtggcgatatgttcctcatcggcgccaatattggcactggcatttgttgatagggttactgtttcttcctctggcattgtctgtttttcagcgcattacagcatcgaaaaccactcaatggacgctacatttacttgatgtagggcaaggattagccgtggtggttgaaaaggatgatagggcacttatctatgatacgggcgccgcatttggcgatgattttagctacagtgaccgtgtggttatcccttttcttaatactcgaggattaactgatatcgattttattgtgatcagccacggcgataacgaccatgctggaggcgctcaagtactggcaaaagcgtatcctcaggcaaaatggattactgatgttgaccacttaaatgctcagccttgtttgccacaacagattgattggcaacaacttaccttacgctttatttccccacaaacccaggcgggtggcaataatgcttcttgtgtgctgcggattgatgatggtcagcaaagtctattactgagcggtgatattgaaaaggaaacagagagtatattgattgagcgagtgcaagcgggctttatacttaaaagtcaggtgcttattgctccacaccatggaagccgcacctcatctacgctggcatttattgaaaaggtggcaccggagttagtactgtttccagcggggttgaataatcgttatggctttcctaaagccgatgtcgttgcccgctaccaagctttgcagataaaccacttaaccaccgggattgaaggacaaattagcgttacttttgaacaagggcgactcgacgtaaaaacctatcggcaagatttagctccattttggtataaccgcttgtttagatttggtgacttgattaatccagagtag

SEQ ID NO: 299022 - DNA, 127 bp, Unknown
  Bacterial polypeptide expressing nucleotide sequence isolated from the Sargasso Sea
aatgatcaaaatttttaatacatttggtaaaaaactggaaaattttgtgccaattgataaaaatcatgtaaaaatctatgtctgtggtccaactgtttatgacagaatacacattggtaatgcaaga

SEQ ID NO: 299023 - DNA, 122 bp, Unknown
  Bacterial polypeptide expressing nucleotide sequence isolated from the Sargasso Sea
gatgacgttgcgtttcttcaacaccctcagcagctcgcttgaaccgtttgaaccgctggttcccggcaaggcctcgatctattgctgcggcgtcacggtctatgacctctgccacctgggcc

SEQ ID NO: 299024 - DNA, 703 bp, Unknown
  Bacterial polypeptide expressing nucleotide sequence isolated from the Sargasso Sea
caagtttccccaccatgactgcgaaatctcacaggccaggggactcgggaagccctttgcgaattactggatgcacaacaacatgctcaccatcgacgggcagaagatgagcaaatcgaccggcaactttgtgaccctcatcgatgccttcgaacagcatgacccgtttgccgtccgttattttattgcctccagccactaccgctcggttgtggactacagcgaaaatgcgctgaaaaccgcaggggcctcattgaaacggctgcaccagaccgtccgcacactgcgtgaaagaaaaccggcggatcaaaaaccttccggaacttggttccaggaaatccaccagcgtttcgaatcggcgatggacgatgatttttccaccccccaggcgtttgcagccttgttcgacctgaaccgtgaagtcaacagcatgctcgcctccgaagacccgaaccccgaagcaatggcagatgcagaatccctgttttccgtttttgggggaaaggtcctgggaatcattcctgaaaaaattgaatccggagagtcagaccagcgccttaatgacgtgatgcaggtgatgatcgatttacggaatcagttccgtgaagaaaagaatttccagggcgcggacatgatccgggaccgtcttgccgaggcaggaatccagctcaaggattcccgtgaagggaccaactgggagtag

SEQ ID NO: 299025 - DNA, 319 bp, Unknown
  Bacterial polypeptide expressing nucleotide sequence isolated from the Sargasso Sea
tatggctgaagatatatttttaactaatagtcttgatggcaagaaaattaaattcgtaccaaaaaatgaaaaatctataggtatgtatgtatgtggaccaacagtgtatgatgatccacatataggtaatgcaagacctttagttgtatttgatattcttttcaaaattttgaaaaaaaaatacgggttccactcagtaaaatatattagaaacataacggacattgatgataaaatcattaaagcgtcaaatgaaaaaaaaatttccataaaagatttaactttaaatatcacagaaagttttcatgatgattgtaaa

SEQ ID NO: 299026 - DNA, 436 bp, Unknown
  Bacterial polypeptide expressing nucleotide sequence isolated from the Sargasso Sea
atgaacgaaatctatttatacgattctttatcaaacaaaaaaagaaagtttgagccaatagatcaaaaccacgtccgcatttatgcttgtggacctactgtgtataactatgcacatattggtaacgcaaggatggcggtagtttttgattcttttgtaagactatttagaaataaatatccaaatgttacatatgtatcaaacattactgatattgatgacaagataattgaagctgcaaatgaatcaaatatccctattaacgaactgacaaagaaatatacagatatctataatgcagatatgtctaatttgaatgtctttcctccagacattcagccaaaagcaacagagtatgttgtggacatggttaattttattgataaattaatccagaatgataaagcttatgaaaaagatggtcatgtatttttca

SEQ ID NO: 299027 - DNA, 178 bp, Unknown
  Bacterial polypeptide expressing nucleotide sequence isolated from the Sargasso Sea
gatgaataaacaattaaatatatttaatactctttcaggaaaaaaagaaaaatttatacctattaatacaggtaaggtcggaatgtatgtttgtggaccaaccgtctacgattttccacatattggaaacgcaagaccacttgttgtttttgatgttttgtttagattgctaaaaaaa

SEQ ID NO: 299028 - DNA, 424 bp, Unknown
  Bacterial polypeptide expressing nucleotide sequence isolated from the Sargasso Sea
atgaatagcttaaaattaacaaattctctaacaagaaaaaaagaaatatttaagccaaataatataaaaaagatttccttatacgcctgtggcccgactgtatatgagagtccccatgtaggtaatgcaagaacccttgtagtgtttgatgtcttatttagagttttgaaggttctctacaattcaaatgtaacgtacgtaagaaatattactgatgtagatgacaagattatagaagcttctcaaaacaataaagaagatataaatgaaattactaatagagtgattaaaatttttcataaaaattgcaagagtttaaactgtttaaaaccaacgatagagcccaaagccacagaacatgtaaaagaaatgatagaaatgacatcttcattaatcaaaaaagggatttgcttacgaaaataaa

SEQ ID NO: 299029 - DNA, 334 bp, Unknown
  Bacterial polypeptide expressing nucleotide sequence isolated from the Sargasso Sea
atgaaaacacttaaaattcataataccttaggtaatactttagaggagtttaagccaatagaccctttaaatgttcgggtatatgcatgtggacctacagtttataattacgctcatattggaaatgccagaatggcagtggtaaatgatttattaattcgctttttaaaaactttgtatccaaaagtcacttatgtttctaatatcacagatattgatgataaaataattgcggcatctcaagaaaataaagttcctataaaagaattgactgaaaaatttactaaaatttataataaagacatgtctattttaggggttaaacagcctgaca

SEQ ID NO: 299030 - DNA, 425 bp, Unknown
  Bacterial polypeptide expressing nucleotide sequence isolated from the Sargasso Sea
aatgaataaagatatttttttaacaaatagctatggaggaaaaaaagaaaaattccagccaattgataaaaataatatcaaaatgtatgtttgtggcccaacagtttatgatgatccgcatataggaaatgcaagaccattggttatatttgatttactttttaaagtccttaaatgcaaatatggtaatgacaaagttgcatatgtaagaaacattacagatattgatgataagataattcaatctgcaaaagataaaaaaatctcgattaaagatctaaccactaaaattactaataattttcaagaagattgtagttatcttatttgtgaaaaacctagctttcaacctaaagcaacagaaaatattaaagagatgatagagatgatcagtattttagttaaaaaaggttttgcatacgaaa

SEQ ID NO: 299031 - DNA, 123 bp, Unknown
  Bacterial polypeptide expressing nucleotide sequence isolated from the Sargasso Sea
tatggatatttttttaacaaataatttaactaataaaaaagagccctttgttcctttaaatgaaaaaaaagtaggaatgtatgtatgcggtcccactgtttatgatgatccacatataggaaa

SEQ ID NO: 299032 - DNA, 730 bp, Unknown
  Bacterial polypeptide expressing nucleotide sequence isolated from the Sargasso Sea
gttgaggtttttcaatacggcttcagggattaaagaagaattttcaaaagattctaagaaattagggttatacatctgtgggcctactgtatactcagaaacgcaccttggccatgcaaaatcttatgtctcttttgatattttaaagagatggctaacctacaagggatatcacgttactcatattcaaaattttactgatgtttcagatgaaaccgccgagggtgcgttgagggaaggagtagatgagtttacttttactcaaaaatatgaaaaggaatttttagataatatggcattattatcgaatacttatgcatcaaaatatactagagcctcagagtttgtaggaaagattgctgaggaaactaagaagttactcgaatctggagaagcataccaaacggaccagggtgtatttgttagaattaaccaggatgatcatggtaaattacttagagttaatctagaggaatccttggcagaaggtacttctgacgtagactcagggcctaaagaaagtcctcatgatactctactatggggccctcctctggaaggaggcaattcttgggaggttgatggtttacctccaggaaggccgggatggcatctggagtgtacaataatgtcatcttcagagttggatttacctattgatattcactggggaggtattgatcttatctatccccatcatgaaactgaaatgattttagctgagaaaata

SEQ ID NO: 299033 - DNA, 325 bp, Unknown
  Bacterial polypeptide expressing nucleotide sequence isolated from the Sargasso Sea
atgaataaagatatttttttaacaaatagtctgggcaacacaaaggaaaaattcataccaatagatccaaaaaaaattggaatgtatgtttgtggaccaactgtttacgataatcctcatattggaaatgcaagacccttgattgtgtttgatatcttgttcaagattttaaaatgtaaatatggaaataattcagtaagctatgtaagaaatattacagatattgatgacaaaataatatcttcatcaattgaaaaaaatattccaattggagatcttacaaagaatattacaaatatttttcatgaagattgtaagtatttaa

SEQ ID NO: 299034 - DNA, 475 bp, Unknown
  Bacterial polypeptide expressing nucleotide sequence isolated from the Sargasso Sea
atgaatgctctaaagatattcaatactttaaacagtaaaaaagaaatatttattcctattgataaaaaccatataaaaatttatgcatgtggacctactgtctataattttgcacatattggaaatgcaagaatggctgtggtttttgatacttttgtaagaactttaagagttatttatccaaaggttacttacgtatctaatatcacagacatagatgacaagatcattgaggctgctaaagaacaaaatgctgaaataactgaaattactgaaaaatacaccgaaatatataatgaagatatgtcaatgctaaatgttttaaagccagacatacaaccgaaagcaacagaatatattccagaaatgattgaattaattaaagacttaattagtaaagaatttgcttatgaaaaagatggacatgttctctttcatgtcccttcttattcaatgtatggagaattatctaata

SEQ ID NO: 299035 - DNA, 651 bp, Unknown
  Bacterial polypeptide expressing nucleotide sequence isolated from the Sargasso Sea
atcatgaaaatgaaatagcccaatctgtctgtgctaatgaaagtaaaaaatttgcaaactattgggttcataatggatttattacaatgtccaatgaaaaaatgtcgaaatctcaaggaaatattttaaaaataaatgatttaaaaaataaaattaatggtcaagtgttaagattggctttaattagctcacattacaaacaaccgttagattggaatgataaattaattgaggaatgtgagaaaactttagacaagtggtactcttgctatgtagatatcagtaaaaaaatatatattcctgaaaattatttagaacctttatttgatgatttaaatacgccaggatatttggcgaatttacatcaactttttgataaggcccaaagtggtgatttaaaagataaacacatatttattgctgcatgtaatttcattggtttattaaatgaaacaaaagaaaaatggctaggttctagaaaaagaaaaataaacataaccgaaaaagaaattttactaaaaataaaagaaagagataaagccagaaataataaagaatattctttggcagataaaataagaaaagaattatctgacaaaggtgttttaattgaagataaagatggtaaaacaatttggaaagtaaaatgac

SEQ ID NO: 299036 - DNA, 473 bp, Unknown
  Bacterial polypeptide expressing nucleotide sequence isolated from the Sargasso Sea
tatgaacaaagatttgtatatatcaaatagtctagggggaaaaaaagaaaaatttattcctattgattacaataaaattggaatgtatgtatgtggtccaactgtatacgatgatcctcatataggtaatgcaagacctttagtggtatttgatattttatataaaattttaaaatgtaaatttggtttaaaaagcataaattatataagaaatattacagacatagatgacaaaattattcaatcatcaatagataaaaaaatatccacaaaagaattaacaaatgaagttacaaaaaaatttcatgatgattgtaattatcttgggtgtgaaaaacctacacacgaaccaaaagctacagaaaatattcctttaatgattgagatgattaatgacttaattaaaaatggatatgcatatttaagcaatgctcatgtatatttcgaagtaaaaaaatttaaagattatggaa

SEQ ID NO: 299037 - DNA, 694 bp, Unknown
  Bacterial polypeptide expressing nucleotide sequence isolated from the Sargasso Sea
tgagtttgatgttcatggaggtggtatagatttgttatttcctcatcatgaaaacgaaatagctcaatcaagatgtgcaaatgatacaaaaatatttgcaaaattttggatgcataatgcattcatcactatgtctaatgaaaagatggctaagtctcagggcaatattttaaaaataaaagattttagaaataaaataagtgggcaagttttaagattagctttactgagtgctcattataaacaaccattagattggaatgataaacttctagacgactgtcaaaacattataaataaatggtacaattcatatttagatattgaaaataattctaaagtttctgatgaaattcttcagccactttacgatgatttaaacacacctggatatattgctaatttacatcaattatatgacaaagctcaaaaaggtaacgatgaagataaatctttatttgtttctgcgtgtcaattcgtaggattattaaatgaaagtaaagaaaattggcttaaatttaaaattaacaaagctttaatttctgaaaaagaaattttacaaaaaattcaggatagaaataaggctagagagaacaaaaattatgaagaagctgacaaaattagaaatgagcttttagacaaaggtgttttaatagaagataaagatggtaaaacgacttggaaatttaaatga

SEQ ID NO: 299038 - DNA, 544 bp, Unknown
  Bacterial polypeptide expressing nucleotide sequence isolated from the Sargasso Sea
atgttagctatatacaatagtttcgccagaaaaaaagagcctttcacgccaatcgaaccaaaaaagattcgaatgtatgtatgcggcatgactgtttatgatttttgccatgttggtcatgcgcgagtcatggtagttttcgatatggtctctcgctatcttcgaagtattggttttgatgtactttatgttagaaatatcaccgatatagacgataagattattgaacgtgcgaaaaaaaatagtgaaccgattgctgatttaacaaatcgatttattggggagatgaataaagatgcaaacgcattaggtgttttaccacccgatttagagccaaaagcaaccgatcatattaaagaaattattgaaatgatctcagaattaatcaaaaaagaacatgcctatctagcagccaacggcgatgtcttttttgatgtggattcatttaaggaatatgggcaattgtcagggaaaaatcttgaagaactgagatcaggggaaagagttgaaattcagaaagaaaaggatgatccgttagattttg

SEQ ID NO: 299039 - DNA, 568 bp, Unknown
  Bacterial polypeptide expressing nucleotide sequence isolated from the Sargasso Sea
gatgcataacggttatttaaaaatggaaggtgaaaaaatgtcaaaatcacttggtaatatagttaccgttaaggaactttcaaaggattataaaggcgaagttataagattggcgttacttcttacacattatagaaagccgataaacttcagtaaaaccttactagaccaagctaaaaagattttagataagttatataaagttaaagaagaggtttatcatataaaagataaacaagaacatataaatgatgaagtcatagaggcgcttaacgatgatctgaatacatcgcttgcaattacaaaaatgcttagcattcaagacaaaaaggaattagtagatactgcattatttcttggttttctagatgctgatccaaaagagtggttttcaagtacagctaaaagtaaaattctagaaaaagatgtcttaattatgattaaacaaagagatagttatagaaaaaatggggaatttgataaagctgacttagtaagagatgaattacttcaacacggtattattctaaaagattctaatggagctacagagtggaagtacaaataa

SEQ ID NO: 299040 - DNA, 676 bp, Unknown
  Bacterial polypeptide expressing nucleotide sequence isolated from the Sargasso Sea
tgagaatgaaattgcacagagttgttctgcatttaaacctaattctgagcctgaaaattttagcaaatactggtttcataatggttttgtgacattgaatggagaaaaaatgtcaaaatctcttggaaacattcaactagtcaatgatttgctaaagaaatataacggagaaaccataagattgagcctcttgagtgcacattacagacaaccattgaattggaataaggatattcttgagcaatctaaaaaaacattatcaagaataaaaaaaaattttgaaaaaattaaagtaaaagattttaaaatatttgacataaataaaaatgaattttatcaagaatttcaaaattctctttttgatgatttgaacactccaaaagcccttagcatcattggaaaaaatcttaataaaataaaagaaaaaaatcatgaagacagacaaaagatagctcaggctacttatgaagctttgactttattaggattgtacaaagagagtaaaaatgatgaagattttgatgacaccttaattaaaaagttaataaatgaaagaaatgaagcaagaaaactaaaaaactttgaaaaagctgatgaaattcgccaaaacttaaaaaacaaaaatatcgaaatagaagacaccaaagacggaactgtatggacaaagtcaaaataa

SEQ ID NO: 299041 - DNA, 633 bp, Unknown
  Bacterial polypeptide expressing nucleotide sequence isolated from the Sargasso Sea
gatgtcattacagttacaaaacacattaagtggtaaaaaagaattttttaaaccagttaatccagatcatgtaagaatatatgcttgcggtccaactgtttacaattttgcgcacataggtaatgcgcgtatggcagttgtaaatgatttattagtccgtgtattaaaaacacaatttaaacaagtaacctatgtatctaatatcactgatattgatgacaagattatagaagcttctaaagaaacaggtgaggacataagtgttatcacaaataaatatacagagatttacaataatgacatgagtgcacttggcgttaatcttcccgatattcaaccaagggcaactgatcatattaaagaaatgatcgagttgataaaaaaattaattgatgaaaataaagcttatgaaaaagagggtcatgttttatttcatgtgccaagttttgataattatggaattctttcaaaaagaaatagagatgaacaaatagctggaagccgtgttgaagtagcgccgttcaaaaaagatccagcagattttattttatggaaaccatctccctcacccttacctggttgggattcaccttggggatttggaagaccaggatggcatttacagtgctccgt

SEQ ID NO: 299042 - DNA, 454 bp, Unknown
  Bacterial polypeptide expressing nucleotide sequence isolated from the Sargasso Sea
atgaataaagatatttttttaacaaatagttatggtggcaaaaaagaaaaattccaaccaattaatgaaaaaaatatcaaaatgtatgtttgtggtccaacagtttatgatgatccgcatataggtaatgcaagaccactagttatttttgatttactttttaaagtcttaaagtgcaaatatggtaatgataaagttaaatatataagaaacattacagatatagacgataaaataatacaatcagcaaaggataaaaaaattacaataaaagacctaactacgaaaataaataaaaattttcagatagattgtaattatcttaattgtgaaaaacctagttttcaacctaaagcaactgaaaacattaacgagatgattcagatgataaatagtttaattgataaaggttttgcatatgaaagtaagaaccacatttattttgaggttaaaa

SEQ ID NO: 299043 - DNA, 301 bp, Unknown
  Bacterial polypeptide expressing nucleotide sequence isolated from the Sargasso Sea
aatgattaaattaaatttatataatacacttcaaaggcgtttgtctatttttcagcctatcgatacccaaaatgtaagaatatatgcatgtggacccactgtttatgattttatacatattggtaatgcaagacccttagttgtttttgatgttttagttagattacttagaaaaatatatccaaaagttacatatgtaagaaatataacggatattgacgacaaaattaataaaagagcaattgaaaaaaaaataaatatctcacaattgactaatgaaacaataaaaaaattttcataa

SEQ ID NO: 299044 - DNA, 447 bp, Unknown
  Bacterial polypeptide expressing nucleotide sequence isolated from the Sargasso Sea
aatgcaaaatcttaaggtctataattcgttaagtggcaaaaaagaggtttttaaatcaattgaaaaaaaatttgttggaatatatgtttgtggccccactgtatataataaggttcatttaggtaattgtaggacatttatttcgtttgatttaatttacagatattttaaacatctaggatataaagtacgatatgttagaaacataactgatgtagggcacttagaagatgattctgaaaatgcagaagatagaattataaaaaaagcgagaactgagaaaattgaaccaatggaggttgttcaattgtatactgtagatttccataaaacattaagcttatttaatatacttcctccaagtattgaaccaactgcgacaggacacataattgaacagatagaaattgtcaaatcaattattaaaaagggatatgcctatgaaat

SEQ ID NO: 299045 - DNA, 457 bp, Unknown
  Bacterial polypeptide expressing nucleotide sequence isolated from the Sargasso Sea
atgtcattacaattacaaaacacattaagtgggaaaaaagaattctttaaacctgttgatcccaaacatgtcagaatttatgcctgtggcccgacggtttataattatgctcatattggtaatgctagaatggctgttgtgaatgatttactagttcgagttttaaaaacacaatttaaaaaagtaacttatgtttcaaatataactgatattgatgataaaattatagaagtatcaaaagaaactggcgaagaaattaattctataacctcaaaatatactgatatttataataatgatatgagtgcgcttggagtaaaactaccagacatacaaccaagagcaaccgatcatattaaagaaatgattgagttaatacaaaaattgattgatgcgaataaagcttatgaaaaagacggacatatcctatttcatgtaccaagtttgaaaattatga

SEQ ID NO: 299046 - DNA, 380 bp, Unknown
  Bacterial polypeptide expressing nucleotide sequence isolated from the Sargasso Sea
tatggctaaagatatatttttaactaatagtcttggtggtaagaaagaaaaatttacacccaaaaatgaaaaatccataggcatgtatgtttgtggtcctactgtttatgatgatccacatattggtaatgctagaccattagttgtctttgatattctgtataaaattttaaaaaatagatatggatcaacatctgtaaaatatatcagaaatataacagacatagatgacaaaataatcaaagcatctaatgatcaaaatatttctataaaagatttaacttcaaaaattactgaaaattttcataaggattgtaattacttaaaatgtgaaacaccaaacagcgaaccaaaggcaacagaaaatataaaacaaatga

SEQ ID NO: 299047 - DNA, 424 bp, Unknown
  Bacterial polypeptide expressing nucleotide sequence isolated from the Sargasso Sea
aatgaagatatatctacacgatacttttttggggaaaaaagttgaatttataccgattgatcctaaaaggttgacaatgtatctatgtggaccaactgtatacaattatgcgcacattggtaatgctcgtcctgctgttgtatttgatttgcttacacgtgttttgcgactggaatataaattgttttttgcaagaaacattactgatgttgatgacaaaattaatgctgaagcctctaaaaaaaatataccaatagaagaaataacttcaaaatatattcaagcttataacgaagatatgagtcagcttggagttgctatgccagatattgaacctcgagccacacaaaatataagtgaaatggtatcaatgatagagacattagtagaaaaggggcatgcgtatgtctcagaaaaacatgtc

SEQ ID NO: 299048 - DNA, 479 bp, Unknown
  Bacterial polypeptide expressing nucleotide sequence isolated from the Sargasso Sea
tatgtctaaattatatatatatgattctatgcaaaataaaaaagttgtttttgagcctttagacacccaaaacataagagtttatgcatgcggtcctacagtttatgactatgcacatatcggtaatgctagaatggcagtggtttttgatactttgataaggttattaagatatttatttccaaaagttacatatgtttctaatatcactgatattgatgataaaataatagaaagaagtaacctagaaaaagtatctacagaaagtttaactaataagttttctaagatttataacagggatatgaaaatgttgaatgttcaagaacctgattaccaaccaaaagcaactgaatatattgatgagatgatacaagcaatagccaagttagaaaaagaaaagtatgcatatttttctgacggacatgttatgttcaatgttaatagttttaaaagctacggtgcactttcttctagaa

SEQ ID NO: 299049 - DNA, 505 bp, Unknown
  Bacterial polypeptide expressing nucleotide sequence isolated from the Sargasso Sea
aatgttgaaactttcggatactttgactggagaaaaaagagaatttaagccaaatggcgatgtggtacgtatctatgtgtgcggagtaactccttactcttctgcgcacgtcggtcatgctatgagctatatagtttttgatgttttacaccgttacttagaatttaaagaatttactgtccaacgagtccagaattttactgatatagatgacaaattaattacgcgagctaacgaacggggaatatctgttgaacagctgagtcaattgcatatacaggaatatatggaagacatgtcgaacttaaacattattcctgcagatatttaccctcttgctacgcaagaaattcctaagattattgagctcatacaaggactagtcagctcgggtatggcatatgaatctaatggagatgtttacttcagagtacgtaaaagcctcgattacgggaaacttagccatcgatcacttgaaacaatgagagcaggagcccgggttgat

SEQ ID NO: 299050 - DNA, 567 bp, Unknown
  Bacterial polypeptide expressing nucleotide sequence isolated from the Sargasso Sea
caatcttgtgcaagcgttaattctgacaatcctgaagattatgctaagtattggatacataatggttttgtaactatagatggcgaaaaaatgtcaaaatctcttaataatattattcttctgaatgatcttttaaaagaacatgatggagaaacaataagactagcactgttatcctctcattatcgaaaatcacttgattggaatgaaaatgtaattaagcagtctaaagtattgttggataaagtttatgattttcttgttacctatgacgatgatccagaaggtgaaattgatgaaagtctcatagaaaatttttctaatgatcttgatatacctaaagtattaacttctattaatgaacttttaaaaaataaaaattcttctaaccctcgaactatcaaacaatctttattatttgcgggcagtattttaggagtatttaataaaaaaccatcggaatggaatatgcaaattgaaatgagtaaatctgaaatggcagaaatagaaaagcttattaatgagaggaaaactctcaaagaaaataaagattttattggcgctgat

SEQ ID NO: 299051 - DNA, 556 bp, Unknown
  Bacterial polypeptide expressing nucleotide sequence isolated from the Sargasso Sea
atggataaagatatttttttaacaaatagtcttggcaataaaaaagaaaagtttaatccaattaattcaaaaaaaattggaatgtatgtgtgtggtccaactgtatatgataatccacatataggtaatgcaagacctttggtagtatttgatattttatttaaagttttaaaatgtaaatatggaaataattctgtcgattatgtaagaaatattacagacattgatgacaaaataatcaaatcttctttagaaaaaaaaatatctatagaagatcttacgaaaaaatttactaaaatatttcatgatgattgtaagtatttaaattgtgaaattccttcacacgaaccaaaagctactgaaaatatttctttaatgattgatatgattagtaagttaataaagaataataatgcttacgaaagcaatcaacatgtttattttgatataaataaatttaaagattatggaaaattgtcaaataaaaatatagatgaattgatttctggtgcaagagttgagatatccgaaaataaaaaaaacccagctgattttg

SEQ ID NO: 299052 - DNA, 550 bp, Unknown
  Bacterial polypeptide expressing nucleotide sequence isolated from the Sargasso Sea
atgaagatcaaactctacaattcaaacaacaagagcaaagagctatttgttcccattgaccccaaaaaggtcacaatgtatgtctgtggacccacagtatatagttatcctcatattggaaatgcgagaggtcctgtcatattcgatgttctagcaaggcttttaaggagggaatttgatctcacgtacgttaggaatataaccgacttagatgacaaaatttatcaggcagctgatgatgagggcatacatatttctgaagttacacagcgatatacaagaatttatcaagaagacatgagtgccttaggtgtggaaaagccagatttagagccattggctacagagcatattcctgagatgattgaaatgatcgagggattaattattaaaggacacgcatatgagaatcaaggccatgtttttttcagtgtagagacttttgatgattatggtttcctttctaatcgaacagaagatgaacagatctcaggaacaagaataaaatcgtcagaaataaaaaataatcaaagggactttgtactctgaa

SEQ ID NO: 299053 - DNA, 355 bp, Unknown
  Bacterial polypeptide expressing nucleotide sequence isolated from the Sargasso Sea
atgaaaaccttaaaaattcataatacattaggaaataaagtcgaggagtttaacccaattgatcctaagcatgttcgagtttatgcatgtggtccaactgtatatagttatgctcatattggtaatgcaagaatggcagttgtaaatgatttattagttcggtttttaaaaactatttatccaaaagttacctatgtttctaatataacagatattgatgataaaataattacagtatctcaagaaaataaaatttccataaaagaattaacagaaaaatatactaaaatttataatgaagatatgtctattcttggtgttaagaaaccaagatatacaaccaaaggcaactgat

SEQ ID NO: 299054 - DNA, 493 bp, Unknown
  Bacterial polypeptide expressing nucleotide sequence isolated from the Sargasso Sea
aatgaataaagatatttttttaacaaatagtctgggcaacacaaaggaaaaattcataccaattaatccaaaaaaaattggaatgtatgtttgtggaccaactgtttatgataatccccatattggaaacgcaagacctttggttgtgtttgatatcttgttcaaaattttaaaatgcaaatatggaaataattcagttagttatgtaagaaatattacagatattgatgacaaaataatatcctcatcaattgaaaaaaatattccaattggagatcttacaaagaatattacaaatatttttcaccaagattgcaattatttaaattgtgaagttcctacaaacgaaccaaaggcaaccgaaaatatttcattaatgattgaaatgataaataaacttattaaaaataaatttgcttatgaaattaataaccatgtttattttgaagtaaaaaaatttaaagattatggaaaattatcaaataaaaattta

SEQ ID NO: 299055 - DNA, 462 bp, Unknown
  Bacterial polypeptide expressing nucleotide sequence isolated from the Sargasso Sea
aatgagcaaagatatatttttaactaattcttatggaaataaaaaagagaaatttattccattagatcctaaaaatattggtatgtatgtatgcggtccaacagtatatgatgacccacatattggtaatgcaagaccattagttatttttgatattttatttaaaattcttaaattaaaatataaagatagttcagtaatttatgtaagaaatataacagatgtagatgataaaattattacatcatcaaaagaaaaaaaaatatcaatctctgaactaacaaataaaattacaaataattttcatcaagattgtcaatatttattttgtgaaaaaccaactcaagaaccaaaagcaactgaaaatattgaattaatgattaaaatgatatctgatttaatatctaaaggctttgcttatcaaaaaaataagcatgtatattttgaggtcaaaaaatttga

SEQ ID NO: 299056 - DNA, 310 bp, Unknown
  Bacterial polypeptide expressing nucleotide sequence isolated from the Sargasso Sea
atgaataatttatatttaacaaattcacttactaataaaaaagaagtttttaatccaataaatcccaaaaaaatttctttatatgcatgtggacctacggtttacgacaatcctcatgtagggaatgcacgtgctttagtagtatttgatcttctttttagaatactaatagaaatctatggaaagcaaaaagttacatatgtaagaaatattactgatatagatgacaaaattattgaagcttcaaaaaataaaaatatcaatattttagatttaacaaaaaagattactaaaaaatttcataatgatt

SEQ ID NO: 299057 - DNA, 529 bp, Unknown
  Bacterial polypeptide expressing nucleotide sequence isolated from the Sargasso Sea
gttatccgtttttttattctctcaagccactatcgcagtcctttaaattattcagttgagaatctggatgaggcgaaatcatcgcttacacgtttatataccgcattaaaagaatttaacaacgacaatattagtgtcgatcaagactacgcaacccaatttaattcttatatggacgatgattttaatacgccaaaagcaatttcgttactacacgaaattgcaagaaaaataaatcgcaatgaagataaaacgcatgaggattcaaaaagattagcttccacactaaagaaacttggctccatattaggtttacttgaatcgaagccgcaaggctttttgaaaggaagaagtaatgaaaataaggaaaatggtgatacggattatattaatgaactaatacgacaacgtaatatagcacgcgataaaaaagattttgaaaaggctgatgaaatcagagaacaactcgctgagcttgacgttactttagaagatacagaggatagtactgactggcgaagaagttagt

SEQ ID NO: 299058 - DNA, 280 bp, Unknown
  Bacterial polypeptide expressing nucleotide sequence isolated from the Sargasso Sea
atggagctaatagtgcagtatttaaaaatatttaatacattaaatagcaaaaaagaaacatttaagcctattgattctaatcatgtgaaaatatatgcatgcggaccaactgtttataattatgctcatataggtaatgcgagaatggcagttgtttttgatacttttgtaaggacgctaaaggctgtttatccaaaagtaacctatgtatctaatattacagatattgacgataagataattgaagcagcaaaagaacaagaagtgaaatatctcaaat

SEQ ID NO: 299059 - DNA, 343 bp, Unknown
  Bacterial polypeptide expressing nucleotide sequence isolated from the Sargasso Sea
aatgaatttatttgacacattagataataaaagaaaaaatattaatttttctgaaaataagaaaattaaaatctatgtttgcggaatcaccccatattccgaatcacatatagggcatgcaatgtctgcagttatatttgatacattgagaaaatatttattagcaaacaaacaaaatgttatatatgttcaaaattttacagatatagatgataagttaataaaagctgcagaagaaaataactctgatataaatactatatctacaaaatttattaacaaacatttatctgctcttaataaactaaatgttttaaaaccagattattctccaaaagctact

SEQ ID NO: 299060 - DNA, 163 bp, Unknown
  Bacterial polypeptide expressing nucleotide sequence isolated from the Sargasso Sea
atgaagatttcagatacattaacaaatcaaaaaaaagagttagagtattcagataaggtcaggatttatctttgtggaataacagtctatgatcaatctcacatagggcatgctagaacaataatagtatttgattcgttaaggaggtttttagaagcaaata

SEQ ID NO: 299061 - DNA, 361 bp, Unknown
  Bacterial polypeptide expressing nucleotide sequence isolated from the Sargasso Sea
atgaatttacacatctataacactctaaccaataaaaaagaacaattcctgcctcatacaaaaaataaagtaagtatgtatgtttgtggtccaacggtatacagtgctccacatatcggcaatgctagagctgctttggtaggcgatttattttaccgcttacttcaaaagctatatgaagaggttacatatataagaaatcttacagatgttgatgacaagataatcctcgaatccgaaaaaaccggcatccctattaatgtcatcactaaaaatgttactgaaatgtatcaaaatgagatgtcgaaacttaatatgctcgaaccaactttcgaacctaaagttactgataatataaata

SEQ ID NO: 299062 - DNA, 363 bp, Unknown
  Bacterial polypeptide expressing nucleotide sequence isolated from the Sargasso Sea
tatgggcaaattaaaacttcacaatactcttggtaataaagttgaagaatttattccaatcgataaaaataatataagagtatatgcttgtggtccaactgtttacaactatgcacatattggtaatgcgcgcatggcagttgttaatgatttattggttcgttttcttagaacaatatatccaaaagtaacatatgtttctaatattacagatatagacgataaaattattgcagcatctgaagaaaaaaatattccaataaaagaactaacaacaaaatttacaaatatttataatgaagatatgtctgtgctcggagtcagtctacctgacattcagccaaaagccaccgatcacataaa

SEQ ID NO: 299063 - DNA, 220 bp, Unknown
  Bacterial polypeptide expressing nucleotide sequence isolated from the Sargasso Sea
tgaagttaaaaaatttaaagattatggaaaattatcaaacaaaaagttagatgaattggttgcaggatcaagaattgaagtaagtgataacaaaaaaaattctgaagattttgttttgtggaaaccatcagaaatagacgaaccatcatggaaatcaccttggggcaatggcagacctggttggcatttagaatgttcagcaatgtcaaaaaaatattta

SEQ ID NO: 299064 - DNA, 598 bp, Unknown
  Bacterial polypeptide expressing nucleotide sequence isolated from the Sargasso Sea
aatgtcattgcaattacaaaacacattaagtgggaaaaaagaattgtttgaacctgtggacccagaacatgtcagaatttatgcctgtggaccaacagtttataattatgctcatattggtaatgcaaggatggctgttgtaaatgatttactagttagggttttaaaaacgcaatttaaaaaagtaacttatgtttcaaacataactgatattgatgataaaattattgaagcatcgaaagaaactggtgaagaaatttattcaataacctcaaaatatactgatatttacaataatgatatgagcgcacttggagtaaaactaccggacatacagccaagggcgactgatcatattaaagaaatgattgctctaatacaaaaattgattgatgcgaataaagcttatgaaaaagatggtcatgttctattccatgtaccaagttttgaaaattatggaattttgtcaaaaagaaatagagatgaacaaatagctggaagtcgagttgaggttgcaccttttaaaaaagatccagctgattttgttttatggaagccctctccatcaccacttcctggatggaattcacccgtgggg

SEQ ID NO: 299065 - DNA, 534 bp, Unknown
  Bacterial polypeptide expressing nucleotide sequence isolated from the Sargasso Sea
tatgaaaaccttaaaaattcataatacattgggaaataaattagaagagtttcttcctattaacccctcccatgttcgagtttatgcttgtgggccaacagtctataactatgctcacataggaaacgcgcgtatggctgtagtaaacgatttattaattaggtttttaagaactatttatccaaaagttacttatgtttctaacatcacagatattgatgataaaataattgctgcatctcaagaaaataaaattccaataaaagaattaacagagaaatatactaaaatttataatgaagatatgtctattcttggagttaagaaacctgatatacaacctaaagctaccgattatattaaagagatgatcgatcttataaaaacattaattaaaaataattgtgcttatgaaaaagatggtcatgttatgtttcatgttccttcatttaaaaattatggaatgttatctggtagaaatcgtgatgaacaaattattggaagtagggttgaggtagcaccatataaaaaaga

SEQ ID NO: 299066 - DNA, 613 bp, Unknown
  Bacterial polypeptide expressing nucleotide sequence isolated from the Sargasso Sea
tgcaaacaaaactgaatactttgcaaattactggctacataatggttttgttactattgataaagaaaaaatgtcaaagtctgttggaaatattattacaattaacaaactcaaagaaaatgtaaacggccaagtagttcgcctcgctttgttaagttctcattacaaacaacctcttgattggaatgaaaaattaattaatgaaagtaaaaaaactttagataggtggtatagccagtttgaaaaaataaaccctgaagaattaaatgatgatgttatcaaacctttgcaagaagatttaaatacaccagagtatatttctaaactacattcactttttgaagattcagttaagggtaataaatcatcaaagatacaatttttatcagcatgtcatcaaattggccttttggaagataaaaaatcatgggaagaattcaagaaatcaaaatctaaagttgatgaaaactttattaataaaaaaatcaaagatagaaatgatgcaagaaaaaagggaaattatgagctagctgataccttaagaaaagagttagaaaataaaggtgttataatcgaagacaaacaagataagacaacctggaaatatgaatga

SEQ ID NO: 299067 - DNA, 178 bp, Unknown
  Bacterial polypeptide expressing nucleotide sequence isolated from the Sargasso Sea
atgcatatttatttaacaaataatttaaccaacaaaaaagaacagtttattcctcgagataataaagaggtgggaatgtacgtttgtggccccactgtttatgatgatcctcatattggaaatgctagaccattagtcatatttgatattttatttagactactaaagagtaaattaa

SEQ ID NO: 299068 - DNA, 535 bp, Unknown
  Bacterial polypeptide expressing nucleotide sequence isolated from the Sargasso Sea
aatgagtgaacttcatttaacaaattcatattcaagaaaaaaagaaatctttaaacctcttaacttaaataaaatttctttatatgcttgtggtccaaccgtttacgaaaaaccgcacgttggaaatgctagagctttagttgtttttgatcttctttatagaattttaattgagttgtatggaaaatcaaaagttacttacgtaagaaatattaccgatattgacgataaaataattgatgcagctaaaaataaaaaaatatcaattaaagaacttacaagcgaaattacgaaacaatttaattcagattgtgcctcattattttgtattaatccatcttttgaacccaaagctactgaacatataaaagaaatgatctatatggttgaaaatcttttaaaaattaaagcagcatataaaaaagataaccatgtatatttttctgtatcatcatttaaaaattatggaaaattatcaaataaaaagattgatgatttaaaagctggagcgagaatagaaatttctgaactaaaa

SEQ ID NO: 299069 - DNA, 774 bp, Unknown
  Bacterial polypeptide expressing nucleotide sequence isolated from the Sargasso Sea
aaaacgagatcgctcaatccgaaacagccaatggagagccgctagccaaacttttgatgcacaacggcatggtcaatgtcggcggcacaaagatgtcgaaatcactgggcaacttcaccaccatccgagccctgctcgacgatggtgtctcggccatgaccttgcgcctgttcgtgttacaggcccactaccgcaagcccctggacttcaccaaagaggcactggatgcagccacaacaggctggaaaggactgaacgcagccattgcccttggtcaccaccatgcagccgcgttgtgctggcctgacgcacctgccctcactaaaggcgcgcaaacagcctcggccagccaaaacgatgggtttgattcgttccgggagcgcttcattacggccatggacgatgacctcaacagctccggagcccttgcagtcctgttcgacctagcgcggcccctgcgcggcatcgccaatcgtcttgaccgaggcgaccagccagagcaatccaccgacgaacttgcagaccttcggaatcgatggcttctgctgcgggaacttgctgccgtgctcggcctgagcgaggaagaacaccctggagcggagcaagcgggcgcggccgatgacgccacgatccaggctgcaatcgaagcgcgcaaagcggccaaggccgccaagaacttcgccgaagccgaccgcatccgcgacgaactcaccgcccagggcatcgaactcatcgacaagccaggtgggatcacggagtggagacgggcttgac

SEQ ID NO: 299070 - DNA, 361 bp, Unknown
  Bacterial polypeptide expressing nucleotide sequence isolated from the Sargasso Sea
tatgggtaaagatatatttttaactaatagtctcaacaataagaaggaaaaatttatacccaaaaatgaaaaatcggtgggtatgtatgtttgtggaccaactgtatatgacgatccacatataggaaatgcaagacctctagttgtttttgatattctatttaaaattttaaaaacaaaatatggatacagttcagttaactacattagaaacatcacagatatagatgataaaattattaaagcatcaaatgatcaaaaaatttctattaaagatttaactttaaaaattacagaaaattttcacgatgactgcaaatatttaaagtgcgaggaaccaactaaagaacctaaagcaact

SEQ ID NO: 299071 - DNA, 478 bp, Unknown
  Bacterial polypeptide expressing nucleotide sequence isolated from the Sargasso Sea
atgaaaatctttaatactctttcaggaaagaaagaaatctttgaacccatcgaggacaataagatccgaatgtatgtatgtggtatgactgtttatgatgacacacacataggtcacgcaaggaccttcctatcttttgatcttattgtcagatacttaagaagtatagattatgaagtccaatacataagaaacattactgatgtagacgacaaaattattgcgagggcagaagagttgaatataagtccatcagagttaactctagattgtataaattcaatgcataatgatttccaggcactaggaatgattagtcctgatgctgaacctcgagctaccgaaaatattgactcgattatttctctcatcacaaaacttatagataagggtcatgcatatgtgggtgaatcagatgtctacttttctacagaatcttttggagattatggaaagcttagcaaaagaaaattagaag

SEQ ID NO: 299072 - DNA, 504 bp, Unknown
  Bacterial polypeptide expressing nucleotide sequence isolated from the Sargasso Sea
gatggttttaatctcctgtccctacaaacttgtgcttaggttatacaatacagcaactcgtaaagtcgaagattttaagccaatcaatgaaaataaagtaggaatatatgtttgtggtttgacagtctataatgatatgcatttaggccatgcacgaacatacatcgcttttgacgtaatccgtagatggtttgagcaccttggttatgaagttaattttgttcagaatcatacagatattgatgataaaattattaatagagcaaatgaggaagaaatatcttctaaagacttagcaaataaatatattgagaggacaacagaagatttggaaagtttacaagtccatcacccatcacatatgccaaaggctacagattatattccagaaataatcgaaataatctctgatttaatagctaaaaatcatgcatatgtaactgagcctgcactaggtgccttagcttctgacgtatattttgatgttatgtctgcgtccgaaaa

SEQ ID NO: 299073 - DNA, 574 bp, Unknown
  Bacterial polypeptide expressing nucleotide sequence isolated from the Sargasso Sea
atgtccaagagcctgggcaacttcttcaccatccgcgacgtgctcaagacgtacgacgccgagacggtgcgcttttttatcgtgcgggcccattaccgcagcgcgctgaactacagcgatgcccacctggacgacgcacgccaggcgctcaagcgtctgtacacggccctcagcctggtgaccccggcgcaggtggcgtccatcgactggaccagcccctacgccacccgcttcaaggccgcgatggacgaggactttggcacgccagaggcggtggctgcactgtttgacctggcgagcgaggtcaacaagacccgttctgccgagctggccgggctgctgaaggcgctgggtggttgcctgggcatcttgcagggcgacccgcaagcgtttcttcagtcgggtgctgcgggggtggatgaggccgaaattcaggcgcagattgccgcccgggccgcagccaaggcggccaagaactttgccgaggccgaccgcatccgcaaccacttgctggcccagggcatcgtgctcaaggactctgccgccggtaccacctgggaagccgcccaatgag

SEQ ID NO: 299074 - DNA, 736 bp, Unknown
  Bacterial polypeptide expressing nucleotide sequence isolated from the Sargasso Sea
cattgtggaggcgtagaccttcaattcccacatcatgaaaatgaaattgctcagagcgtttgtgcaacaggaaaaagctttgtaaagacttggctccattgtgagcatttgttagttgatggctcaaaaatgagtaagtctgcggggaatttttataccctaaaaaatttgttttccaaaggatattcatcaaaagctataaggtatcttttaacctcttcgcattatcgacaaaaagtagatttaacggatgaaagtttgaaaagagcagaaaagtctgttcgaagactccaagaatttaatcgacgactatcaattatttcagaaggcaatcatggcagtattgaaaatgctgaaatttctgtattagaaaaatttactctttcaatgaataatgatcttaatatttcagagggattagctgttctttttgattgggtaagatctataaacaaaaaactagattctaataaggtttcactaaatgaggctgcgaattcattggctcttttacataattttgattccattctttgttttattgatgagagcaatcttgaaattagccctcaagaatctgcgttaattcaagagagagaggtcgctcgaaaaaagaaaaattggcttcgttcagatgagatcagagatcattttaaagagaaggggattgatttagttgatactccttctggaactattttaaaacatttgaaggatgttttaaaaagtaactaaa

SEQ ID NO: 299075 - DNA, 466 bp, Unknown
  Bacterial polypeptide expressing nucleotide sequence isolated from the Sargasso Sea
atgaaaatatttaataccttaaatagaaaaaaagaaacattcgaaccaatcgattctaatcatataaaaatatatgcatgtggaccaactgtctataattatgcacatataggtaatgccagaatggcagttgtcttcgatgcttttgtaagaactttaaaagctatttatccaaaagtaacttacgtatctaatattacagatattgatgacaaaatcattgaggcagcaaatgaacaaaatgtcgaaatttctctaataacaaataaatatacaaaaatttataatgaagatatggcaagacttaatgttttgccgcctgatgttcagcctaaagcgacagaatttattccagaaatgattaatcttataaaagatttaatcgataaagattttgcttatgaaaaagaaggacatgttctatttcatgtccctttatatttaaattatggaaaattatcaaata

SEQ ID NO: 299076 - DNA, 409 bp, Unknown
  Bacterial polypeptide expressing nucleotide sequence isolated from the Sargasso Sea
atgagcctccgcctccacaactccctcagcgaccagaaagaagactttgttccccttcgtgagggacgggtgacgctttatgtctgcggaccgacggtttacaacgacagtcacctcggccatgccaagacctatgtcagtttcgacgtcatcctgcgctacctgaagtaccgcggattcagcaccttttacgtccagaacatcaccgatgtcgggcacctgatgggagacgccgacgagggtgaggacaaaatgctgaagcgtgcccgggaactggaactggaaccgatggccgtcgcagaaacctacaccacccgccattttcaggcgatggaccggatgggcgtcatccgtccggatatcagcccgcgggccaccggccacattccggaacagtggaagcgatgaa

SEQ ID NO: 299077 - DNA, 397 bp, Unknown
  Bacterial polypeptide expressing nucleotide sequence isolated from the Sargasso Sea
agccgatgtgccggaaaccgaccatgatcgccggtttgccgaggctatggacgacgatttcaacactgccggcgccattgctgtgttgcacgcggtagctaatgacatcaatcatcagcgccgggaaggtgacgaaggggctgccaagcgcagtgcggccgtgctggtgcgtttgggagcggtgctgggcttgctgcagcaggacccggaagctttcttccaggcggataccggcagtgagctgacggcggaagatatcgaggcgatgatccaggcccgcgccgacgcgcgcaaagggaaggattttgccgaagcagaccgcattcgcgatgagctgctggacaagggcattatcctggatgacagccgggaaggaaccacctggcgccgcgcctga

SEQ ID NO: 299078 - DNA, 296 bp, Unknown
  Bacterial polypeptide expressing nucleotide sequence isolated from the Sargasso Sea
gatggccattaaattattcaatactttaacaaagcaaaaggagacttttataccacaagactctaaaagaattacgatgtatgtttgcggaccaacagtatatagtcaccctcatattggtaacgctagggccgcactaattcctgatatcctttatcgattactgatgtcacattattctgataatgttgtgtatattagaaatataactgatgtagatgataaaattctcaaagctgcgaatgaaacaggtataaaaccgagggaaatatctgagaaatttactgatatttatt

SEQ ID NO: 299079 - DNA, 417 bp, Unknown
  Bacterial polypeptide expressing nucleotide sequence isolated from the Sargasso Sea
catggagccaatagtgcagtatttaaaaatatttaatacattaaatagtaaaaaagaaacatttaaagctattgattctaatcatgtaaaaatatatgcatgtggaccaactgtttataattatgctcatataggcaatgcgagaatggcagttgtttttgatacttttgtaaggacgctaaaggctatgtatccaaaagtaacctatgtatctaatattacagatattgacgataagataattgaagcagcaaaagaacaagaagttgaaatatctcaaataacagacaagtacacaaaaatttataatgaagatatggcaagacttaatgttttaccgccagatgttcaaacccaggctacagaatttatccctgaaatgatcaatttaattgaagatttgattagtaaggattt

SEQ ID NO: 299080 - DNA, 224 bp, Unknown
  Bacterial polypeptide expressing nucleotide sequence isolated from the Sargasso Sea
tatgttaaaaatatttaatactttttcaaagaatattgaaacatttactcctataaatcctaaatgtgtaacgatgtatgtttgtggcccaactgtatacaactacccacacataggaaacgctagaccagcagtaatttttgacactttatatagagttctaaaagaacaatttccagaggttgtatatgtgagaaatattaccgatgtagatgataaaataa

SEQ ID NO: 299081 - DNA, 734 bp, Unknown
  Bacterial polypeptide expressing nucleotide sequence isolated from the Sargasso Sea
cgccgacgagggtgaggataaaatgccgaagcgtgttcgagaactggaactggaaccgatggccgtcgcggaaacctacaccacccgacattttcaggcgatggaccggatgggggtcatccgtccggatatttgtccgcgggccaccggccacattccggaacagttggaagcgattgaaaaaatgatcgaggccgggctggcctacgaagtcaacgggtcggtctattttgatgtgagcaaggatccggaatacggaaaactgtccaaccgcagcttcgaggaaatgcaggaaggcgcccgggtcgaggttaggcaggaaaaacgcaaccctcaggactttgccctctggaaaaaggccgaggcaggacacctcatgcgctggcgggattcctactctggatgggggtatcccggctggcataccgaatgcgcagtgatgagcacccgttacctgggagattctttcgatatccacggcgggggaatggaactcaagtttccccaccatgactgcgaaatctcgcaggccaaaggactcggcaagccgtttgcgaaatactggatgcacaacaacatgctcaccatcgacggacagaagatgagcaaatccaccggaaacttcgtcaccctcatcaatgccttcgaacagcatgacccgcttgccgtccgttatttcattgccgccagccactatcgctcggtggtggactacagcgaaaatgcgctgaaaa

SEQ ID NO: 299082 - DNA, 379 bp, Unknown
  Bacterial polypeptide expressing nucleotide sequence isolated from the Sargasso Sea
atggagctaatagtgcagtatttaaaaatatttaatacattaaatagcaaaaaagaaacatttaagcctattgattctaatcatgtgaaaatatatgcatgcggaccaactgtttataattatgctcatataggtaatgcgagaatggcagttgtttttgatacttttgtaaggacgctaaaggctgtttatccaaaagtaacctatgtatctaatattacagatattgacgataagataattgaagcagcaaaagaacaagaagttgaaatatctcaaataacagacaagtacacaagaatttataatgaagatatggcaagacttaatgttttaccgccagaatgttcaacccaaggctacagaatttatccctgaa

SEQ ID NO: 299083 - DNA, 379 bp, Unknown
  Bacterial polypeptide expressing nucleotide sequence isolated from the Sargasso Sea
catgagtctccgtctccacaactccctcagcgaccagaaagaagactttgttccccttcgtgagggacgggtgacgctttatgtctgcggaccgacggtttacaacgacagtcacctcggccatgcgaagacctacgtcagtttcgacgtcatcctgcgctacctgaagtaccgcggattcagcaccttttacgtccagaacatcaccgatgtcgggcacctgatgggagacgccgacgagggtgaggataaaatgctgaagcgtgcccgggaactcgaactggaaccgatggccgttgcggaaacctacaccaaccggcattttcatgctatggacccggatgggggtcatccgaccggatatctgcccgcgggcacc

SEQ ID NO: 299084 - DNA, 301 bp, Unknown
  Bacterial polypeptide expressing nucleotide sequence isolated from the Sargasso Sea
atgaatgaaatttatattcacgattctttattaaatcaaaagaggaaatttgaaccaatagattcaaataatattcgcatgtatgcatgtggaccaactgtctataactatgcacatattggtaatgcaaggatggcaatagtttttgatacattcgcaagattgttaagaagcaagtatccaaatgttacttatgtatcaaatattactgatatcgatgacaaaatcattgaggcagcaaacgaacttaatgttcctattaatgaattaacagagaagtatacggatatttataatcaag

SEQ ID NO: 299085 - DNA, 537 bp, Unknown
  Bacterial polypeptide expressing nucleotide sequence isolated from the Sargasso Sea
aatgaataaagatatttttttaacaaataatctaagtaacaaaaaagaaaaatttgttccaaaagatgaaaataatattggcatgtatgtgtgtggcccaactgtatatgatgatccccatataggaaatgcaagaccgattgttatttttgacattctttttaaagttctgaaaaaaaaatttcaaaatgtaaattatgtgagaaatattactgatgttgatgataaaataattaaatcatcaaaagaaaaaaatatatcgatatccgatttaactcaaactgttattaaaagttttaatgaagattgtgattatttaaattgtgaagacccttcacaacaaccaaaagcaactgaacatattgatttaatgattgagatgatttctgaattaattaaaaaaggttttgcttatgaaaataatcatcatgtttattttgaagttaaaaaatttgatgattatggaaaattatctaataaaaaattagaagatttaatagctggatctagaatagaagttagcgataacaaaaaaaa

SEQ ID NO: 299086 - DNA, 425 bp, Unknown
  Bacterial polypeptide expressing nucleotide sequence isolated from the Sargasso Sea
gatgaataaaaatttaaatttttttaatactttaacaaataaaagagaaaaattttcacctataaataaaaataaagtagggatgtatgtttgtggccctacagtttatgattttcctcatattggtaatgctagaccattagttatttttgatgttttatttagacttttacaaactctttatggggaaaaaaaagttacttacataagaaatattactgatattgatgataaaattattgattcttcaaaaaaaaataataagagcatctcggagttaacagaaagtattacaaaaacttttcatgatgattgtagctatttaaattgtttaaaacctacatttgaaaccaaagctacagaacatataaaagaaatgattaatatggtttcaattctattaaaaaataaacatgcatatgaaa

SEQ ID NO: 299087 - DNA, 394 bp, Unknown
  Bacterial polypeptide expressing nucleotide sequence isolated from the Sargasso Sea
gctgcacgagacgggcgtgtcggatggcgaggcccatgcggtgccgaacgatgtctccgatgcggtgtatgacgatctcaacacgccgctggcgctttccgggctgcatgctgctgccgatgcggcgtttgcggccgagaccccggaagacgtggcggcggccacgggcgctctgaaggcagcgggagagctgctggggttgttgcagcaggacccggaggtctggttccagggcgacggtgatgccgcgatcgatgcgttgatcgccgagcgcatcgcagcccgcgatgccaaggatttcgcccgtgccgacgagattcgcgaccagcttgccgccgacgggattgtgctcgaggacgggcccggcggcacaacctggcggcgcgagggatag

SEQ ID NO: 299088 - DNA, 253 bp, Unknown
  Bacterial polypeptide expressing nucleotide sequence isolated from the Sargasso Sea
atgctccgattttataattcactatcaaaaataaaagaagatttcattcctattgaaaaagggaaagtcaaaatttatacgtgtggtccaactgtttacgattatgctcatattggaaattttagaacttttctttttgaagattttttaaaaagaactttacagtctcttggttatgatgtttttcatgtaatgaatatcacagacgttgatgataagactataaaaaaatctttagaagagggaaaagaat

SEQ ID NO: 299089 - DNA, 496 bp, Unknown
  Bacterial polypeptide expressing nucleotide sequence isolated from the Sargasso Sea
aatgataaaaattaaactgcataatacgctaacaagaaaaaagcagacttttgttcctttagatgaaaataatgtcaggctctacctatgcggcccgacagtatatgatcgcgctcatcttggaaatgcccgaaatgtaataatgtttgacgttttataccggcttttgatcgaaacttacggatttgatagcataacttacgtgaggaatttcactgatattgatgacaaaattaacaataagtctttagagagcggtagaccaatagatgctataacttctgaaaccattcaatggtatttggaagatatggcagctttgggaaacttagagcccaacttaatgcctagagcaacagattatatccctcagatgattagttacattgagcttttaataaagggaggttttgcatacccagctgaaggccatgtgcttttctcggtttcaaattacaaaaattatggaagactgtcgggacgaagtgtagaggat

SEQ ID NO: 299090 - DNA, 223 bp, Unknown
  Bacterial polypeptide expressing nucleotide sequence isolated from the Sargasso Sea
tatgaataaagatatttttttaactaatagtcttggaaacaaaaaagaaaaatttgtaccaataaataaaaataaaataggtatgtatgtatgtggaccaaccgtttatgatgaccctcatattggtaatgcaagacctttagttgtatttgatattttattcagagttttaaaatgtaaatttggagataaacaagttaactatgttagaaatatcacagat

SEQ ID NO: 299091 - DNA, 381 bp, Unknown
  Bacterial polypeptide expressing nucleotide sequence isolated from the Sargasso Sea
aatgaaaaaagatatatttttatcaaatagcttaggtaataaaaaagaaagatttattccaataaatgaaaaaaatattggaatgtatgtttgtggaccaaccgtttatgatcacccacatataggtaacgcaagacctctagttgtttttgatattttgtacaaaattttgaaatgtaaatttggtgaaaataaagttacatatattagaaatataacagatattgatgataaaattattgaagcttccttagaaaaaaaaatttcgataaacgatcttacaaaaaaaattacaaatatttttcatgaggattgcaaatatttaaattgtgaaattccaacgcacgaaccaaaagctactgaaaatattttattaatgat

SEQ ID NO: 299092 - DNA, 201 bp, Unknown
  Bacterial polypeptide expressing nucleotide sequence isolated from the Sargasso Sea
tctgcgctttaccaacagcctcaccagccgtacagaagcgtttgatccccttgagcccggcaaggccacgatctactgctgcggtgtcacggtctatgacctctgccacctgggccatgcccgcagctacatcaattgggatgtgctgcggcgctacctgatttggcgtggctatgacgtcacctacgtccagaactacac

SEQ ID NO: 299093 - DNA, 525 bp, Unknown
  Bacterial polypeptide expressing nucleotide sequence isolated from the Sargasso Sea
aatgaataaagatatttttttaacaaacagctatggtggtcttaaggaaaaatttcaaccaatagatccaaagagtattaaaatgtatgtatgtggcccaacagtttatgatgagcctcatattggaaatgccagacctttagttgtgttcgatatcttatttaaggttttaaaatgtaaatacggagatgacaaagttaattatgtacgtaatattactgatatagatgataaaataattcaatcagctaaacttaataaagtttctatttcagagttaacaaaaaaaattacaaaaaattttcataacgattgtaaatatcttaattgtgataaaccaaattttgaacctaaagctactgaaaatatccaattgatgattgatatggtaagtaatttaattaaaaaaggttttgcatacgaaagcaacaatcatgtttactttgaagtaaaaaaatttattgattatggaaaattatctaataaaaaaattgaagatctgattaaaggatcaagggtagaggt

SEQ ID NO: 299094 - DNA, 476 bp, Unknown
  Bacterial polypeptide expressing nucleotide sequence isolated from the Sargasso Sea
tatggattatcacttattcaatacactaagtggtaaaaaagaaatattaaagcctggtgatccaaagcatgtgaaaatctatgcttgtggaccaactgtttacaattatgcccacataggaaatgcaagaatggcagttgtatttgatacttttgttagaacactcagatttatttttccaaaagttacatatgtctctaacataacagatatagacgataagataattgaagcagcagttgagcaaaatgttgagatatctgtgatcacaaaaaaattcacaaaaatatataacgaagatatggctaaacttaatgttctagcgcctgacgttcagcctaaggcaacagaatatattcctgaaatgatagacctaattaaagaacttatcgagaaggattttgcctatgaaaaggacggacacgttttgttccatgttccaacttatgaaaattatggcaagttatcaaatcgaa

SEQ ID NO: 299095 - DNA, 454 bp, Unknown
  Bacterial polypeptide expressing nucleotide sequence isolated from the Sargasso Sea
atgtttagtttaaaattacacaatacattaggaaacattaaagaagaatttattcctataaataaaaaacacataaaaatatatgcttgcggtcctacggtatataattatgctcacatagggaatgcaagaatggcagtagtatgtgacctcttagttcgcatattaaaaactttatatccaaaagttacttatgtatcaaatattacagatatagatgataaaataattaatgcttctttagaaaaaaaaattcctatagaaaaattaactaaaaagtttgaaaaaatttataatgaagacatgagtgctctcggtgtatctaaaccagacattcaacctagagccacagaacatatcaatgaaatgatccatttgatagaaactttaattaaaaataattctgcatatgtaaaagattaccacgtattatttgatgttctttcgtaccccc

SEQ ID NO: 299096 - DNA, 508 bp, Unknown
  Bacterial polypeptide expressing nucleotide sequence isolated from the Sargasso Sea
atgaatcttaaaatttcaaatactttaagtaaaaaaaaagaattgtttaaaccaataaattctaaaaatataactatgtatgcatgtggtcctacagtatatgacgatcctcatgttggtaatgcaagatctttagttgtttttgatcttttatttaggactcttaaaaaaatttatggcgataaaaatgttacatatgtaaggaatataacagatatagatgataaaattatagacattgctaaagaaaaaaatttaccaattaaaaaaataactgaagaagttacaaatcagtttcacaatgcgtgcaaagatctaaattgtttagaaccgacagttgagcccaaagctaccggacatgtagatggcatgataaaaatgactagttctctaatagaaaaaggttttgcttatataaatgagggacatgtttatttttcaatagcatcttttaaaaattacggaaaactttctaataaaaatttggaagaattaaaagcaggatcga

SEQ ID NO: 299097 - DNA, 488 bp, Unknown
  Bacterial polypeptide expressing nucleotide sequence isolated from the Sargasso Sea
aatgaataatttacaattaactaactcacttacaaataaaaaagaaatttttaacccaataaataaagataaagtttccttatatgcatgtggaccaactgtgtacgacaatccccatgttgggaacgctcgtgcactagtagtttttgatcttctttttcgaatactcatcgagctttatggggagaaaaaagttacatatgtaagaaatataacggatatagatgataaaattattgaagccgcaaaaagaaaaaaaatagatatttcagatttaacaaaatctgtaacagaaaaatttcataaagattgcaaaattttattttgtttaaatccaaccaaagaaccaaaagcaaccgatcatgttgaaggtatgataaacatgacgaaagaactaattgaaaaaaatgctgcttacgaaaaagaaggacatgttttttttgcagtaacatcatttaaaaaatatggtaaactttcaaataaaaatc

SEQ ID NO: 299098 - DNA, 496 bp, Unknown
  Bacterial polypeptide expressing nucleotide sequence isolated from the Sargasso Sea
aatgcataatttatccgtattcaattctttaacaggaaaaaaagaaaagtttaccactttccataaagatttagttcacatgtatgtatgtggtccaaccgtatatagtaatgtccatctaggaaattgtagaacttttatttcttttgatataatttatagatatcttctccacttgggatataaagttaaatatgttagaaatattacagatgtcgggcatttagagaacgactcagacgatggagaagacccaattataaagaaagccaaaaaagaaaacatcgaaccaatggaggtggttcaaaaatatactatagactttcgtgagaatttaagaaaactaaatacttttccaccaagtattgaacctacagcaacaggtcatattttggaacaaattgaattaattgagaaaattattaaaaacggttttggatatattagaaatggttctgtttatttcgatgtattaaaattcaataaaattctacat

SEQ ID NO: 299099 - DNA, 541 bp, Unknown
  Bacterial polypeptide expressing nucleotide sequence isolated from the Sargasso Sea
atgaacaaagagttatatatatctaatagcctaggtaataaaaaagaaaagtttattccaattgatacaaataatattagaatttatgtatgtggtcctactgtatatgacgatccacatataggtaatgcaagaccattagtagtttttgatattttatataaagttctaaaatgtaaatttggattaaaaaatgttaattatgtaagaaatataactgatattgatgataaaatcattcaatcatcattagacaaaaaaatctcaactcaggaattgacagaaaagataactaagaattttcatgatgattgcgtttatcttggttgtgaaaaacccacgcatgaacctaaggctacagaaaatattcctttaatgatagatatgattaataaattattggaaaatggttatgcatatttaaataataatcacgtttattttgaggtaaaaaaatttaaagactatggaaaattatctaataaaaatttaaatgatttgattgctggttctagagtagaaatatctgaaaacaaaaaaa

SEQ ID NO: 299100 - DNA, 646 bp, Unknown
  Bacterial polypeptide expressing nucleotide sequence isolated from the Sargasso Sea
gaaaatgaaattgcacaatcatgttgtgctaatgaaacagaggttttcgcaaattattgggttcataatggatttataactcaatcaaatgaaaaaatgtctaaatcgcaaggtaatattttaaaaataagtagctttaaagaaaatgttaacggccaggctttaagactggctctaatctctgcgcactacagacaaccacttgattggaatgataaacttttagaagaaagtcagaaaactatcgataaatggtacaaaagctatattgaattagataaacctaaattaatttctgatgatgatctttatcctttgtatgatgatttaaatacaccaaagtatatagcaaaccttcataaactttacgaaaaatcgcaatcaggaaatgtagaagataaaaaagaatttgtatcagcatgcaattttgttggactgttgaatgaaactaaagaagaatggaataattttaaaaaaaataaatccactttaagtagtgatttaattgaaataaaaataaaacagcgtaataaggctagagacgataaaaattacgaattagctgacaaaatccgtaatgaacttttagaaaaaggagttcaaatagaagataaagatggtaaaacctcgtggaaatttaaataat

SEQ ID NO: 299101 - DNA, 223 bp, Unknown
  Bacterial polypeptide expressing nucleotide sequence isolated from the Sargasso Sea
tatgacgctcagggtttacgacacgcgatctcgttcaaagcgtgttttcaagcccctggttgagggccaagtaggaatatatgcgtgtggcataaccccctattcccctagccacatagggcatgctagacaggccatagcattcgatataattgtcagatggctccgaaagagtggattcaaagtcaattacatctcaaatttcacagatatcgatgacaag

SEQ ID NO: 299102 - DNA, 415 bp, Unknown
  Bacterial polypeptide expressing nucleotide sequence isolated from the Sargasso Sea
catgttagctatatacaatagtttcgctagaaaaaaagagcctttcacgccaatcgaaccaaaaaagattcggatgtatgtctgcggcatgactgtttatgatttttgccatgttggtcatgcgcgagtcatggttgttttcgatatggtttctcgctatcttcggagtattgattttgatgtcctttatgttagaaatatcaccgatatagacgataagattatcgaacgcgctaaaaaaaatagcgaacaaattaccgatttaacaaatcgatttattgaggagatgaataaagatgcaaatgcattaggtgttttaccacctgatttggaaccaaaagcaactgatcatattaaagaaattattgagatgatctcagaactaatcaaaaaagaacatgcctatctagcagct

SEQ ID NO: 299103 - DNA, 266 bp, Unknown
  Bacterial polypeptide expressing nucleotide sequence isolated from the Sargasso Sea
aatgggtaaagatatatttttaactaatagcctcgataataagaaaaataaatttatacctaaaaatgaaaaatcagttggcatgtatgtttgcggaccaactgtatatgacgatccacatataggaaacgcaagacctttagttgtttttgatattctatttaaaattttaaaaaagaaatatggatctaattctgttaactatattagaaacattacagatatagatgataaaattattaaagcatcaaatgataaaaaaattt

SEQ ID NO: 299104 - DNA, 574 bp, Unknown
  Bacterial polypeptide expressing nucleotide sequence isolated from the Sargasso Sea
tttgctaatattgggttctaatggctttttaaatctagctaatgaaaagatgtcaaaatccttaggaaatgtagtctatatagacgatttactaaaagagtttaaggggaacgaaatcagattagccctgctaagtacacattacagacaaccaattccatggtctcttaatttattgaaacaagctgcatcagtagcaagaaaaatatcaagattcacttcatcccatactacaaagagtaagttttttcctggttcaaatattggtaaagcaatactcgatgatttaaatacaccaaaggcattggcaatcatgcaatcacttatcacaaatccaaaaaaatttgatattaatcaagaaattagtacatttagatatatttttgagggttctaaacaagatttatcactttcgaaagaagatcaggataaaataaatcaactaataaaattgcggctaaaagcaagagagaatggtgattatcaaactgcagataaaattagagatgaattaaataaaatgaatgtttcaattaaagataaaaatggaaaaacagaatgggaaatattgtag

SEQ ID NO: 299105 - DNA, 730 bp, Unknown
  Bacterial polypeptide expressing nucleotide sequence isolated from the Sargasso Sea
gagtgttctgcaatgtcaaagaaatttttaggagatcagtttgatgttcatgggggtggtatagatttgttatttcctcatcatgaaaatgaaatagctcaatcaagatgtgctaatgatacaaaaatatttgcaaaattttggatgcataatgcattcatcactatgtccaatgaaaagatggctaagtctcagggaaatattttaaaaataaaagattttagaaataagataagcggtcaagttttgagattagctttactgagtgcacattataaacaaccattagattggaatgataaacttctggacgattgtcaaaacacaataaataaatggtacaattcatatttagatataaaaaataattctaaagtttctgatgaaattcttcagccactttacgatgatttaaacactcctggatatattgctaatttacatcaattatatgacaaagctcaaaaaggtaacgatgaagataaatctttatttgtttctgcttgtcaatttgtaggactattaaacgaaagtaaagaaaattggcttaaatttaaaattagcaaagctttaatttctgaaaaagaaattttacaaaaaattcaggaaagaaataaggctagagagaacaaaaattacgaagaagctgataaaattagaaaagagcttttagataaaggtattttaatagaagataaagatggtaaaacgacttggaaatttaaatgag

SEQ ID NO: 299106 - DNA, 576 bp, Unknown
  Bacterial polypeptide expressing nucleotide sequence isolated from the Sargasso Sea
gatgtcgatatcaaatcagaatcttaaattttataactctctaacatcatcaaaagaaatttttaagccaattaataaatcaaaaattggtatgtatgtttgtggaccaacagtctacaatacggttcacctaggcaattgtagaacctttatttcatttgatttaatatatagatatttaaaacacattggatacgatgtaagatatgttagaaacataactgatgttggtcatcttgaagaaaatagcgatgatgataaaattttgaaaagagcgaaaattgaaaaccttgagccaatggaaattgttcaaaaatattctaatgaatttcatgagataatggaaaagtttagtttggtaaagccaagcattgaacctactgccagtggtcacattcctgagcaaatagaaatgatagaggaaattattagtaatggatatgcttacgaaaagaatggttccgtatactttgatcttaataatttctcaaatgattttgattatggaaaacttagtaaaagaaatttagatgatgtcattaatgaatctagaaaactagagaatgtaagtgataa

SEQ ID NO: 299107 - DNA, 553 bp, Unknown
  Bacterial polypeptide expressing nucleotide sequence isolated from the Sargasso Sea
aatgcccctacagatacacaactcattatccggtaaaaaagaagatttcaatcctgttcacgaaggacaggcctctctatacgtttgcggtcctacagtatacggagacagtcaccttggtcacgccaaagcatatgtcagctttgacataattctacgatatcttcgttatatcggattaaaaactttttatgtgcaaaacattactgatgtcggtcatctgatgggagatagcgacgatggtgaagataaacttctcaaaagagcacgtgaactggagcaggagccaatggctgttgctgaatatttttctagaagacattttgaagcaatggacaaactggccgtgattcgccctgacataagtccaagggcgactggacatatcacggaacagctagaagcaattgaaacacttattgaacagggccttgcatacgaatccaatggctcagtttattttgaaatcaaaaaggatcctaaatatggtgaactctccaacagggacatcgatcagatgcttggaggagcgcgtgttgatgtacggaaagaa

SEQ ID NO: 299108 - DNA, 334 bp, Unknown
  Bacterial polypeptide expressing nucleotide sequence isolated from the Sargasso Sea
gatgacaattaagttttataactccttgaccaatcagaaggaagattttgttcccatccgtgagggtgaggttgggatgtatgtttgtggaatgactgtttatgataactgtcacttaggtcatgcaagggcgatgatggcttttgacatagttgcacgttatcttcgatatcaaggttataaagtaaattttattcgtaacatcactgatatagatgacaagatcattgaaagagcttatgaaaataaagagaagattgaggatctaacagcaagaacaatagccagtatgcaagaagattttcttaaacttggattagagccaccgaactaa

SEQ ID NO: 299109 - DNA, 415 bp, Unknown
  Bacterial polypeptide expressing nucleotide sequence isolated from the Sargasso Sea
aatgctccgattttataattcactatcaaaaatgaaagaagattttattcctattgaaaaagggaaagtcaaaatttatacgtgcggtccaactgtttacgattatgctcatattggaaattttagaacttttctttttgaagattttttaaaaagaactttacagtctcttggttatgatgtttttcatgtaatgaatatcacagacgttgatgataagactataaaaaaatctttagaggaaggaaaagaattgcatgagatcactgaatattataaatctgtatttatagaggatttagagatattaaaaatattgccaccgaatgaatttcctgctgcaacagaccatattgatcaaatgatcaacataattcaaattttaatagataaagggcatgcttatacgactgat

SEQ ID NO: 299110 - DNA, 715 bp, Unknown
  Bacterial polypeptide expressing nucleotide sequence isolated from the Sargasso Sea
caaaaaaatatcttgggtgatagatttgatatacatggtggtggtagagatttattatttccacaccatgataatgaaattgcacaatcatgttgtgccaacggaactgaaactttatccaattattgggttcacaatggatttattactcaatcaaatgaaaaaatgtctaagtctcaaggcaatattttaaaaataagagattttaaagagaatgttaatggtcaggttttaagattagctcttatgagtgcacattatagacagccattagattggaatgataaacttttagaagaaagtcagaaaacaattgataaatggtacaaaggctatattgaattagataaaactaaactaatctctgatgatgatctttatcctttatacgatgatttaaatacaccaaggtatatagctaaccttcataagctatacgaaaaatcacaatcagataatttagaagataaaaaagtatttgtatcagcatgtaattttgtaggactgctaactgaaactaaagatgaatggaataattttaaaaaaaataaatccactttaaataaagagttagttgagacaaaaattaaagaaagaaataaggctagagatgacaaaaattacgaattagcagataaaatccgtaatgagcttttggaaaaaggagttcaaatagaagataaagatggtaaaacctcgtggaaatttaaataat

SEQ ID NO: 299111 - DNA, 538 bp, Unknown
  Bacterial polypeptide expressing nucleotide sequence isolated from the Sargasso Sea
atggaaattcgattatataactcaaaaagtaagaaaaaagagatatttcatcctgttaatgatgaaaatgtgactatgtatgtatgtggtccgacagtttatggggcacatcatattggtaatgcacgaccggcggtaatttttgatgtattggcaaaattattgcgaaataaatataaaagtgtgacatatgcaagaaatataactgatattgatgataaaataataaatgcagccttggagcaaaatcttgaaatatctgaaattaccaagagatctacaaatcaatatcattcagatatgaaaatattgaacgttgaagaacctaataaggaaccttatgcaacacaatttatttctgagatgattttatttattgaggatctaatagaaaaagataatgcatatgtttctgaaggacatgtgttatttgatattgattcttataaattatatggggatttatctagcagagaccctaaagatatgattgcagggctcagagttgaagttcaagattacaaaaaaatcctttaga

SEQ ID NO: 299112 - DNA, 598 bp, Unknown
  Bacterial polypeptide expressing nucleotide sequence isolated from the Sargasso Sea
atggcgagaagatgtccaagagcctgggcaaacttcttcaccattcgcgaggtgctggagaagtaccacccggaggtggtgcgctacctgctggtgtccagtcactaccgcagcccgatcaactactcggaagagagcctcaaggaagccaagggcgccctggagcgtttctacaacggcctcaaaggcttgccggaagccgcgcctgccggtggagaggcgttcgtcgagcgcttcggcgcggcgatggacgacgatttcaactcgccggaagcctgcgccgtgttgttcgagatgatccgtgaggtcaaccgcctgcgtgagtccgacgtgcaggctgctgccggcttggctgcccagctcaagcaactggccagcgtgcttggcgtgctgcaactggagccagaggccttccttcaggccggcgctgccggcaaggtcgatgcagcagaggtcgacgcactgatcgctgcacgcctgcaagcgcgtgcggaaaagaactgggcggaaagcgaccgcatccgcgatcagctcaccgccatgggcgtggtgctggaagacggcaagggcggtaccacctggcgcctggccgagtaag

SEQ ID NO: 299113 - DNA, 712 bp, Unknown
  Bacterial polypeptide expressing nucleotide sequence isolated from the Sargasso Sea
ggtgctgatttaatttttcctcaccatgaaaatgaaattgcccagacatgtgcagctcataataatactcatgacttaaaatcttttgcaaaatactggttccacaatggatttgtgaatgtagaaggagaaaaaatgtccaaatcaattggcaatattcatcttgttaatgaattgaataaagaattcaaaggagaagtattaagacttactcttatttctgcgcattacagacagccactaaactggactaaaaatattataaaacaaaatagtactatgttaaatcgtttttatcgaaatttaaaagatttagaaaatatagatgcttataaagataataatcaaatagaagatagcgttatcgaaggtttatatgatgatctaaatactccaaaagtaattgctgaattaaatgtattaagcaatcaattaagtagcgcaaacaacaaaatgaaaagtaggattaaatataatttattggaagtaggtaaaataattggtattcttcaaaacagtcctgatacgtggttaggatatggaaaatcagcaattttgaatgaaactattatagaaaggttgataaaagagcgcaatgaagctagaggcaataaaaattttgatttagctgatcaaattcgtgatgaactaaaagaaaaaggtgtcgaaattgaagatacaacaaaaggaacgatttggaaaagtgtttaaa

SEQ ID NO: 299114 - DNA, 295 bp, Unknown
  Bacterial polypeptide expressing nucleotide sequence isolated from the Sargasso Sea
aatgataaaaattaaactgcataatacgcttacaagaaaaaagcagacttttgttcctttagatgaaaatgatgtcaggctctacctatgcggcccgacagtatatgatcgcgctcatcttggaaatgcccgcaatgtaatcatgtttgatgttttataccggcttttgatcgaaacttacggaattgataacataaactacgtaagaaattttactgatattgatgacaaaattaacaataagtctttagagagcggtcggccaataaatgatataacttctgaaaccattaat

SEQ ID NO: 299115 - DNA, 364 bp, Unknown
  Bacterial polypeptide expressing nucleotide sequence isolated from the Sargasso Sea
aatgaacaaagatatatacttaactaatagttttggcagtaaaaaagaaaaatttgtaccaataaataaaaataaaattggaatgtatgtttgtggaccaacggtatatgataatccacatataggaaatgcaagaccacttattgtatttgatattctttacaaactattaaaatgcaagttcggcgaaaaaaatgttatttatgttagaaatattactgatatagatgataaaattattaaatcatcaatagaaaaaaaaatatcaacaaataagttaacagaagatattactaagatatttcacaaggactgtaattacttaatttgtgaaaaacaacttacgaacctaaggctaccgaaa

SEQ ID NO: 299116 - DNA, 256 bp, Unknown
  Bacterial polypeptide expressing nucleotide sequence isolated from the Sargasso Sea
atgaatttatacatctacaacaccttaacaaataaaaaagagcaattcgtgcctcacaaccatggtgaagtaaatatgtatgtctgtggcccaactgtatacagtgaaccacacattggtaatgccagggcagctttgataggcgatctgttctatcgtattctcagtgagctgttcgataatgtaacatatattagaaacctcactgatgttgatgataaaatcattattgagtcagacaagcttggtgtggata

SEQ ID NO: 299117 - DNA, 538 bp, Unknown
  Bacterial polypeptide expressing nucleotide sequence isolated from the Sargasso Sea
atgaataaagatctttttttaacaaatagcctgggaaacaaaaaagaaaaatttgtgccaataaataaaaataaaattggtatgtatgtttgtggtcccactgtatatgatgatccacatataggaaatgctaggcctcttgttgtttttgatattttatataaagttttaaaatgcaagtatggaaacaaaaccatatcttatattagaaatataactgatgtagatgataaaattattcaatcatctcatgaaaaaaagatatctatcgaagatttaacaaaaaaaataacagcaaactatcatagcgattgtgattatttaaaatgtgaaaagccaaataaagaaccaaaggcaactgaaaatattttactcatggttgaaatgatagaagagttgatcgaaaaaaagtttgcttatattaataataaacatgtttattttgaagttaagaagtttaaagattatggaaaactttcaaataaaaatttagaagagttaatcgctggttctagagttgaaatatcagaaaataaaa

SEQ ID NO: 299118 - DNA, 355 bp, Unknown
  Bacterial polypeptide expressing nucleotide sequence isolated from the Sargasso Sea
atgagcctccgcctccacaactccctcagcgaccagaaagaagactttgttccccttcgtgagggacgggtgacgctttatgtctgcggaccgacggtttacaacgacagtcacctcggccatgcgaagacctatgtcagtttcgacgtcatcctgcgctacctgaaataccgcggattcagcaccttttacgtccagaacatcaccgatgtcgggcacctgatgggagacgccgacgagggtgaggacaaaatgctgaagcgtgcccgggaactggaactggaaccgatggccgttgcggaaacctacaccacccggcattttcaggcgatggaccggatgggcgtcatccgtc

SEQ ID NO: 299119 - DNA, 307 bp, Unknown
  Bacterial polypeptide expressing nucleotide sequence isolated from the Sargasso Sea
atgactcagcttaggttatataactcacttacaaatcagaaagaaaattttataccgattgacccaagtcatgtacgcttgtatacctgtggtccaaccgtatacaattatgcgcatatcggtaacgcgcgtcctcctattgtttcagatattcttgttaggctcctgagacatctatataagaaggttacgtatgtatcaaatatcacagatattgatgataaaataatcaatgcgtccaaggagcaaaatagacctatcagtgagataaccaaaaaatatgagaaaatatataatgagaatctaa

SEQ ID NO: 299120 - DNA, 645 bp, Unknown
  Bacterial polypeptide expressing nucleotide sequence isolated from the Sargasso Sea
cttgtgcaagcgttaattctgacaatcctgaagattatgctaagtattggatacataatggttttgtaactatagatggcgaaaaaatgtcaaaatctcttaataatattattcttctgaatgatcttttaaaagaacatgatggagaaacaataagactagcactgttatcctctcattatcgaaaatcacttgattggaatgaaaatgtaattaagcagtctaaagtattgttggataaagtttatgattttcttgttacctatgacgatgatccagaaggtgaaattgatgaaagtctcatagaaaatttttctaatgatcttgatatacctaaagtattaacttctattaatgaacttttaaaaaataaaaattcttctaaccctcgaactatcaaacaatctttattatttgcgggcagtattttaggagtatttaataaaaaaccatcggaatggaatatgcaaattgaaatgagtaaatctgaaatggcagaaatagaaaagcttattaatgagaggaaaactctcaaagaaaataaagattttattggcgctgatgcaatcagagattcattgttggaaaaaggtattgagcttatagattccgaagatggcacctcctggaaatctaaacattaat

SEQ ID NO: 299121 - DNA, 565 bp, Unknown
  Bacterial polypeptide expressing nucleotide sequence isolated from the Sargasso Sea
atgaagatcaatctctataattcaagcacaaagagtaaggagctatttgttcccattgaccccaagaaggtcacaatgtatgtctgtgggcccactgtatatagttttccacatattggaaatgctaggggccctgtcatatttgatgtcttggcaaatctcttgagaagagaatatcaactcgtatatgtgagaaatataaccgatcttgacgataaaatttatcaggcagctgaagaggaaggtgttcaaatatctgagattactcagagatatacaaaaatttatcaagaggatatgaatgctttaggagtaagagatccggatatagaacctttggccacagatcatattgctgaaatgattgaaatgatccaaggtttgattgataagagccatgcttatgagaatcaaggacatgtttttttcagcatagatacatttgatgattatggtttcctctccaaccggtctgaagtggagcagatttcaggaacacgaataaaaccatccgaaataaaaaagaatcaaaaggactttgttttatggaagccatctactgggg

SEQ ID NO: 299122 - DNA, 424 bp, Unknown
  Bacterial polypeptide expressing nucleotide sequence isolated from the Sargasso Sea
catgactgacattcattttcacaacacaaaatctggtaagaaagaaaaattcgaaccgatcgacccagaacacattaagatttacgtttgcggccccacggtctataacttcgtgcatattggcaatggccgcccagcggttgtttttgatgtcttagtcagactactgcggttggtttatccaaaagtaacctatgtccgcaacgtcactgatatcgatgacaaaattaataatgcagcgatcgaaaacaacgaatccatacaagtgttagcagatcgcttcacggacgcctacgaagaagacatgttaacacttggtgtcgagcctccggatgttacccccagagcgacccaccacatcaaagagattatcagcatgattactgtattggtcgaaaaaggtttcgcctatgaaaatgaagga

SEQ ID NO: 299123 - DNA, 424 bp, Unknown
  Bacterial polypeptide expressing nucleotide sequence isolated from the Sargasso Sea
aatgaataacttacatttaaccaattcacttacaaataaaaaagaaatttttaatccgataaataaagataaagtttccttatacgcatgcggaccaacagtttatgataacccacatgttggcaacgctcgtgctttagtggtgtttgatcttctttttagaatactcattgaactttatggaaagaaaaaagttacatatgtaagaaatataacagacatagatgataaaattattgaagcttcaaaaattaaaaaaattaatatttcagatttaacaaaatctgtaacagaaaaatttcacagtgattgtaaaattttattttgtttaaatccaaccaaagaaccaagagcaaccgatcatgttgaaggtatgataaatatgacaaaaaaactaattaaaaaaaatgctgcttatgaaaaa

SEQ ID NO: 299124 - DNA, 455 bp, Unknown
  Bacterial polypeptide expressing nucleotide sequence isolated from the Sargasso Sea
tatgtttttatataattcattaactagaaaaaaagaaaaactatcaaaagataaaatcaaaatgtatgtttgcggagttacagtttatgaccgtccgcatttaggacatgctttatctacagttacatttgatgttctacatagattcttagaatacagtggctatgatgttaaaagagttcaaaactttacagatgttgatgacaaaattattaataaatccaaagaattaaatatttcagctcaagaagttgctgaaaaatatatagatagttttttcgaagatatggatgcattaggtgtaagaagagctgatgtccatcctagagctactgaagatatgaaagaaatcatcgaacttatatcttcacttattgataataaagcagcttacagttctaatggtagtgtttattttgatgtttcatactcatcagattatggtaaactttctc

SEQ ID NO: 299125 - DNA, 328 bp, Unknown
  Bacterial polypeptide expressing nucleotide sequence isolated from the Sargasso Sea
catggagccaatagtgcagtatttaaaaatatttaatacattaaatagtaaaaaagaaacatttaaagctattgattctaatcatgtaaaaatatatgcatgtggaccaactgtttataattatgctcatataggcaatgcgagaatggcagttgtttttgatacttttgtaaggacgctaaaggctatgtatccaaaagtaacctatgtatctaatattacagatattgacgataagataattgaagcagcaaaagaacaagaagttgaaatatctcaaataacagacaagtacacaaaaatttataatgaagataggcaagactta

SEQ ID NO: 299126 - DNA, 581 bp, Unknown
  Bacterial polypeptide expressing nucleotide sequence isolated from the Sargasso Sea
tatgagcagtgaacaaccatttcaattgtttaatactttaagcggcaacaaagaaagattagaggcaattgatccaaagcatttaaagatttatgcatgcggaccaaccgtatataactatgcgcatattggaaatgctaggatggctgttgtctttgatactttagttagaacccttagagtaatttatccaaaggtcacatacgtgtccaacattactgatatcgacgataagatcatagaagctgctatggaacaaaatgttgagataacatctatcactgaaaaatacacaaagatttacaatgacgatatgttaaaactcaatgttttagctccggatattcaaccaaaagctactgagtacataccagaaatgattgagctcatagttgagttaattgaaaaggattttgcttatgaaaaagaaggacatgtgctttttcacgtgccaacatatcaaaattatggaaagctttctaaaagaaatagggatgagcaaattgctggaagtcgggtagaggtcgcacctttcaaaaaagatcctgctgacttcgtattatggaaacctagtaccaaaa

SEQ ID NO: 299127 - DNA, 187 bp, Unknown
  Bacterial polypeptide expressing nucleotide sequence isolated from the Sargasso Sea
atgagtcgtaagaaggaattgttcgttccgagagacccgacggggaagagggtgcaaatgtacgtgtgcggagtcacggtgtacgattattcgcacatcggtcacgcgcgcgtgtacgtcgcctttgacgtgttgtatcgacaactcatgcgtctcgggtacgatgtgacgtactgtaggaatttta

SEQ ID NO: 299128 - DNA, 391 bp, Unknown
  Bacterial polypeptide expressing nucleotide sequence isolated from the Sargasso Sea
catgagcctccgcctccacaactccctcaacgaccagaaagaagactttgtcccccttcgtgagggacgggtgacgctttatgtctgcggaccgacggtttacaacgacagtcacctcggccatgccaagacctacgtaagtttcgacgtcatcctgcgctacctgaagtaccgcggattcagcaccttttacgtccagaacatcaccgatgtcgggcacctgatgggagacgccgacgagggtgaggacaaaatgctgaagcgggcccgggaactggaactggaaccaatggccgttgctgaaacctacaccaaccggcattttcaggtgatggaccggatgggagtcatccgtccggatatctgcccgcgggccaccggccatattccg

SEQ ID NO: 299129 - DNA, 868 bp, Unknown
  Bacterial polypeptide expressing nucleotide sequence isolated from the Sargasso Sea
agaccaatagttgtattcgatattttatttaaaatttttaaaaaaaattatcctaaagttacttatgtgcgaaatattactgatgtagatgataaaattattaaatcttcaaaagaaaataatatttcaatttcagaattaacaagcgaagtaactaaaagttttagtgaagattgtaagtacttaaattgtgaagagccaactcatcaacctaaagcaactgaaaatatagatttgatgattgaaatgatttctgaattaattaaaaaaggatttgcttatgaaaataataagcatgtttattttgaggttaaaaaattcaaggattatggtcaactctcaaataaaaaattagaagatcttattgctggatcaagagtagaagtcagtggaaataaaaaaaattcagaggattttgttttatggaaacccgcaggagatgatgaaccatcatgggagtctccatggggaaaaggaaggccaggatggcatctggagtgttcagcaatgtcaaagaaatttttaggagatgagtttgatgttcatggaggtggtatagatttactgtttcctcatcatgagaatgaaatagctcaatcaagatgcgcaaatgatacaaaaatatttgcaaaattttggatgcataatgcattcatcactatgtctaatgaaaagatggctaagtctcagggaaatattttaaaaataaaagattttagaaataagataagtggccaagttttaagattagctttactgagtgcgcattataaacaaccattagattggaatgataaacttttggagaactgtcaaaacacaataaacaaatggtacaattcatacttagaaattgataataattcta

SEQ ID NO: 299130 - DNA, 638 bp, Unknown
  Bacterial polypeptide expressing nucleotide sequence isolated from the Sargasso Sea
ttttccacatcacgagaatgaaattgctcagtcaacatgttgtcatgataaaaaaatgtcgaacttttggctccataatggatttataaattttaagggtgaaaaaatgtcaaaatctttaggaaatacctcaattgttaatgatttattatctaaacacgatcctgctgttctcaaatattcactactgactactcattatcgtcaaccacttgatttttcaaacgatcttataagttatagtgaaaacatcattaacaagtggagagaacatattaaagaggttaatagcaaagaattagactcagaatttgttaatgcacttttagatgacctaaataccccaaaagcactgatgagattacagcaaataatagctaacattaaaaaagacaagaataatgatgatttattagctcattttaataatggtttaagcttattaggattaaatcctagttttaataaaacagatttaaaccttgataaagaatttattgaaaatatgatatctcgccgacaagaggctaaaaaaaataaagactttgaactagcagataaaattagagatgagttatttaaacaagggattgttttagaagacaccaaaaatggcacaacatggaagaaaaactaga

SEQ ID NO: 299131 - DNA, 904 bp, Unknown
  Bacterial polypeptide expressing nucleotide sequence isolated from the Sargasso Sea
aatgcccctccagatacacaactcattatccggcaaaaaagaagattttaatcctgtacacgaagggaaggcctctctatacgtttgcggtcctacagtatacggagacagtcaccttggtcacgccaaagcatatgtcagctttgacataattctaagatatctacgctatagcggattaaaaactttttatgtgcaaaatatcactgatgtcggtcacctgatgggagatggcgacgaaggtgaggataaacttcttaaaagagcacgtgaactggagcaggagcctatggctgttgctgaatatttttctagaagacattttgaagcaatggacaggctggctgtgattcggcctgacatcagtccaagagcaaccggacatattacggaacagctagaagcaattgaaaagctgattgaacagggacttgcctacgaatccaatggctcagtttattttgaaataaaaaaggatccaaaatacggtgaactctccaacagagaaatcgatcagatgcttggaggggctcgtgttgatgttcggaaagaaaagcgccacccaggagatttcgcgctttggaaacgagctgaaccaggacacttgatgcgctggcgtgatccgtttagtggatggggctatccaggatggcatactgagtgcgtagtaatgagcacacgctatcttggagacgaatttgatatccacggaggaggtatggatttaaaatttcctcaccatgaatgtgaaatttcccaagccaggggactcaacaaaccatttgcaagaaaatggatccatacaaatatgctgacaattgatggacaaaaaatgagtaaatcctcaggaaattttgtttcgcttccggaattatttaaaaatttcgatcccttgatggtcgct

SEQ ID NO: 299132 - DNA, 526 bp, Unknown
  Bacterial polypeptide expressing nucleotide sequence isolated from the Sargasso Sea
catgctacatctttacaatacccgaacccgtgaaaaagcgaagtttgttccgcttcaagaagggaaagtgggtttgtatgtgtgtggtatcaccgtttatgacctgagtcatatgggtcacgcccgtacctacctaagtttcgatgttttagtacgctacatgcgccatcttggtttagatgtgaagtatgtgcgcaatatcaccgatatcgacgataagattattgctcgcgccaatgaaaatggcgaaagctttgaagcgctgactgcacgcactattgccatgatgcatgaagactttgcggcgattaacttactagagcctgacgttgagccgacagtaagtgggcatatggatgagatcattgaaatcatccagcgcctgatggacaaaggttatgcttatcaagcggcaagcggtgatgtgctatttgacgtaagcaagtatgaagattacggcaagttgagcaagcaagacctagatcaacttaaagcaggtgcccgagttgaaatagcggcaggtaaa

SEQ ID NO: 299133 - DNA, 796 bp, Unknown
  Bacterial polypeptide expressing nucleotide sequence isolated from the Sargasso Sea
gccttcaaatgaaagcgaaccatcttgggaatctccatggggaaaaggtagaccaggctggcaccttgaatgttcggttatgtcaaaaaagtttttaggtgataaatttgatatccatggtggaggaatggatttgatttttcctcatcatgagaatgaaatagctcaatcaagatgcgcaaatcaaaatgaagtttttgcaaattattggattcacaatgggttcataacaatatcaagtgaaaaaatgtcaaaatctcaaggtaacattttaaagataagtgattttaaaaataaaataagcggacaagttttaagactagctttagttagtgctcattataaacaaccattagattggaacgaaaaacttttatctgaatgcgaaaaaactatcaataaatggtacgatagttatatcaaaattaaaaaaccagttttaatacctaatgaatatcttgatccattatacgatgatttaaacacacctggttatattgcaaatcttcataaattatttgaaaaatctcaaaaaggatctgcaaaagataaagaaatttttgtttcagcatgtaattttattggcttactaaatgaaaatagatcttcatgggataaatttaaaaaaaataaatccaagatctccgaagaagaaattaaacttaaaattaatgaacgaaataatgctagaaaaaataaagattacaaaactgcagataaaattaggaatgaattattagataaaggagttttaattgaagacaaagatgataaaacgcagtggaaatttaaatga

SEQ ID NO: 299134 - DNA, 1033 bp, Unknown
  Bacterial polypeptide expressing nucleotide sequence isolated from the Sargasso Sea
gttacacagcgttttacaaaaatttatcaggaagacatgaatgccttaggtgtggaaaagccagatttagagccattggctacagagcatattcctgagatgattgaaatgatcgagggattaattattaaaggacacgcatatgagaatcaaggccatgtttttttcagtgtagagacttttgatgattatggtttcctttctaatcgaacagaagatgaacagatctcaggaacaagaataaaatcctcagaaataaaaaataatcaaagggactttgtactctggaagccatccactgggcaaactcctggttgggagagtccttggggttatggaaggcctggatggcaccttgaatgttcagcaatggcgaagaaatatttaggaaggacattggatatccatggaggcggaagtgatcttttgtttcctcatcatgagaatgaatgtgcgcaaagcatgtgctcacactcaggagaaccacttgcaaactattgggtccataatggaatgatcgatttcgataacgtaaagatgtcaaaatctgaaggcaatcttttgcttatacgagatcttctaaaagaaatcaggccagaggttatacgaatggcatttttaaccacacactatcgtaaaccaattaattggaatgatgcattgatcaatgattcagagaaaaagcttgatcgtctgtatggttcgatcagacaattgggaaagatctcaccaggagagccctcagaagaagtcatgaatgcaattgcggatgatatcaatacgcccaaggcactgagtgagctttttgccatagtaaaaaatatcaataatgcaaaatcagatgaagagtctagacaattggcatctattctcattgggtctgctcatttattgggtttgatgaatcaagatgcagaaaattggtttgaaaacatcgacgttgatgaggaattaattgatcgactcttgactgagagagaagcagcaagatccaatagaaatttgaacgagctgatcaaattagacaagagat

SEQ ID NO: 299135 - DNA, 925 bp, Unknown
  Bacterial polypeptide expressing nucleotide sequence isolated from the Sargasso Sea
ttgtggtccactggtttatgacgatccacatattggcaatgctagaccattagttgtatttgatatacttttcaaaattttaaaaaatcaatactcaaaagtaacatatgtgagaaatattacggatgtagatgataaaataataaaatcatcaaaggaaaataatattactattttagatcttacaaaaaaaattactcaaaactttaatgaagattgtatttatctaaattgtgaaaaaccaagccatgagcccaaagcaactgatcatatctctgagatgatagaaatgatcactgaattaattaaaaaaggatttgcgtacgaaaataagaagcatgtttattttgaagttaaaaaatttaatgattatgggaaattatcaaacaaaaaattagatgaattggttgcaggatcaagaattgaagtaagtgagaataaaaaaaatcctgaagattttgttctttggaaaccatctgaaacaaatgaaccctcatgggattcaccatggggcaaaggaagacctggttggcatttagaatgttcagcaatgtctaaaaaatatttaggaaatgaatttgatgttcatggaggaggtgtagatttattatttcctcatcatgaaaatgaaattgctcaatcaagatgtgcaaacgatagtaaagtgtttgcaaattattggttgcataatgcctttatcacaatgtccaatgaaaaaatgtcaaaatctcaaggtaacattttaaaaattaaagattttagaagtattaaaagtggtcaagttttaagattggctttaatgagtgcacattatcgacaaccacttgattggaatgataaacttttagaggactgtgaaaatacaattagtaaatggtataatgtttttttaaacatagaaacaaaacttaaaatttcagatgaa

SEQ ID NO: 299136 - DNA, 916 bp, Unknown
  Bacterial polypeptide expressing nucleotide sequence isolated from the Sargasso Sea
acaagaagtcgttccattcgaacctggcaaaattgtcaggatttatacctgtggaatcaccccatatgatgcaacacatatcggccatgcagccacatacatgacctatgacatcctgcagagacgtttgcgcgacctagggcatgaaacacgatgtgtaagaaacatcaccgatgtagatgatgatattttgcggaaagccagagagcttggagttcactatctagatctagctgccaaagaaactgcacgattcgatgaagacatgaaagcgctcgggatgctcccatcgtggtcagagcccagggccacatcagcgatagctgaaatacgtaagttcataggacaagttctaacgagtggtcacgcctacgaagtagatgggtccgtttatttcgaagtcaaatcatttgcaaaatttggctcactgagtgggctagaccgagaaacaatgttggagttagcggcggaacgaggagggaacccagaagatccaaaaaaacgagaccctctggactttgttctatggcaaccttcggctgacgatgaaccctcgtgggagagcaggtggggatatgggcgcccagggtggcatattgaatgttctgttcttgcaatgagagacttaggcacggctactatagacctgcatggagggggagccgaccttattttccctcaccatgagtgtgagagcgcccagtcagaagctgccactgggaaacaattttctagacattggatgcaccaagccatggttagaatggaaggggagaaaatgtcaaaatcattgggaaatcttgtcttcatctctgatcttccgaaaaagtttcacccaaatgtgatcagactaggcctacttaacttttcatatcgcgattcttgggagtggaacgacgaaataatggcatctgcg

SEQ ID NO: 299137 - DNA, 577 bp, Unknown
  Bacterial polypeptide expressing nucleotide sequence isolated from the Sargasso Sea
atggatatttatttaacaaataatttaactaataaaaaagaacggtttgttcctcgaaataataaagaggtaggaatgtatgtttgtggcccaactgtttatgatgatccccatattggaaatgcaagaccattagtcatatttgatattttatttagaatacttaagaataaatttaaaaaggtaaagtatgtaagaaatattacagacatagacgataaaattattaaatcatctcaagatcagaatatatctacaaaagaattaacagaaaaaataacaaaaagttttttagaagattgttcttatctaaattgtgaaaacccatcgcatcaacctaaagcaactgaacatatagatttaatgatcgaaatgattagtgaattattaaaaaagggctttgcttatgaaaataataaacacatttattttgaggttaaaaaattttcagattatggaaagttatcaaataaaaaattagaagatttgatagccggttcaagggttgaaataagtgataataaacaaaattctgaagatttcgtattatggaaaccctcaaaatatgatgaacctt

SEQ ID NO: 299138 - DNA, 838 bp, Unknown
  Bacterial polypeptide expressing nucleotide sequence isolated from the Sargasso Sea
aatgattgagatatacgattcttatacaaagtcatataaagaagtaactaacaaaaatataaatatgtatgtctgcggtataaccacttcagacttttgccatttaggtcatgctttctcatcagtttcttttgagatattagatagattcttaacatctaaaggttacaaagtaactagagttcaaaacttcacggatgttgatgacaagataattacaaaatctatttcagaaaatttgaccccagaagaagtttcagaaaagtatataaatgcttttttcgaagatatggatgcgcttggggttaagagagctaactcttacccaaaagctacagatgaaatagggaatattattagttttattgaaaaattagaaaaaaaagattttacttaccaaattgatggtagtgtttatttcagagtgagcaaatttaagaattatggaaagctaagctctagaaaactctcagattcgatatcaggaacaagagtaaacgaaaatttaaaaaaagaatctgatgaagattttgctctctggaaatcatccaagtctggtgaaccattttgggattcaccttggggaaaaggaaggcctggctggcatatagaatgcagctcaatggtgttaaattccataggtaattctgtagatatccatggtggaggaatagatttaatctttccgcatcatgaaaatgaaattgctcaaagtgaatcattaaacgaaaagaaatttgcagatatatggatgcataacggaatggtaaagatagctggtgaaaaaatgagtaaatcattaggaaatttaatcaaattaaaagacgccattaaaata

SEQ ID NO: 299139 - DNA, 607 bp, Unknown
  Bacterial polypeptide expressing nucleotide sequence isolated from the Sargasso Sea
atggatatttttttaacgaataatttaacaaatcaaaaagagcaatttgttccaaaagataaaaaaaatgttggaatgtatgtgtgtggaccaactgtgtatgatgacccacatattggtaatgcgcgaccactagttatttttgatatcctttttaaattacttaaaaatactttttcaaaagtaacgtatgtaagaaatattactgatatagatgataaaattataaagtcttctcaagatcaaaaaatatctacaaaagaacttactgaaaaagtaacatcaaatttttttcaggattgtaagtttttgaattgtgaaaatcctactcaccaacctaaagctactgaacatattgatttaatgattgaaatgataaatgaattaatcaaaaaaggttttgcttatgaaaataataaacatgtttattttgaagttcagaagttttctgaatatggaaaattatccaataaaaaattagaggatttaatagctggatcgagagtagaaattagtgagaataaaaaaaattcagaagattttgttttatggaaaccttcaaatatagatgaaccttcatgggattctccttggggaaaaaggtaga

SEQ ID NO: 299140 - DNA, 997 bp, Unknown
  Bacterial polypeptide expressing nucleotide sequence isolated from the Sargasso Sea
gtgacccttgaagagggcaaggttggcctatatgcatgtgggattaccccttactcgcctagtcacattggtcatgctagacaggctatttcattcgacatcatagtaagatggctgcgcaagaggggcttcgaagtcaattatgtcacgaatttcacggatgttgatgacaagattatctcggctgccaatgaagaaggtgttgacttcctagaaatttccaacagatacatcgacgactacttcgaatctatggatgccctgaacgtaattagagcggatgcatacccaagagtaaccgaaactattccggaaataatcgagatggttgagtcacttattgagaagggcaatgcgtacctagccgaggatggggtatacttcgaaattgatacttccccagagaagtatggtcagctcacgggccaaaccctggaaatggtcagatccggggctggtgggcgggtcgataaaaccggttctggaaagagggaccatagggacttcgctctatggaagatggcgaagcctggagagccttcgtgggagagcccgtggggagaggggagaccgggttggcatattgagtgctctgcgatgtcactcaagcatcttggagagaggttcgacatccatggaggcggttccgatcttattttcccacaccatgaggccgagattttccagtcagaatgctgtctagggcacgatccagtggtgcagtactggatccataacggcatggtgaacgtagatggagagaaaatgagcaagtcattgggtaacttctggacaatatcggaggcgttggagaatgttgacccccttgtattgagatacactctgataaacgccccttatcgtcagccagtagacttcaatcagataatgatagacgactcgaagattcatcaccacagacttgtagcgtgctacggagaaggacttgcgaagaaaggaagcgtggactggcggggattctcttggtggaagaagc

SEQ ID NO: 299141 - DNA, 747 bp, Unknown
  Bacterial polypeptide expressing nucleotide sequence isolated from the Sargasso Sea
aaggtagaccaggatggcatttagagtgttcagctatgtcaaaaaaattcttaggtaacgaatttgatattcatggtggagggatagatcttatttttcctcatcacgaaaatgaaatagctcaatctagatgtgccaatgatacaaaagtttttgcaaatttttgggtgcacaatgcttttattactatgtctaatgaaaaaatgtctaagtcacaaggtaacattctaaaaataaaagattttagaaataagattagtgggcaaataatcagattggctttaatgagtgcacattataagcaaccattagattggaacgataaattattaagtgattgtgaaagtactctagataagtggtataaagtatactcatctgatcttaaatctgtcaaagtttcagacgaaattctaagaccactttatgacgatttgaacacacctggatatatagccaaccttcacaagttattcgaaaaagctagcaaaggtgaaaacatagacttatttgtttcggcatgtaaatttattggtttgatgaatgaaactggcgagcaatggaatgaatttaaaaagaaaagagtatctataaccgagtctgaaattaaaaatatgcttagtttaagagataaagctagagaaaataagaactataaagaagctgatagaattagagatgagctcttagacaaaggtgttttaatagaagataaagatggtaaaacactctggaaatttaaatgag

SEQ ID NO: 299142 - DNA, 868 bp, Unknown
  Bacterial polypeptide expressing nucleotide sequence isolated from the Sargasso Sea
ccgccagatcttcaaccaagggcgactgagcatatccctgagatgatagatcagatcaaggctcttatcaaaaatggtcatgcatacgaggcagaaggtcacgtattatttagtgtaaatacctttcctggttatggttcgctttctgggagagataaggaagagcagattgcaggaagcagggtagaggtagcaccctataaaaaagacccaatagattttatactttggaagccaagcatagaagatcagccaggctgggactctccatgggggtttggccgtccagggtggcatcttgagtgttctgcaatgtcggagaagacgttaggggtaccatttgatattcataccggggggcaggatcttcttttccctcatcatgagaatgagttggcgcaatgctgcggagttcaaaataaacttgatgacataagctcctatgcccggtattggatacataatggtatgatcaggtttgatggagataaaatgtcgaagtcacttgggaatatacaattcatcaatgatctgcttaatgatcacaatggagagactctaaggttggtgcttatgtcaacgcactatcgacagcctcttaactggtcagcgaaaaccattgaccagtcaaagaaaacactcgatagattataccgaacaataaaaagtctaaatatttcattagataatactaatgcaaaaccagctcgggaggttattgatgcactttgcgatgacctaaataccccggaagccttagggcagtttaaccttttaataaaagatctagaggatggtgaagaaagccaaaaagaagaaaaactagccataataatttctacagctagaatgcttggtatgctccaaa

SEQ ID NO: 299143 - DNA, 846 bp, Unknown
  Bacterial polypeptide expressing nucleotide sequence isolated from the Sargasso Sea
aatgctttacgacacatttaccaattcaaaaaagaagtttgaaccaattgatccaaataatgttcgaatgtacgtttgtgggccaactgtttatgattatgcgcatgtaggcaatgctcgcccagtgatagtgtttgatattttatttcgattacttcaaaagatttatggcagtgaaaatgtaacttatgtaagaaatattactgatgttgatgataaaattatacacgcagcaaatgatcaaaaagaagacattggaatacttacagaaaagacaattaattattttcatgacgatgcgaaatatattggtgctttaaaacctacatttgagccaagagcaactgaacatatacctgagatgatcgagttgattgaaaaactcatatcaaaagagtttgcatatgaagcggatggtaatgttcttttttcttcaaataaatttaaagaatatggaaaactctctggcaagaatttagatcaaatggttgctggttcacgcgtaggtgtagaaagttataaaaaagaagagtctgactttgtattatggaaaccttctaaagaagatgagcccagttggaaaagtccatggggagatgggagacctggctggcacattgaatgttctgcaatgagtgaaaaacttttgggggaaaattttgatattcatggtggaggccaagatttaatatttccacatcatgagaatgaaattgctcaaagtgagtgtgcaaataataacaaatttgcaaattattgggttcacaatggctttgttactgttgagggtaataaaatgtcaaagtctgatggtaattttgtaactgtaaatgagttaaaagacag

SEQ ID NO: 299144 - DNA, 892 bp, Unknown
  Bacterial polypeptide expressing nucleotide sequence isolated from the Sargasso Sea
atgagcgaaatctatttatacgattctttatcaaacaaaaaaagaaagtttgagccaatagatcaaaatcacgtccgcatttatgcttgtggacctactgtgtataactatgcacatattggtaacgcaaggatggcggtagtttttgattcttttgtaagactatttagaaataaatattcaaatgttacatatgtatcaaacattactgatatcgatgacaagataattgaagctgcaaatgaatcaaatatacctattaacgaactgacaaagaaatatacagatatctataatgcagatatgtctaatttgaatgtccttcctccagacattcagccaaaagcaacagagtatgttgaggacatgattaattttattgataaattaatcctgaatgataaagcttatgaaaaagatggccatgtatttttcaatgttccttcctatgggggctatggaaaattatcaaatagagagatagatcaacaacttgctggcagtagggtgcaagtttccgatatcaaaaaaaatcaacaggactttgttttgtggaaaccatcaagcggaaatcagcctggatgggaatctccatggggtattggaagaccgggatggcatacagaatgttgtgtgatgtctgaggtaaatctaaaaataccttttgatattcatggtggtggacaagacttactctttcctcatcatgaaaatgaaattgctcaatcttgtgcaagcgttaattctgataatcctgaagattatgctaagtattggatacataatggttttgtgactatagatggagaaaaaatgtcaaaatctcttaataatattattcttctaaatgatcttttaaaagaacatgatggagaaacaataagactagcgc

SEQ ID NO: 299145 - DNA, 481 bp, Unknown
  Bacterial polypeptide expressing nucleotide sequence isolated from the Sargasso Sea
atggatatttttttaactaataatttaacaaataaaaaagagcaattcattccaaaaaataaagaaaaaataggaatgtatgtttgcggacctacagtttatgatgacccacatattggtaatgcaagacctttagttgtttttgatattttgtttaaattactaaaaaataatttttcaaaagtaacctatgttaggaacataactgatattgatgataaaattataaaatcgtctcaagaacaaaaaatttccacaaaagaacttacagaaaaagtaacttcaagttttttaaaagattgtgaatttttaaattgtgaaaatccaactcatcaacctaaagctactgaacatatagatcttatgattgaaatgattgctgagttgatcaagaaaggttttgcttatgaaaatcaaaaacatgtgtattttgaggtaaaaaaattttctgattatggaaaactatcaaataaaaattgga

SEQ ID NO: 299146 - DNA, 573 bp, Unknown
  Bacterial polypeptide expressing nucleotide sequence isolated from the Sargasso Sea
aatgaagaataatcagcttaacttatcaaatactataacaggcaaaaaagaaacgtttgtaccaattaatccaaaaaaaattggaatgtatgtttgtggccccactgtttatgattttccacatgtaggtaatgcaagacctttagtcgtattcgatgttttgtatagagttttatctaaaatctttggaaaaactaatgtcacttatgtcagaaatataactgatatagacgacaaaattatagaaagttcaaaaaataaaaaaatatcaatagaagaacttactaaaacaattacaaaaagttttcatgatgattgtaaatatttaaattgtttaaaaccaacttcagaaccaaaagctacagaacatattaaaggcatgataactatgactgaaaatctcttaaaaaataatcatgcttatgagaaagataatcatgtatatttttcaataaattcgtttaaaaattatgggaagttatctaaaaaagatcctggggaattagttgcgggctcaagagtagaggtttctaaattaaaaaaacatcctcttgattttgttctttggaaacc

SEQ ID NO: 299147 - DNA, 906 bp, Unknown
  Bacterial polypeptide expressing nucleotide sequence isolated from the Sargasso Sea
tattaaaatgcaagttcggcgaaaacaatgttacttatgttagaaatataactgatatagatgataaaattataaaatcatcaatagaaaaaaaaatatcaacaaacaaattaacagaagatattaccaagatatttcaccaagattgtagctatttaatttgtgaaaaaccaacttacgaacctaaagctactgaaaatatttctttaatgatagaaatgattagtaaacttgttcaaaatggacatgcatatttgaataatcaacatgtttattttgaagtaaaaaaatttaaagattatggaaaattatcaaataagaatttagatgatttaattgctggatctagagtggaagtttctgaaaataaaaagaatcctgaagactttgttttatggaaaccatcaaaagaaaatgaaccttcttgggaatctccatggggcaaaggaagaccagggtggcatttagaatgttctgtaatgtcaaaaaaatatttaggggataagtttgatattcatggaggaggtagagacttaatatttccacatcatgaaaatgaaatagctcaatctagatgtgcaaataaaaatgaaacatttgctaattactgggttcataatggttttattacaatgtctaatgaaaaaatggcaaaatcgcaggggaatattttaaaaattagtgaattaagaaataaattgaatggtcaagttttaagactggcattaatcagtgcgcattataaacaggcattggattggaatgataagttaattaaagaaagtcaaaatacaataaacaaatggtacgaatgttatgttgagcttaaaaaaaaagttttaattcctgaagagattttaagtcctctttatgacgatttaaatacacccaggttatatagctaat

SEQ ID NO: 299148 - DNA, 286 bp, Unknown
  Bacterial polypeptide expressing nucleotide sequence isolated from the Sargasso Sea
aatgagtaaagatatttttttaacaaataacctaacaaataaaaaagagaagtttgttccactagataaaagtaacattagaatgtatgtgtgtggtccaaccgtttatgatgatccccatattggaaatgcaagaccaatagttgtatttgatattctatttaaaatttttaaaaaaaattatcctaaagttacttatgtgcgaaatattacagatgtagatgataaaattattacatcttcaaaagaaaataatattttaatttcagaattaacaaataaggta

SEQ ID NO: 299149 - DNA, 501 bp, Unknown
  Bacterial polypeptide expressing nucleotide sequence isolated from the Sargasso Sea
aatgaagaataatcaacttaacttatcaaatactataaccggcaaaagagaaacatttgtaccaattaatccaaaaaaaattggtatgtatgtttgtggtcctactgtttatgattttccacatgtgggtaatgcaagacctctagttgtatttgatgttttgtacagagttttgtctaaactttttggaaaatcaaatgttacatacgtaagaaatataactgatatagatgataaaattatagaaagttcaaaaaataaaaaaatatcaacagatgaacttacactgtcaatcacgaaaagttttcatgatgattgcgtgtatttaaattgtttaaaaccaaatctagaaccaaaagcaactgaacatatcaaaggcatgatcactatgaccgaaaatcttttacaaaataatcatgcttacgaaaaagataaacatgtatatttttcaataaactcatttaaaaattatggcaaaatatcaaaaaaaaatcctgagga

SEQ ID NO: 299150 - DNA, 715 bp, Unknown
  Bacterial polypeptide expressing nucleotide sequence isolated from the Sargasso Sea
gtcaaaaaagcttcttggaaatgagtttgatattcatggaggtggtatagacttattgttcccacaccatgaaaacgaaattgcacaatcaagatgtgcaaatgatacaaaagtttttgcaaattattggttacataatgcattcataacaatgtccaatgaaaaaatggctaaatcgcaaggaaatattttaaaaataaaagattttaggaataagataagtggtcaagtattaagattggctttaatgagtgcacattataaacaacctttggattggaatgataaacttttaaatgattgtcaaaatactattagtaaatggtataatgtttactcatccgataatcagaaagaagaagttgatgatgatattctaaaaccactttatgacgatttaaatacaccaggctacattgccaaccttcataaattgtatgagaaagcacaaaaaggtaattcgactgacaaagcattatttacctctgcatgtaattttgtaggtttattaaatgagacagaaatcgaatggctagaatttaagaaaaataaactttcaataaatgaagctgaaattttagataaaattaagcaaagaaataaagctagagaagataaaaactataaagaagcagataaaataagagatgagcttttcaacaaaggtgttttaatagaagataaagatggtaaaaccacgtggaaatttaaatga

SEQ ID NO: 299151 - DNA, 366 bp, Unknown
  Bacterial polypeptide expressing nucleotide sequence isolated from the Sargasso Sea
gatgatcaaactttttaatactttaagcaaaaaagttgaggtttttaagcctattgatgatgtagtaaaaatttattgttgtggggtaactgtttatgatttatgtcatcttggtcatgccagaagttatatcgcttgggatgtattgagaagatttttaatttacagtgatttcaaagtgaagtatgttcaaaattttacagatattgatgacaagatcttaaaaagagcgaaagaagaaagcagttcaatgaaggaagtatctgaaaaaaatatcattgaatttcataaagatatggattctttagggataatgcgtccggatagcatgccaagagcaacgaatcatatatgcaatatctgctc

SEQ ID NO: 299152 - DNA, 893 bp, Unknown
  Bacterial polypeptide expressing nucleotide sequence isolated from the Sargasso Sea
agatgaaatgatagatggcgctagggtagaggttgcggaatataaaaagtctcctcgagattttgttttatggaaaccatccgataacgatagttttggctgggatagtccctggggatacggaagacccggatggcatatcgaatgtacttctatgataaaaaaaattattggagatgattgtactttagatatacatggtggtggtaatgacttgatattccctcatcatgaaaatgagatagcacaaggatcatgcatttcaactagcaaatattgtaactattggtttcataacggtattgtgcttgttaataaaaagaaaatgtcgaaatcattagggaatgtcattttattagatgatttgcttaaagaacatagctcgtccgtgattcgtttagctttactatctgcgcattatagacaaccgcttaattggacagaacaaactattatcaatgcaaaaaatctgtataaaaaattagtatcagcagttggtataatcactgaagatatgtcttattataaagcagggactacccaactacctttttcacaatgcgatgaaattcaagatatactctctgatgatttaaatacacctgaagtaattaattatctttctagattagcaaagacagctcgaaataattctgatgatgcaatgaaactagcacaatcaatgaaatttattggattagatttggcaaaaccctcttacaagaattttccagatgataaagacataattaatcttataaaacaaagagacgaatatagaattaaaaaagactttaagagtgccgatgaagtgagagacaagcttttagatatgggcgtagaattgcgagattcagatggcaaaacaacttggaagtattctgaggattaat

SEQ ID NO: 299153 - DNA, 565 bp, Unknown
  Bacterial polypeptide expressing nucleotide sequence isolated from the Sargasso Sea
atgaataaagatatatttttatcaaatacccttggtggtaaaaaggaaaaatttgttccaatgaatgaaggtaaaattggaatgtatgtatgtggtcccactgtatatgatgatccacatattggaaatgcaagaccactggttgtatttgacttattattcaaaattttaaaatgcaaatacggaaaaaagtctgtaacatatgttaggaatataactgatgttgacgacaaaataattaaagcctcagtagaaaagaaaatttctatatcagatttaacaaataaaatttcaaaaaattttcacgatgattgtgtttatttaaattgtgaagctcctacacatgaaccaagagctactgaaaatataaacttaatgattgaaatgataaaggaattaataaaaaatggttttgcttacgaaaacgaaaaaaatgtttactttaaggttagagaatataaagagtacggaaaactatcaaataaaaatttagaagatttaatagcaggctcaagagtagaagtttcacaaaataaaacaaatccagaagattttgtattatgaa

SEQ ID NO: 299154 - DNA, 733 bp, Unknown
  Bacterial polypeptide expressing nucleotide sequence isolated from the Sargasso Sea
aaagaaatatttgtacctattgatgacaaaaaaattagaatgtatgtttgtggaccaacggtatacgatgatccacatattggaaatgctagacctttagtaatatttgatattttatttaaagttcttaaatgcaaatatggtaacaaaaatgtaacttatgtcagaaatattacagatattgatgacaaaattatagaagcatcaaaaaataaaaaaatttcaattaaagagcttacagaggatattataaatagatttcatcaggattgtgattatttaaattgcgataaaccaacttttgagcctaaagcgacagaaaatatagctttaatgataaatatgattgaaaatttaattaataaaaatgttgcatacgaaagtaatcaacatgtttattttgaagtaagtaaatttgaagattatggaaaattatcaaataaaaaacttgatgaattaattacaggatcaagagttgaagaaagtgaaaataaaaaaaaacaggaagattttgttctatggaaaccatcaacagaagatgagcctggatggaaatctccttggggaagaggacgtcctggctggcatttagaatgttctgttatgtcaaaaaaatatttaggtgataaatttgatatacatggtggtggaagagacctaatttttcctcatcatgaaaacgaaattgctcaatcaaaatgtgcaaatgatacggatgtattttctaattatt

SEQ ID NO: 299155 - DNA, 386 bp, Unknown
  Bacterial polypeptide expressing nucleotide sequence isolated from the Sargasso Sea
catgagtttgcgcatctacaacacgctgtcgcgtgcgttggaggacttttccccgctcgaacctggccatgtgcgcatgtatgtgtgcggcatgaccatctacgacctgtgccatatcggccatgcccgcatgatgatggcgtttgacgtggtgcagcgctggctcaaggccagcggcctgcgcgtgacctatgtgcgcaacatcaccgacatcgacgacaagatcatcaaacgcgcgctggagcggggcatcaccatccgtcagctcaccgacgagatgattgccgcgatgcacaaggacatcggcctgctgggcatcgagccaccctcggtggagccgcgtgccactgaatacgtgccgcagatgctctcgctgatcggccagc

SEQ ID NO: 299156 - DNA, 745 bp, Unknown
  Bacterial polypeptide expressing nucleotide sequence isolated from the Sargasso Sea
atgcctgaattacgcctccacaacaccttcaccggagccaaagaggtgtttacgcctcgggaccgcgagcgtgtgaccatgtatgtgtgtggacctacggtctacaactacgtgcacattgggaacgcgcgtccggtgctggtgttcgattgtctttaccgcctgttaagcgcgctgtatccgcaggtggtgtacgcgcgcaacatcaccgatatcgacgacaagattattgacgtagcatcacagcgcggcacggatattactgcagtcagcaaggaattcacgcagaagtatcgagaggacatggcggcgctcaatgcgctcgcgcctacgattgagccgatggcgacagagcacatcgaggacatgattgtgttgacggagcgactgatcgccgatggacacgcctatgaggccgacggccacgttttgttcgcggtcgagtccatgcccacctatggtgagctcagtgggcgaaagcttgaggacatgatggcaggcgcgcgggtcgaggttgctgattacaagcgccatcctggcgattttgtgctctggaagccttctactgatcaagagccagggtgggacggcccctggggctatggacgaccgggttggcacctcgaatgctcggcgatgattcgagcgcacttgggggaggctatcgatattcatggcggcgggcgcgaaatcatttttcctcatcacgagaacgaacgagcccaaagttgctgtgcctatggcg

SEQ ID NO: 299157 - DNA, 783 bp, Unknown
  Bacterial polypeptide expressing nucleotide sequence isolated from the Sargasso Sea
taattacttaaattgtgataatccctcacatcaacccaaagctacagagcatatagatataatgattgaaatgatttctgagttaataaaaaaaggatttgcttatgaagaaaatcatcatgtgtattttgaagtaaacaaatttaaagattatggaaaactttcaaataaaaatcttaatgaattaattgctggatcaagagttgaagtaagtgataataaaaaaaattcacaagattttgttctgtggaaaccttctaaagatgatgagccttcttgggagtcaccttggggcaaaggaagacctggttggcatttagaatgttctgctatgtcaaaaaaacttcttgggaatgagtttgatattcatggaggcggtattgacttattgtttcctcaccatgagaacgaaattgcacaatcaagatgtgcaaatgacacaaaagtttttgcaaattactgggtgcataatgcattcataacaatgtcgaatgaaaaaatggctaaatctcaaggaaatattttaaaaataaaggattttaggaatagggtaagtggtcaagtattaagactagctttaatgagtgcacattacaaacaacctctagattggaatgataaacttttaaatgattgtcaaaatataattagtaaatggtataatgtttattcatctgattatcaaaaagaagaagttgatgatgaaattctaaaaccactttatgacgatttaaatacaccaggttatattgctaaccttcacaaattgtatgagaaagcaca

SEQ ID NO: 299158 - DNA, 784 bp, Unknown
  Bacterial polypeptide expressing nucleotide sequence isolated from the Sargasso Sea
aaaaagaatcaaaaggactttgttttatggaagccatctactggggatactcctggctgggaaagtccgtggggttttggaaggcctggatggcacctcgaatgctctgcgatggcaaaaaaatatcttggaaaaacattagatattcacggaggcggtagcgatcttctgtttccacaccatgaaaatgaatgtgcgcagagcatgtgctctcattcagggaagcccttggcaaactattggattcacaatgggatgatcgattttgataacgtaaagatgtcaaaatctgagggaaaccttttgcttattagagatcttctaaaacaaattggaccagaggtcattcgcatggcatttttaacaactcactatcgaaaacctatcaattggaatgatgctcttatcaccgattctgagaagaagctcgatcgcttatatggttccatcagaaagctaggtaaagtttcaccagcagaaccaacagaagagatgatcaatgcgcttgcagatgacattaatacacccaaggccttaagtgagctatttgccattgcaaaaagagttaataatgcaaaatcagaaaatgaatccaagcagcttgcatcgacacttgttgggtctgcaaatttattgggtttgatgaatgaagatgctgaaaagtggttcgaaaacattgatgtagatgagaaattaattgaccgactcttaaatgaaagagaggcagccaggtcagataaagatttcgagaaggccgatcagattaggcaggaaatcgagtcac

SEQ ID NO: 299159 - DNA, 772 bp, Unknown
  Bacterial polypeptide expressing nucleotide sequence isolated from the Sargasso Sea
aatgataaagctttataattcactaacacaaaaaaaggaagaattcgtacctattcaaaagggcaaggttggattatatacttgtggacctactgtatatgacttttcacatataggtaacttcagaacctttctgtttgaagatcttctcaagagagttttgttggcattcgattataaggtgcaccatgtaatgaatattacagatgtagacgataaaactattaaaaaggcaaatgatgaaaaaaaagaactaaatgaaattacaaataaatacactaatgcttttctaaatgactcaaaatcactaagaatcttagaagcggatgactacccaaaagcaacggatcacatagctgaaatgattcaaatgattgaagttctcgttagtaaaaaatttgcttatatatcaaaagatggttcagttttttttaaaatttcaaaatactctgattacggaagattagtaaatttatcaaattcaacaatattaaatgtacagcaattgtccgatgaatatgatttagacagtgtaaatgattttgctttgtggaaatcgcataaaaacaatgatggaaaagtggcatgggattcaccttggggaaagggcaggcctggctggcatattgagtgctcagccatgtcaacaaagttccttggggctcattttgatattcattgtggaggtgtggataataaatttccacatcatgaaaatgagctagcacaatctacatgctctctaaatactccatttgtaaattattggctt

SEQ ID NO: 299160 - DNA, 553 bp, Unknown
  Bacterial polypeptide expressing nucleotide sequence isolated from the Sargasso Sea
aatgaataaagatatttttttaacaaatagccttggcaataaaaaggacaaatttataccaattgatccaaaaaaaattggtatgtatgtctgcggaccaactgtttatgacaatccacacattggaaatgcaagacctttggttgtatttgatattttgtttaaaattttaaaatgtaaatatggaaaaaattcagttagttatgtaagaaatattacagatatcgatgataaaataatatcttcatcaatcgaaaaaaatgtttcaattggtgaccttacaaagaatattacaaatatttttcatcaagactgtaaatatttaaattgtgaagctcccactaaagaacccaaggcaactgaaaatattttattaatgattgaaatgattaataaacttattcaaaataaatttgcatatgagatcaagaaccatgtttattttgaagtaaaaaaatttaaagattatggaaaattatcgaacaaaaatctagatcagttaattgcaggagcaagggttgaggtgtcagaaaataaaaaaaaatccagctga

SEQ ID NO: 299161 - DNA, 898 bp, Unknown
  Bacterial polypeptide expressing nucleotide sequence isolated from the Sargasso Sea
gtatcgagttttaaagattacggaaaactatcaaataaaaatgttgatgaacttttcgcaggagctagggttgaggtatcagaaaataagaaaagacctgaagattttgttttatggaaaccatcaaccgaggacgaacctggatgggattctccttggggaagaggtagaccagggtggcatatagagtgttctgcaatgtcaaaaaaatttcttggagacacatttgatatacatgggggaggacgtgacttattatttccgcaccacgaaaatgaaatagctcagtcaagatgtgcaaatgaaaataaacctctatcaaattattggatacacaatggttttattacagtctcaaatgagaaaatggcaaagtctcagggaaatgtttttaagataaaagatttttatgaaaagtataatggtcaagttttaagattagcattaatgtcaactcattataggcaagcaatggattggaatgaaaatttgttaacacaatcaaaaaaaactttagataaatggtacgagtgccaaaaaaaaccagaaggcaaggtgttaataccagatgatgacttagctcctctctatgatgatttaaatacacctggatatattagcaacattcacaaattatatgataaagctgcaaaaggatctgaaaaagataaagaaatttttacaacagcatgtaattttattggtcttttaactgagccaaaatcaaaatggctagagtttaaaaagaatattttagaaatttcagaggaagagattttgcaaaagataaaagacaggaacacagctagagataacaaaaattaccagttagctgatgaaataagaaacgaacttttagacaaaggtattttaattgaagataaagatgataaaacaa

SEQ ID NO: 299162 - DNA, 576 bp, Unknown
  Bacterial polypeptide expressing nucleotide sequence isolated from the Sargasso Sea
tatggccctttatctctacaacactttaagccgctcgagcgagcttttcgaacccgctgatccagcgagcgtgacaatgtatgtgtgtggcccgaccgtgtacagctttcctcacataggtaacgctcggcccgccgtcgtcttcgacgttctcgctcgtattctccggcggaaatacaaattaatctatgcgcgtaacgtcacggatgttgatgacaaaattttcgccgcagcgaaggctgagaaaatcgagatcggcgtgctcacggcgcgctaccttgcttcttatctagaggatatggcgctgctgggcgttcaaccccctgacgtctcaccacgtgtgacggagcatattccgcaaatcattaattttatcgagcgcttggtagccagtggccacgcttacgaagcggaaaagcatgtgctgttctcagtggcaagctactccgattacggccatctatccgggcgtgcactcgacgaattgatagcgggtgttcgcgtcgatattgccccgtataaaagagagcctgctgattttgtcttgtggaaaccatctgcgcctgatgttgtcgg

SEQ ID NO: 299163 - DNA, 830 bp, Unknown
  Bacterial polypeptide expressing nucleotide sequence isolated from the Sargasso Sea
tagctctaaagagaaatttaaacctcttcgaaaaaattcagtgggaatgtatgtatgtgggcctacagtttacagcgatgttcatcttggcaactgtagaacattcatttcatttgatattatttttaggtaccttgaacatattggatacaatgtaagatatgtaaggaacataactgatgttggtcatcttgaagacactggtgaagacaaaatatcaaagaaagctaaaattgaacaactcgaaccaatggagattgcccaaaaatatacaaatagctttaaagatgttctgaaaaagtttaatgtattgaatcctagtattgaacctattgcttcaggacatattactgaacaaatttctataatagaagacctattagagaaaaatcttgcctacatttcaaatggctccgtgtattttgatatttcaaagtataatgaaattgactcctatggaaaattatcaggcagagacttggataaaattaaatctaactcaagaaatcttaacagtcaagatgataaaattaatgagtttgattttgccttatggaaaaaagctgataaaaaccaccttatgaagtggaattctccctggagtattggatttcctggatggcatcttgagtgtactgcaatgagcaataaatatcttggtgatgaatttgatattcatggaggtggaatagacttaaagtttcctcaccacgattgtgagattgctcaagcagttggatatactggaaaacaaccagctaagttttggattcatactaatatgttaacattaaatagtaaaaaaatgtctaaatctttagataacaaca

SEQ ID NO: 299164 - DNA, 685 bp, Unknown
  Bacterial polypeptide expressing nucleotide sequence isolated from the Sargasso Sea
tttgactaacaaaaaagaacattttgttccttttaataaaaaaaatgtgggtatgtatgtttgtggaccaacagtttacgatgacccacatattggtaacgctagaccgttagtaatttttgatatcctttataaattactaaagaataattttacaaaagttatatacgtaagaaatattactgacatagatgataaaataattaaatcttcaaaagaacaaaaaatttcagtaaaagaattgactaaaaaggtaactaaaagttttttagaggattgtaagtttttaaattgtgaaaatcctacttatcaacctaaagctacagaacatatcgatttaatgattgaaatgattaataatttaatcataaaaggatatgcttatgagaacaaaggtcatgtttattttgaagtaaaaaaattttctgattatggaaatttatcaaataagaaaatagaagatttgattgctggatccagagtagaaataagtgaaaataaaaaaaattctgaagattttgtgttatggaaaccttctaacgaaaatgaaccctcatgggagtctccatggggaaaaggtagaccaggatggcatttagaatgctctgcaatgtctaaaaagtttttaggaaatgaatttgatattcatggtggtggtatagatttgatttttccccatcatgaa

SEQ ID NO: 299165 - DNA, 920 bp, Unknown
  Bacterial polypeptide expressing nucleotide sequence isolated from the Sargasso Sea
gcacttggcgttaatcttcctgatattcaaccaagagcaactgatcatattaaagaaatgatcgaattaataaaaagattagtagatgaaaataaagcttatgaaaaagagggtcatgttttatttcatgtacctagttttgataattatggaattctttcaaaaagaaatagagatgaacaaatagctggaagccgtgttgaagtggcaccgttcaaaaaagatcctgcagattttattttatggaaaccatctccctcacccttacctgggtgggattcaccttggggatttggaagaccaggatggcatttagaatgctctgttatgtcagaaaaatcattaggccttccttttgatatccatagcggcggtattgacttggtgtttcctcatcatgaaaatgaaatagcacaaacttgttccatatcagaaaataaagatcctaaagattttgcaacttattggtttcataatggatttgttaatgttgagggagaaaaaatgtcaaagtcaattggcaatattaaactcgttcatgatctcaataaaaaatacaagggagaggttttgcgattaacattgttatcagctcattacaaacaacctttgaactggacagaagaaatcattgaacaaaatagcaaaatgatagatcgactttatagagttctgttagaactatcagaagtgaaagcagattttaagttaccttctgattctataatggaatcatttctagatgatttgaatacacctaaagtcattgcaaaacttaatgaagaggcaaatgatgcttcatctgcatctgatgaaagaaaaaaagaaatcaaaaaaaatcttctttctgctggtaaaatattaggtattcttgaagatgatccaggaaattggttaggctattatcaaaaaaatactga

SEQ ID NO: 299166 - DNA, 847 bp, Unknown
  Bacterial polypeptide expressing nucleotide sequence isolated from the Sargasso Sea
ataataaaattaatagatgacctaattgagaatggatatgcatatgcaacacaatcaggtgtttattttgaagttggtaaatataaagattatttaaaattatcgggcagaaataaagatgaagtcatatctgggaccaggattgatttagagtctgataagaaaaacacagaagattttgcactatggaagatttctaagaaaaatgaaccttcatggaattctccatggggtgatggtagacctggatggcacattgaatgctctgccatgatacataaaatattcaactcaggtattgatattcactgtggtggcaatgatttaatttttccccaccatgaaaatgagcttgcacaatcagcagctgcatttgaaaatcaactatttgtaaaatactggttacataatgggatgataaatctttccggacaaaagatgtctaaatctgaaggcaatataaaacttcttaatgaatacatagataagtttgggggaaacgttattagatttttctttttaagatcacattatcgaaagccacaggagttttcagaaggattattggaagagtcaaaaacaacatttaaaagaatacaagatttcactagtagtgttgaggctaatccttcagatgtatcagttattgaaatatttaaaaattctatgaatgatgatttaaactcacctaagtttttaggagaaatcttcgaaaaaatgaataatctaagcaatttcgatgaatatgaagagaaaaatttaaaagaaactatcaaatttatatttgaagtcttaggttttaacttcgatatccaagatagtaaaaaaataaatcacgaagactttt

SEQ ID NO: 299167 - DNA, 565 bp, Unknown
  Bacterial polypeptide expressing nucleotide sequence isolated from the Sargasso Sea
aatgaatagcttaaaattaacaaattctctaacaaaaaaaaaagaagtatttaagccaaataatttaaaaaagatttctttatatgcttgtggcccaactgtatatgagaatccccatgtaggtaatgcaagaactcttgtagtatttgatgttctttttagagttttaaaaattctttacaattcaaatgtaacttatgtaagaaatattactgacgtagatgataaaataattgaatcgtctcaaaaaaataaaaaagacatagatgtaattacaaatgatgtgataaaaatttttcataaaaattgcaaaagtttaaattgtttaaaaccaacagtagaaccaaaagctacagagcatataaaagagatgattgaaatgacatcttcattaattaaaaaaggatttgcatatgaaaataaaaaccacgtttattttgcagtaagcaaatttaaaaattatggaaaattatcgaataaaaatttagatgagttaaaggcaggtagtagagtagagatttctgatctaaaaaaaaatcctatggattttgttttatggaaacct

SEQ ID NO: 299168 - DNA, 726 bp, Unknown
  Bacterial polypeptide expressing nucleotide sequence isolated from the Sargasso Sea
tctgcggcttaccaacaccctcacgcgccgcactgagtcgttcacccctctgacgcctggcaaggtcagcatttattgctgtggggtaacggtctacgacctctgccacctgggccatgcccgcagctatatcaactgggatgtgttgcggcggttcctgatctggcggggccttgaggtgaccttcgttcagaatttcaccgacatcgacgacaagatccttaaacgggctgcggaacaagacagctcgatgaccgaggtgagcgagcgcaacatcgacgccttccaccaggacatggatgcactggggattctcaggccgaaccgcatgccgcgcgccacccagtgtctggatggcatccgctcactcatcggcgaactggaatcgaagggtgcggcctacagcgccgatggggatgtgtacttcgcggtgatgaagcatgctggctacggcaagctaagcggccgcgatctgagcgagcagcaggacaacgccgccggtcgcgttgctgatgctgaggaggcccgcaagcagcacccctttgacttcgccctttggaaaggggccaagcctggtgaaccgagcttcccctccccctggggtgaaggtcggcccggctggcacatcgaatgctccgccatggtgagggcggaactgggggacacgatcgacatccacctgggtggcgccgatctggttttccccatcacgaaaatgaaatcgcc

SEQ ID NO: 299169 - DNA, 233 bp, Unknown
  Bacterial polypeptide expressing nucleotide sequence isolated from the Sargasso Sea
tatggatatttttttaacaaataatttaagtaataaaaaagaactttttactcctaaagataaaaaaaatgtaggaatgtatgtttgtggtccaacagtttatgatgatcctcatataggaaatgcaagaccgttagtaatttttgatattttatttaaattactaaaaaataacttttcaaaagtaacttatgtaagaaatataactgatatagatgataaaattatcaaat

SEQ ID NO: 299170 - DNA, 672 bp, Unknown
  Bacterial polypeptide expressing nucleotide sequence isolated from the Sargasso Sea
gaagagatttaatttttcctcatcatgaaaatgaaattgctcagtcaagatgtgcaaacaaaaatgaatctttttcaaactactggatacataacggattcattacaattgcaaatgagaaaatggcaaagtcacaagggaatatttttaaaataaaagatttttatcaaaaatataacggtcaagttttaagactggctttaatttcaactcactacaaacaagctatggattggagtgaagatctactaatacaatcaaaaaaaactttagataaatggtacgaatgccaaaaaaaaccagaaggtaaagtgttaataccagatgatgatttagctcctctctatgatgatttaaatacacctggctttataagcaatattcataaattatatgataaagctgccaaaggatctgataaagataaagaaatttttacaacagcatgtaattttattggtttattaactgagccaaaatcaaaatggcaagagtttaaaaagaatattttggaaatttcagaggaagagattttgcaaaagataaaagatagaaacacagctagagacaataaaaattaccaattagctgatgaaattagaaacgaacttttagacaaaggtattttaattgaagacaaagatgataaaacaacttggaaaataaaatgag

SEQ ID NO: 299171 - DNA, 895 bp, Unknown
  Bacterial polypeptide expressing nucleotide sequence isolated from the Sargasso Sea
gttgatcatgttacatacgttagaaatataactgatgttgacgataagattatagaggcagcaaattcaaataaagaagatatttcttcattaacttctagaacaatacaatattttcatgaagatgcatcttacattggtgcattagtccctacaattgaaccaaaggctacagagcatatcaatgaaatggttgaaatgattgagaccttgatagctaaaggctttgcttatgaagttgatggaaacgtcttattttcttcatcaaagtttgatcaatatgggaaattatctggaaaaaatattgatgaattgatcgctggagcaagagtaaatattgaagattttaaaaaagaggcatctgactttatattatggaaaccttcaaaagataatgaacctggctgggaaagtccttggggtaaagggaggcctggttggcatatagaatgttcagctatgagtaaaaagtatttaggagacacatttgacatccatggagggggtcaagatttaatcttccctcatcatgaaaatgaaattgctcaaagtgaatgttgccatgaaaaaaaatttgcaaattattggcttcataatggatttctgaccgttgaaggcaataaaatggcaaaatctgacggtaatttcattactgttaatgaactcaaagatagatatcatggcgaagttattagactagcgatgttgatgactcattatcgacaaccactaaattggactgaaaataatttgctggagtcaaaaaaaatattaaacaaatggttttcatttttcttagatattgaaatttcaaaagatgatgcagaaatagttgatgaaaatattttgtcagctttgaaagatgatataaatactccaaaaagcaatcagtgag

SEQ ID NO: 299172 - DNA, 277 bp, Unknown
  Bacterial polypeptide expressing nucleotide sequence isolated from the Sargasso Sea
ctgcggctcaccaacaccctcacccgccgcaccgagccgttcacacccctaaccccggggaaggcgagcatctattgctgcggcgtgacggtctacgacctctgccacctgggccatgcccgcagctacatcaactgggatgtgctgcgccgctatctgatctggcgcggcctcgaggtgaccttcgttcagaacttcaccgacatcgacgacaagatcctcaaacgggccggcgaggagaactcctcgatgacggaggtgagcgagcgaaacatgc

SEQ ID NO: 299173 - DNA, 738 bp, Unknown
  Bacterial polypeptide expressing nucleotide sequence isolated from the Sargasso Sea
aatgtatgggtttggtggtcccacagtatatgacgatccccatattggatatgcaagaccattagttatttttgatattctttttaaaattcttaaaaataaatttacttcagtaacatatgtgagaaatataacagacattgatgataagatcattaaatcttctaaagaacaaaatatatcgtcaaaagaattaactgataaaataactaaaaattttttcagtgattgttcttatttaaattgtgagagtccaactcatcaaccaaaggctactgaacatataaatcttatgatcgaaatgataaatgaattattaaaaaaaggttttgcttatgaaaataataaacacgtttattttgaagtaaagaaattttctgattatggaaagttatcaaataaaaagttagaagatttgatagctggatcaagagtggaaataagtgatgacaaaaaaaattctgaagattttgtgttgtggaaaccatcaaatgaaggtgaaccatcatgggtgtctccttggggaaagggaagacctggctggcatttagaatgctcagctatgtcaaaaaaatttttgggtaatgaattcgatattcatggaggaggtatagacttaatatttcctcatcatgaaaatgagattgctcaatcaagatgtgtaaatggcacaaaaaattttgcaaattattggatccacaatgctttcataactatgtcaaatgaaaaaatggctaa

SEQ ID NO: 299174 - DNA, 869 bp, Unknown
  Bacterial polypeptide expressing nucleotide sequence isolated from the Sargasso Sea
aatgattaagttaaatttatataatacaattcaaaggcgtttttctatttttcagcctatagataccaaaaatgtaagaatttatgcatgcggacccactgtttatgattttatacatattggtaacgcaagacccttagttgtttttgacgttttagttagattacttagaaaaatatatcctaaagttacatacgtaagaaatataacggatattgacgacaaaattaataaaagagcaattgaaaaaaaaataaatatttcagaattgactaatgaaacaataaaaaattttcataaagatgctcatgcgttaggtaatttgaaacctgattttgaaccaaaagcaactgaccatatatctgaaatgatagaaatgatagaaacattaatttcaaatggttttgcttatgttgcatcaggaaatgttttgtttgctgttgaaaaatataataattacggtgctttatctggtagatcacttgatgagatgatatctggatcaagggttgaagttgctgaatataaaaaaaatcctggagactttattttatggaaaccatcttccaaaaaacttcccggatgggatagtccatggggtaggggtcgtccaggttggcatatagaatgttcagcaatgagtaaaaaatatttaggaacacaatttgatatacatgctggtggattagacttgatttttccacaccatgaaaatgaaatcgctcagtcttgttgtgccaataaatccgatattatggccaattactggttgcataatggttacgttacttctgacggtgagaaaatgtcaaaatcactaggtaattttactactataaataatttgttgttaaattttaggggcgagg

SEQ ID NO: 299175 - DNA, 959 bp, Unknown
  Bacterial polypeptide expressing nucleotide sequence isolated from the Sargasso Sea
cgaactatttctgagatgatagaaatgatctctgaattaattaaaaaaggatttgcatacgaaaataagaaccatgtttattttgaagtaaaaaaatttaaggattatggacagctatcaaacaaaaaattagatgaattagttgcaggatcaagaattgaagtaagtgataaaaaaaaaaatcctgaagatttcgttctttggaaaccatcagaaacagacgagccatcttgggattcaccttggggtaaaggaagacctggttggcacttagaatgttcagcaatgtccaaaaaatatttaggaaaagaatttgatgttcatggaggaggtgttgatttattatttcctcatcacgaaaatgaaattgctcaatcaagatgtgcaaatgatactaaggtatttgctaattattggttgcataatgcattcattacaatatcaaatgaaaaaatggcaaaatctcaaggcaatattttaaagattaaagattttagaaataataagagtggtcaagttttaagattggctttaatgagcgcacattaccgacagccacttgattggaatgacaagctcttagaggattgtgaaaatacaattagtaaatggtacaatgtttattcaaacaatacatcaaatgtaaaaatttcatatcaaattctaaaacctctttttgatgaccttaatacaccaggttacattgccaatttacataaattatatgacgatgcatcaaaagggtctgatgaagataagagattatttgtttctgcatgtaattttgttggattattgaatgaaactaaagaggattggcttaaatttaagaaaagcaatgtatcaatttctgaaaatgaaattttaattaatattaataagagaaatcaagccagattaaataaaaattataaggaagctgataaaataagagatgagcttttagacaaaggtgtttt

SEQ ID NO: 299176 - DNA, 920 bp, Unknown
  Bacterial polypeptide expressing nucleotide sequence isolated from the Sargasso Sea
gcctttcatgaagactgcaagtatttaaattgtttaaacccaacctttgaacctaaggcgactgaacatattaatggaatgatagatatggtttcaaatttagtaaaaaataatcacgcatatgagaatgaaaagcatgtttatttttctgtttcttcatttaaaaaatatggaaaattatctaataaaaattcagaacaactcgttgcaggatcaagggttgaagtttctaaatataaaaaagatccacttgattttgtactttggaaaccttcagaagacaaagatcctggttggaattctccatggggcagaggccgcccaggttggcatttagaatgttccgttatgagtgaaaaatatttaggtaagcaatttgatatacacggtggcggacttgaccttgtttttccacatcatgaaaacgaaatagcacaatcatgctgcgcaaacaaaactgaaaattttgcaaaatactggctacataatggatttgtcacctttgataaggagaaaatgtcaaaatctattggtaatattgttgctattaataagcttagaaaaaatgtaaacggccaagtagtaagactcgctctactgagttctcactacaagcaacctcttgactggaatgagaaattaataaaagaaagtcaaaacactttagataagtggtacggacaatttgaaaaaattaaactagaagaattaaatcaagatatactccaacctctccaagatgatctaaataccccagagtatataactaaattacattcgctttttgaagaatcctcaaaaggaaataaatcctctaaactcaaattcttatcagcatgccaacaaattggtctacttgaagataaggaatcatgggacaattttaaaaaatcaaaagcaaaagttgatgaaaactttat

SEQ ID NO: 299177 - DNA, 239 bp, Unknown
  Bacterial polypeptide expressing nucleotide sequence isolated from the Sargasso Sea
aatgaataaagatatttttttaacaaataatttaactaataaaaaagaaaagtttattccaaaaaatgagcaaaatatcggaatgtacgtatgtggccctacagtttatgatgaccctcatattggcaatgcaagacctattgttgtttttgatattctttataaagtttttaaaagtaaatttaaaaaagttacttatgttagaaatataactgatgtagatgataagataattaatt

SEQ ID NO: 299178 - DNA, 646 bp, Unknown
  Bacterial polypeptide expressing nucleotide sequence isolated from the Sargasso Sea
atgattctttacaataccttaacaaaacaaaaagaacagttagataaatcagaaattactatgtatgtatgtggtgtaactgtttatgatcgacctcatcttgggcatgctttatctacaataacatttgatgttttacatagatatttagaatatatcggtagaaaggttaccagagtacaaaattttacagacgttgatgacaaaataatcgctcgttcaaaggaattaaatatcactcctaaagatgtagcagaaaagtacattaaagcattttttgaagatatggatagcttaggagtaagaagagcagatgtacatccaagagcgactgaagatatgaaagaaattatagatttaattcaggatcttattaataaaaatgcagcttatgaattgaatggaagtgtctattttaatgttgaattttctgatgattatgggaaattgtctagacgaaatatctctgatctaattgaagggaatagaattgaaaacgaacctgataaaaaaaatccaggagattttgctctttggaaacatgccgaggaatctgaaactcattgggatagtccttggggcaaaggtagaccaggatggcatatagaatgttcagcaatggtaaaaaaacatctggagatgtaat

SEQ ID NO: 299179 - DNA, 676 bp, Unknown
  Bacterial polypeptide expressing nucleotide sequence isolated from the Sargasso Sea
aatgattgagatatacgactcttacacaaaatcatataaagaagtagttaataagaatattaatatgtatgtctgtggcattacgacttcagacttctgccatttgggtcatgccttttcatcggtttcttttgagatattagatagattcttaacatcaaaaggttatatagtaacgagagtacaaaacttcacagatgttgacgataagataatcactaagtctatttctgaaaacatgaccccggaagaagtatcagaaaagtatataaatgcctttttcgaagatatggatgctcttggtgttaaaagggctaactcttacccaaaagctacagatgaaataggaaatattattaattttattgaaaagttagaagaaaaagagtttacttaccaaattgatggcagtgtttattttagagtaagtaaatttaaaaactatggaaagttaagttctagaaaacttactgattcaatgtcagggacaagagtaaacgaaaatttaaaaaaagaatccgacgaagactttgctctatggaaatcatccaaatctggcgaaccattttgggattcaccttggggaaagggacggcctggctggcatattgaatgcagttcaatggtattaaattctattggtaactcagttgaccattcatggcggaggtataga

SEQ ID NO: 299180 - DNA, 799 bp, Unknown
  Bacterial polypeptide expressing nucleotide sequence isolated from the Sargasso Sea
gatgcttaatttatacaattcttacacaaaacaacaagaagaagtcaacttaaatcaagaagacgtaaggatatatttgtgcggtcctacagtccaatcatcaccccatctgggacatggaaggtcagcagttgtctttgatttttttattagatacttaaaatttttaaattattcggttttgtatgttagaaatattacggatattgatgataagataatccaaaagtcacaagaaaaaaatattaattatcgagaacttgctgaaagtgtttgggaagagtttgtccaagctcatgaaaatttaaattgtttagttcctgatatagagccaagagcaactgcctatgtgccagaaattgttcaatatattgatcaattaatcaaaaatggttttggctatattacaaagtcaggtgtttactatgatgtttcaaaatttgatgattatcttaaattatctggaagaagtactgaggaagtaaaaacaggaacaagaatagaaactgaagaagataaaaaaagtcctgaagattttgcattatggaaattctcaaaagagggagaaccatcatgggattcgccatggggagttggacgtcctggttggcatatagagtgttcaactatgattaatcaaacacttgggaaaactattgatttccactgtggaggtatagatttaatttttccccatcatgaaaacgaaattgctcagtctaaaggagttgagaagaatgaaaattttgtaaattattggcttcataatgggatgttaaatctatctggtaagaaaatg

SEQ ID NO: 299181 - DNA, 445 bp, Unknown
  Bacterial polypeptide expressing nucleotide sequence isolated from the Sargasso Sea
aatgagtaaagatatttttttaacaaacaatctttcaaataaaaaagagaagtttgttccactagataaaagcaacattagaatgtatgtgtgtggccctactgtttatgacgatcctcacattgggaacgcaagaccaatagttgtatttgatattctatttaaaatttttaaaaaaaattattctaaagttacttatgtgcgaaatattacagatgtagatgataaaattattaaatcttcaaaagaaaataatatttcaatttcagaattaacaagcaaagtaaccaaaagttttagtgaagattgtcattacttaaattgtgaagaaccaacccatcaacctaaagcaacagaaaatatatatttgatgattgaaatgatttctgaattaataaaaaaaggatttgcttatgaaaataataagcatgtttactttgaggtt

SEQ ID NO: 299182 - DNA, 562 bp, Unknown
  Bacterial polypeptide expressing nucleotide sequence isolated from the Sargasso Sea
aatgaataatttacatttaactagctctctaacaaataaaaaagaaatttttaatccaataaacaaggaaaaagtttctttgtatgcttgtggcccaacagtttatgacaatcctcatgttggtaatgctcgtgctttagttgtttttgatcttctcttcagaatacttattgaactttatggagagaaaaaagttacttatgtaagaaacataacggatatagatgataaaattattgaagcttcaaagattaaaaaaatagatatttcagatttaacaaaaaatgtaacaaaaaaatttcacagagattgtgaaaatttattttgtttaaatccttctaaagaacctaaagcaactgatcatgttgatggtatgataaatatgacaaaaaaattgattgaaaaaaatgctgcctatgaaaaagaggggcacgtctttttttcagtagcctcatttaaaaaatacggaaatctctcaaataaaaatacggacgatcttaaagctggtgctagagtagaggtatcaaaactaaaaaaagatcctttagattttgttctctgg

SEQ ID NO: 299183 - DNA, 731 bp, Unknown
  Bacterial polypeptide expressing nucleotide sequence isolated from the Sargasso Sea
aatggatatttttttaacaaataatttaacaaataagaaagaacagtttgttccaagaaacactaaaaatattggaatgtatgtttgtggtccaactgtttatgatgatccacatattggaaatgcacgaccattgattatttttgacattctttttagattgctcaaaaactctttttcaaaagtaacatatgttagaaatattactgatatagatgataaaataattcaatcatctcaagaacaaaatatttctataaaagatttaacagaaaaagttactcaaaattttttagatgattgtaagtttttgaattgtgaaaaccctactcatcaacctaaagctactgaacatattgatttaatgatcgaaatgataaatcaattaattaaaaatggttttgcttatgaaaataataaacatatttattttgaagtaaaaaagttttctgattatggaaaattatctaataagaaattagaagacttgatagctggatcaagagtagagataagtgacaacaaaaaaaattcagaagattttgttttatggaaaccttctgttaaagatgaaccttcttgggactctccttggggcaaaggacggccaggttggcacttagaatgttcagcaatgtcaaaaaaatttttaggaaatgaatttgatattcatggtggtggtatagacttgatatttcctcatcatgaaaatgagatagctcaatctagat

SEQ ID NO: 299184 - DNA, 658 bp, Unknown
  Bacterial polypeptide expressing nucleotide sequence isolated from the Sargasso Sea
aatggcactaaatttatacgacacattctcaaactcaaaaaaaaagtttgaaccaattaatccaaaaaatatcagaatgtatgtttgtggtcccacagtatacgactatccacatgtaggaaacgcaagacctgttatagtttttgatattttatttcgaattcttcaaaacatatacggtactgagcatgtaacatacgtgagaaatataactgacgttgatgataagattataaatgcctctcaagaaaataatgaagacatcaatgaattaacttcaagaaccattaattattttcacgctgatgcgaaatatataggagcaatggagccctcctttgagcccagagcaacggatcacatagctgaaatgatcaatattattgagacgttaattgaaaaaaattatgcctatgttgcagagaataacgttcttttttcatctactaaattttctaaatacggatcattatcaggaaaaaatcttgaagaaatgattgctggatcaagagttgatgttgaaagctataagcaagaagcttcagattttatactatggaagccttctaaagataacgagcctggatgggacagtccatggggcaagggaaggcctggatggcatatagagtgttctgcaatgagtgaaaattattag

SEQ ID NO: 299185 - DNA, 886 bp, Unknown
  Bacterial polypeptide expressing nucleotide sequence isolated from the Sargasso Sea
attggtaatgcaagacctttggttgtttttgacattctatataagttacttaaaaataatttttcaaatgtaacctatgtaaggaatataactgatattgatgataaaattatcaaatcgtctcaagaacaaaaaatttccacaaaagaacttacagaaaaagtaacttcaagttttttaaaagattgtgaatttttaaattgtgaaaatccaacccatcaacctaaagctacagaacatatagatctaatgatagagatgataaccgaactaattgaaaagggttttgcttatgaaaatcaaaaacatgtatattttgaggtaaaaaaatttgctgattatggaaaattatcaaataaaaatttagatgaattgattgctggatcaagaatagaaattagtgaaaataaaaaaaattctgaggattttgttttatggaaaccctcaaatgatgatgaacctttttgggactctccttggggcaaaggtagacctggttggcatttggaatgttctgctatgtccaaaaaatttttaggcaatgaatttgacattcatggtggtggtatagatttaatttttccacaccacgaaaatgaaatagcacaatctagatgtgcaaacgaaactaaagtttttgcaaaatattggatacataatgcctttatcacaatgtctaatgagaaaatggctaagtcccaaggtaatattttaaaaataaaagattttagaaataagataagtggtcaaataattagattagctttgataagcacacattacaaacaaccacttgattggaatgctaagttattaagtgattgtgaaaatactttagataaatggtacagagtctattcatctgattttaagtctattaaagttc

SEQ ID NO: 299186 - DNA, 814 bp, Unknown
  Bacterial polypeptide expressing nucleotide sequence isolated from the Sargasso Sea
aataaaaaaattccaatagataagcttacaaattatattacaaaaaactttcacgaagattgtgaatatttaaattgtttaaaaccaaattttgaaccaagagctaccgaacatattaaaggcatgattagtatgacagaaaatttattgaataataaacatgcttatgaaaaagataaacatgtctatttttcagtaaactctttcaaaaattatggcaaattatctaataagaaacctgatgagcttgaggcgggttcaagagtagagatttcaaaattaaaaaacaatccattagattttgttctttggaaaccatcttctacagatgatcctggctgggattctccatgggggaggggtagaccaggttggcatctcgaatgctcagttatgagtgaaaaatatttaggaaaaaattttgacattcatggaggtggtttagatcttgtatttcctcatcatgaaaatgaaatagctcagtcttgttgtgcaaacaaaacagataaatttgcaaactattggttacacaatggttatgttacttataataaagagaagatgtccaaatcattaggtaatatagtcactatgcaaaaaatgaaaaataaaattaatggtcaagttattcgtttggcattattaagctctcattacaaacaaccattagattggaatgaaaagttagttaatgaaagtcagagtactcttgataaatggtatagcttatacgaaccggttaaagaaagtaatttagatgaaaatttaataggtccactcctagaggatttaaatacacccagggtttattcaa

SEQ ID NO: 299187 - DNA, 638 bp, Unknown
  Bacterial polypeptide expressing nucleotide sequence isolated from the Sargasso Sea
tgcgcatgggacaagccatatggccaaatattggttgcataatgggtttgtcaccatgaatgatgaaaaaatgtcaaaatcactcggtaatattattacggttgaagaggcgacatctcgttatcgcccagaagtagtgcgggcagctttattgtcggcgcattatcgcgctcctcttgatttgtctgagagcaccatgcaggacgcgcataatagtttggatcgcttgtaccgggcagctggcacagcagaagtttcaggcgatcatgttgatgatggattgttggcgtgtctttgtgatgatctgaacacgccagcggcgatagcacgtcttcatgaacttgcacgccgcgccaataaaggcgatgtgggcgcggccactgcattaaaatctagtgctagtcttcttggcttgttgcagcaacgggccgatgcatgggccaaaggtggggctggggtcagcggcagtgacgatcagcagttggatgatgccgccattgatgctgaaattgcagcgcgcaatgcggcccgtgcggctcgcgatttcgccaaggctgatgccattcgtgacaagctggcggcggctggcattatgcttgaagatagacaggatggaaccatttggcggcgtagctagt

SEQ ID NO: 299188 - DNA, 259 bp, Unknown
  Bacterial polypeptide expressing nucleotide sequence isolated from the Sargasso Sea
aatggacttgatgctttacgatacttttaccaattcaaaaaagaagtttgaaccaattgatccaaataatgtgcgaatgtacgtttgtgggccaactgtttacgattatgcgcatgtaggcaatgctcgaccagtgatagtgtttgatattttatttcgattactccaaaagatttatggcagtgaaaatgtaacttatgtaagaaatattactgatgttgatgataaaattatacacgcagcaaatgatcaaaaagaa

SEQ ID NO: 299189 - DNA, 316 bp, Unknown
  Bacterial polypeptide expressing nucleotide sequence isolated from the Sargasso Sea
gaggaggacgtttatttttccactgattcttttctaggatacggcaagctttcccatagaaaccttgaagacttaattgctggttcgagaatagatgtagatgaagaaaagaagattcctgcagactttgttctttggaagccggctgaagaaggacttgcttgggactctccttggggaagaggcaggcccggatggcatatagaatgttctgcaatgagtatggacgctttaggaaataattttgacatacatggaggcggaatagttctcaaatttccccaccatgaaaatgagatagcacattctgtttgcg

SEQ ID NO: 299190 - DNA, 874 bp, Unknown
  Bacterial polypeptide expressing nucleotide sequence isolated from the Sargasso Sea
aatgaagaataatcagcttaatctatcaaacactataactggaaagaaagagatatttgttccaattaatccaaaaaaaattggaatgtatgtttgtggcccaactgtttacgattttccacatgtaggtaacgcaagacctttagtcgtgttcgatgttttgtatagagtattatctaaaatttttggaaaaactaatgttacttatgtcagaaatataactgatatagatgataaaattattgaaagttcaaaaattaaaaaaatatcaacggaagaacttacctctacaattacaaaaagttttcatgaagattgtaggtacttaaattgtttagaaccaagttcagaaccaaaagccactgaacatataaaaggcatgattactatgactgaaaaccttttaaaaaataatcatgcttatgagaaagataaacatgtatatttttcaataagctcattcaaaaattatggcaagttatcaaaaagaaatcctgaagaattagttgcaggtgcaagagtagaaatttcaaaattaaaaaaacatcctcttgattttgttctttggaaaccatcgtcaacagaagatccaggttgggactctccatggggaaggggaagaccgggatggcacttagaatgctcagtaatgagtgaaaaatttcttggaaaaaactttgatatacacggaggcggattagatcttatttttcctcatcatgaaaatgagattgcacaatcatgttgtgcaaataaagctaataaattcgcaaattattggttacataacggatatgtcactttcaataaggaaaaaatgtcaaaatccttaggaaatattattaccattgaaaaaatgagaaaaacgaattaa

SEQ ID NO: 299191 - DNA, 691 bp, Unknown
  Bacterial polypeptide expressing nucleotide sequence isolated from the Sargasso Sea
ggacctacgctttatagtaatccacatataggcaactttagaccaattataatttttgatgtcttatttagaattttaagacttacttttggagaagatagagtaaattatgtcagaaatatcacagatatagatgataaaattatagataaagcaaacgagcttaatataacgacagatcagttggttgagcttactcaaaaaacatatcatcaaaatctaaattctttatcaattttatctccaactcatgaaccaaaagctacaaattatatttcaaaaatgatcgaaatgattacattgctcattgacaaaaaattcgcttatatatcgaatgggcatgtattatttgaagcaaaaaaatataaagattatggttctctctctaagttttcattaaaagacattattagtggagcaagagttgaagttgctgaatacaaaaaaaatcctgaagattttgttctttggaaaccatcaaagacaaatgaaccctcttgggatagcccttgggggggtggaagaccaggatggcatatagagtgttcagctatgatttctgaattacttggagaaactattgatattcacgctggaggtattgatttaatattcccccaccacgaaaatgaaatagctcaatcaacatgttgtcatgataaaaaaaatgtcaaacttttggctccataat

SEQ ID NO: 299192 - DNA, 841 bp, Unknown
  Bacterial polypeptide expressing nucleotide sequence isolated from the Sargasso Sea
ttacaaaacacattaagtggtaaaaaagaattttttaaaccagttaatccagatcatgtaagaatatatgcgtgcggtccaactgtttacaattttgcgcacataggtaatgcgcgtatggcagttgtaaatgatttattagtccgtgtattaaaaacacaatttaaacaagtgacctatgtgtctaatatcactgacattgatgacaagattatagaagcttctaaagaaacaggtgaggacataagtgttatcacaaataaatatacagaaatttacaataatgacatgagtgcactcggtgttaatcttcctgatattcaaccaagagcaactgatcatattaaagaaatgatcgaattaataaaaagattaatagatgaaaataaagcttatgaaaaagatggtcatgttttatttcatgtgccaagttttgataattatggaattctttcaaaaagaaatagagatgaacaaatagctggaagccgtgttgaagtagcgccgttcaaaaaagatccagcagattttattttatggaaaccatctccctcacccttacctggttgggattcaccttggggatttggaagaccaggatggcatttagaatgctccgttatgtcagaaaaatcattaggtcttccttttgatatccatagcggtggtattgacttggtgtttccgcatcatgaaaatgaaatagcacaaacttgttctatatctgaaaataaagatcctaaagattttgcaacttattggtttcataatggatttgttaatgttgagggagaaaaaatgtcaaagtcaattggtaatattagactcgttcatgatctca

SEQ ID NO: 299193 - DNA, 560 bp, Unknown
  Bacterial polypeptide expressing nucleotide sequence isolated from the Sargasso Sea
aatgaagaataatcatcttaacgtatcaaacactataactggaaagaaggaagcctttgtaccaattgatcccaaaaaaattgggatgtatgtttgtggccccacagtttatgatttcccacatataggcaatgcaagacctttggttgtatttgacgttttgtatagagtactgtcgaaagtttttggaaaaactaatatcacttatgtaagaaatataactgacatagatgataaaattattgaaagttcaaaaaataaaaaaatatctatagatgaacttactacgtcaattacaaaaagctttcacgatgattgcaagtatttaaattgcttaaaaccaagttttgaacccaaggctaccgaacatatcaagggcatgattgacatgactgaaaatcttttaaaaaataattatgcttatgagaaagataaacatgtatatttttcaataaacacatttaaaaattacggtaaactatctaaaaaaaatcctgaggaattagttgcaggagcaagagtggaagtttcaaaatctaaaaaacacccccttgattttg

SEQ ID NO: 299194 - DNA, 925 bp, Unknown
  Bacterial polypeptide expressing nucleotide sequence isolated from the Sargasso Sea
ccaacacatcaacctaaagctacagaacatattgctctaatgattgagatgataaatgaactaattaaaaaaggttatgcttacgaaaaaaaaaatcatgtttactttgaagtaaagaaattttctgattatggaaaattatcaaataaaaaattagatgaattgattgctggttcaagagttgaaataagtgaaaataaaaaaaattcagaagattttgttttgtggaaaccgtcaaataataatgaaccttcatgggactcaccttggggaaaaggtagacctggctggcatttggaatgttctgcaatgtcaaaaaaatttttgggtgaagagtttgatatccatggcggtggaattgatctaattttccctcatcacgaaaatgaaatagcacaatcaagatgtgctaatgatacaaaagtttttgctaattattgggtgcataatgcttttataactatgtccaatgaaaagatggcaaaatctcaagggaatattttaaagataaaagattttagaaaaaaaatgagtggtcaggttattaggttagcacttatgagtgcacattataaacagcctttagattggaacgaaaaactaattaatgattgtcaaaacaccttggataaatggtatcgtatttattcacctgaaattaagaatgcagatattccggaggtgattttgaaacctttatatgaagatcttaacactccaggttatatagcaaatttacatcaactctttgacaaagctaataaaggtcaggatctagatatttttatatctgcttgtaaatttattgggttatttaatgaggacagcaaacaatgggatagttttaaaaagaataaagcctctattagtgaagaagaaataaaaaagatgattgattcaagaaacaaggcaagagagaacaaaa

SEQ ID NO: 299195 - DNA, 736 bp, Unknown
  Bacterial polypeptide expressing nucleotide sequence isolated from the Sargasso Sea
tatgaacagtaaacaaccatttcaattgtttaatactttaagtggtatcaaagagagattagaggcaattgatccaaaacatttaaaaatttatgcatgcggaccaactgtttataattatgcacatattggtaacgctagaatggctgttgtctttgatactttagttagaactcttcgactaatttatccgaaggtcacatacgtatctaatattactgatattgacgataaaatcatcgaagcagctaaagaacaaaatgttgaaataacatcaatcactgaaaaatacactaagatttataatgatgatatgttaaaactcaatgttttagctcccgatattcaaccaaaagctactgagtacatacctgaaatgattgaactcatagttgaactaattgaaaaggactttgcttatgaaaaagaagggcatgtgctttttcacgtaccaacttatcaaaattatggaaagctttctaagagaaatagggatgagcaaattgctggaagccgagtagaagtagcaccattcaagaaggatcctgctgactttgtactatggaaacctagcacagatgaacagcctggttgggaatcgccatggggagttggaagacctggttggcacacagagtgttcagcaatgtcaaaaaaaactttaggacttccatttgacattcatggtggtggaagagatcttatcttccctcatcacgaaaatgaaatgctcaaa

SEQ ID NO: 299196 - DNA, 804 bp, Unknown
  Bacterial polypeptide expressing nucleotide sequence isolated from the Sargasso Sea
agaaataaagaagatcaaattgcaggaagcagagttgaagtagcagattataaaaacaattcaggtgactttgttttatggaaacctagtaatgaagatcaaccaggatgggattctccttggggtagaggtcgtccaggttggcatatagaatgttccgcgatgtcggaaaaaactctttctttaccttttgatattcatggaggaggagtagatttaacctttcctcatcatgaaaatgaaattgcacaaagttgtgcagctcataaatttaaagatccgaaagaatatgcaaaatattggatacataatggctttgttactatggatggagaaaaaatgtctaaatctcttggaaatatatttttagttaatgatttaattaaaaaatatccaggtgaaactcttagacttgcgctaatctctactcattacagacaacctttaaattggaattcaaaaattatagaccaagcacaaaaaaaccttgatcgaatatatagagttttaaaagataatgaaaatataaccattaataataaaatatctgcatcagaaaaaataattgaagctttaagtgatgatttaaattcgtctcaagccttatatgaaatgaacttgttagctgaccaactttcaaaatgcgacccatcacaaaaacaaagattaaaatcagaacttattgcgtctggaaatatacttggcatattacaggactctcctagctcatggctaaagtatggaactaatgccaataatattgatagtaatataattgaagaattgatagaaaaaagaaaacaa

SEQ ID NO: 299197 - DNA, 433 bp, Unknown
  Bacterial polypeptide expressing nucleotide sequence isolated from the Sargasso Sea
atgaataaacaattaaatatatttaataccctttccggaaaaaaagaaaaatttattcctattaataaaggcaatgttgggatgtatgtttgtgggccaaccgtttacgattttccacatattggaaatgcaagaccacttgttgtttttgatgttttgtttagattgttaaaaaaactaaatggcaatgataaagttacttatgtgagaaatataacagatattgatgataaaattattgaggcctctaaaaataaaaaaattccaatagacaagcttacaaatgaaattacaaaaaactttcacgaggattgtaaatatttaaattgtttaaaaccaaattttgaaccaaaagctaccgagcatattaaaggcatgattagaatgacagaaaatttattgaataataaacatgcctatgaaaaagacaaac

SEQ ID NO: 299198 - DNA, 691 bp, Unknown
  Bacterial polypeptide expressing nucleotide sequence isolated from the Sargasso Sea
cgggggcgggagagatttaatttttccgcatcacgagaatgaaattgctcaaagttgttgttcttcagcaaacatagacgaaccagattcttatgctaagtattggatgcataatggtttcgtaacaattgatggtgaaaaaatgtctaaatctcttggtaatattattcttgttaatgatctaatccaagaccatcatggagaagtaattaggctagctcttttatcgactcattatagaaaggggcttgattggaatgaaaaaataattcatcaggcaaagaagttgctcaataaaatatatatcattcttgatgatttaaaaaatataaatataacttcttctgataatgaagctatcgcaacattgctagatgatcttaatacgccgggtttaattgcagagttaaataaaatagcaaaagaatatagctcggatgcaaaagataaagaacaaattaagtcaaaacttatgttaattggatctgttctaggcatctttcaagacaaatcttttaatcaagtctcagatgagatgcagcaaaagattgaggagctaattattaaaagagaaaatgcaaaaaaagacaaaaattttgatatggctgaccaaattcgaaatgagctaaatgaactaggtattgaaataaaagatactagcgatggtacatcttggaacgtaaaatcatga

SEQ ID NO: 299199 - DNA, 661 bp, Unknown
  Bacterial polypeptide expressing nucleotide sequence isolated from the Sargasso Sea
aatgactgtctatgatgacactcacataggccatgccagaacatttttatgttttgatttaatagttaggtatttaagaaatacaggttataaagtaaattacgtaagaaatattactgatgtagatgacaagattatagctagagcaaaagagctgaatatggacgctacagaattaactgataaatacattgcgtctatgcaagatgattttaatgatcttggcatgataagcccagatctagaacctagagcaactgataacattgattcaataatttctttgatagaaggattgattgataaaggtcatgcttatatcggagagaaggatgtttatttctcaactgattcctttaaagaatatgggaagctttctaatagaaacactaaagatttaattgctggtgcgcgaatagatgtagatgaagaaaaaaagaatcctacagacttcgttctttggaaacaggctgaagatggacttgcttgggattccccttggggaaggggcaggcccggatggcatattgagtgttcagcaatgagtatggacgctttaggaaacaattttgacattcatggtggtggaatagatctcaaatttccccatcatgaaaatgagatagcgcaatctgtttgtgctacaggagaagagtttgct

SEQ ID NO: 299200 - DNA, 946 bp, Unknown
  Bacterial polypeptide expressing nucleotide sequence isolated from the Sargasso Sea
aaaaatattagaatgtatgtttgcggtccaactgtatacgatgatccgcatattggtaatgcaagaccacttgttgtttttgatactctttataaaatttttaaaaaaaaatatccaaaagttacttatgttagaaatataactgatgttgatgataaaattataaattcctcaaaggacaaaaatatatcaatttctgaattaactaaaaatgtaaataaaagttttcagaaggattgtagttatttaaattgtgatatccccactcatcaaccaaaagcaacagaacatattgatttgatgatagaaatgatttcttatttgataaacaagggatttgcttacgaagaaaatcaacacgtatattttgaagtaaaaaaattcaaagactatggaaaactttcaaacaaaaaccttgatgaattaattgctggttcaagagttgaagtaagtgataataaaaaaaactcacaggattttgttctttggaaaccctccaaagatgatgagccttcatgggcatctccttggggtaaaggcagaccaggttggcacctagaatgctctgctatgtcaaaaaagtttcttggtaatgaatttgatgttcacggaggaggaatagatttattatttccgcatcatgaaaatgaaattgctcaatcgagatgtgcaaatgaaacaaaagtttttgcaaattattggttgcataatgcatttataacaatgtcgaatgaaaaaatggccaaatcacaaggaaatattttaaagataaaagattttagaaacaaagtaagtggtcaagttttgaggttagctataatgagtgcccattacagacaacctttagattggaatgataaacttttaaatgattgtcaaaatacaattaacaaatggtacaaagtgtatgcatcaaattataaagcagaagagattgatgatgaaa

SEQ ID NO: 299201 - DNA, 904 bp, Unknown
  Bacterial polypeptide expressing nucleotide sequence isolated from the Sargasso Sea
aataatttaaaatttaccaactctctttcaaataaaaaagaaattttcaaaccaattaatccaaaaaaaatttctttatacgcttgcgggcctactgtttatgactctccccatgttggaaacgcaaggacacttgttgtttttgatatgctttttagagttttaaaatttgtttataaagatcaagtaaattacgtaagaaatatcaccgatgtagatgataagataattgaagcctcaaaaaaaaagaaaaaatcgattgatgagattactagtaaagtaacaaaaatttttcataaagattgtgaaagtttgaattgtttaaaaccttcacatgaaccaaaagcaacagagcacattcaagaaatgatcgagatgacttcctcattaatcgaaaaaaaatatgcttatgtaaaagatggtcatgtatatttttctgtttcaaaatttaaaaattatggacaattatcaaataaaaatcttgatgaactaaaatcaggtactagaatagaaatttcaggtttaaaaaaaaaccctattgattttgttttatggaaaccatcctcaaacgaggatcctggttggaactctccttggggtagaggaagaccagggtggcatttagagtgttcagttatgagtgaaaaatatttaggaaaagagtttgatattcatgggggtggtttggatttaattttcccgcaccatgaaaatgaaatagcccaatcttgttgtaataattcaacaaataattttgcaaattactggattcataatggttttgtaacaattaacaaagaaaaaatgtcaaaatcattaggtaatataatcactatctctgatgcagtaaataaatatacaggtcaagttgtaagactagcattgctgagtgcacactacagtc

SEQ ID NO: 299202 - DNA, 466 bp, Unknown
  Bacterial polypeptide expressing nucleotide sequence isolated from the Sargasso Sea
atgagtttggatatttttttaacaaataatcttactaaaaaaaaagaaaaatttattcctcaagataaaaataatgtgagaatgtacgtttgtggcccaacagtttatgatgatccacatattggtaatgccagaccaattgttatatttgatattttatttaaaattttaaaaaaacaatatccaaatgtaacatatgtcagaaatatcactgatgtagatgataaaataataaaatctgcaaaggaaaatgaaattactattttagatcttacgaaaaaaattactcaaaactttaacgaagattgtatttatctaaattgtgaaaaaccaaatcatgagcctaaagcaactgagcatatcgctgagatgatagaaatgatctctgaattaattaaaaaagaatttgcatacgaaaataagaagcatgtttattttgaagttaaaaaatttaaagattatggac

SEQ ID NO: 299203 - DNA, 813 bp, Unknown
  Bacterial polypeptide expressing nucleotide sequence isolated from the Sargasso Sea
ttaacaaatagctatggtggaaaaaaagaaaaattccaaccaattgatgaaaataatatcaaaatgtatgtctgtggcccaacagtttatgatgatccacatataggtaatgcaagaccattagttgtattcgatttactttttaaggtcctaaagtgtaaatatggtaatgacaaagttacatatgtaaggaatattacagatattgatgataaaataattcaatccgcaaaagagaataaaatctcaattaaaaatctaacctctaaaattaataataattttcaggaagattgtaattatcttatttgcgaaaaacctagctttcaacctaaagcaacagaacatattaaagagatgatagagatgatcagcattttagtaaaaaaaggttttgcatatgaaagtgagaaccatgtctattttgaggttaataaatttaaagattatggaaaattatctaataaaaaaattgatgatttaatatcaggatctagagtagaagtatcaagtaataagagaaatgctgaggattttgtattatggaaaccctcaaaagaagatgagccaagttggacatcaccttggggaaaaggcagaccaggctggcatttagaatgttcggcaatgtctaaaaaatatcttggtgataaatttgatattcatggaggtggtagagatctattatttccgcatcacgaaaatgaaattgcacaatcatgttgcgctaatggaactgaagctttctctaattattgggttcataatggatttattactcaatcaaacgaaaaaatgtctaaatcgcaaggc

SEQ ID NO: 299204 - DNA, 495 bp, Unknown
  Bacterial polypeptide expressing nucleotide sequence isolated from the Sargasso Sea
aatgaacaaagatatttttttgacaaatagctatggtggtaaaaaagaacactttaagccgatagatgaaaataatattaaaatgtatgtttgtggcccaacagtctatgatgatccacatataggcaatgcaagaccattagttgtatttgatattctttataaagtcttaaaatgtaaatatggcatagatagagttacttatgtcagaaatataactgatattgacgataaaataatccagactgcaaaagacaaaaaaatttcaatagctgaattaacaaacaaaataaatataaattttcaagaagattgtaattaccttaattgtgaaacacctaatttccaacctaaagccacagaaaatatagatgaaatgattgaaatgattagtggtttaatcaaaaaaggttttgcctatgaaagtaataaacatatttattttgaagttaaaaagtttaatgattatggaaaattatcaaataaaaaaattga

SEQ ID NO: 299205 - DNA, 606 bp, Unknown
  Bacterial polypeptide expressing nucleotide sequence isolated from the Sargasso Sea
attttgttctttggaaaccatcagtagcagaagatccaggttgggattcaccttggggaagaggaagacctgggtggcacttagaatgttctgttatgagtgagaaatttcttggaaaaaattttgatatacatggtggaggattagatttagtttttcctcatcatgaaaatgaaattgcgcaatcatgttgcgctaataaagtagataaatttgcaaactattggttacacaatggttatgttacttttaataaagaaaagatgtcaaaatctctaggaaatgttatttctatcgaaaaaatgagaggaacaattaatgggcaggttattagacttgcgttgttaagcactcattataaacaacctctggattggaatgaaaatttaattaacgaaagtcagaacactcttgataaatggtatactcagtttgaaaaaactacacaaggtgatttagatgatgatttattaaaaccacttttggaagatataaataccccgggctatatatcaaaattacatttgctttacgataaagcttctaaaggggataagtcttcaaaaaaactttttctttcaggatgtaaacttatcggtttataag

SEQ ID NO: 299206 - DNA, 903 bp, Unknown
  Bacterial polypeptide expressing nucleotide sequence isolated from the Sargasso Sea
tatgtaagaaatattactgatgttgatgataaaattatacacgcagctaatgatcaaaatgaagacattggaatgcttacagaaaagacaattaattattttcatgacgatgcgaaatatgttggtgctttaaaacctacatttgagccaagagcaaccgaacatatacctgagatgattgagttgatagaaaaactcatatcaaaagagtttgcatatgtagcggatggtaatgttcttttttcttcaaataaatttaaagaatacggaaaactctctggcaagaatttagatgaaatggttgctggttcacgcgtaggtgtagaaagttataaaaaagaagagtctgattttgtattatggaaaccttcaaaagaagatgagcccagttggaaaagtccatggggagatgggagacctggctggcacattgaatgctctgcaatgagtgaaaaacttttgggggaaaattttgatattcatggaggaggccaagatttaatatttccacatcatgagaatgaaattgctcaaagcgagtgtgcaaataataacaaatttgcaaattattgggttcacaatggctttgtcactgttgagggtaataaaatgtcaaagtctgatggtaattttgtaactgtaaatgagttaaaagacagtttccaaggggaagttattaggctaaccatgatatcaactcattacagacaacctctaaattggaccaaggataacctcaatgaaagtaaaaaaacattagataaatggtacacattcttgagcaattttaatggtgatgaattaaaagatgcaaataatgataatgaaattatggaaacattattggatgatatgaatacacctaaagctattagcgtgcttcatcaaaaatttaaagactgc

SEQ ID NO: 299207 - DNA, 685 bp, Unknown
  Bacterial polypeptide expressing nucleotide sequence isolated from the Sargasso Sea
tttttgaattgtgaaaatccaactcatcaaccaaaggcaacagagcacatagacttaatgatacaaatgataaatggcttaataaaaaaaggttatgcttatgaaaataataaacatgtatactttgaagttaaaaagtttcctgactatgggaagttatcaaataaaaaattagaagatttgattgcaggatcaagagttgaaattagcgataacaaaaaaaattctgaggattttgttttatggaaaccgtcatctaaagacgagccttattgggattctccctggggaccaggtagaccaggatggcatttagaatgttctgctatgtcaaaaaaaatcctaggtgacgaatttgatatccacggcggtggaatagatttaatttttcctcatcatgaaaatgaaattgctcaatcaaggtgtgcaaacgatactaggagttttgcaaattattggatacataacgcgtttatcacaatgtcaaatgaaaaaatggctaagtctcagggaaatattctaaaaataaaagaatttagaaaaaaaatgagtggtcaagtaatcagattagcactgatgagtgcacattataggcagcctttagattggaatgataaattattaattgattgtgaaaatactttagataaatggtaccaaattagtttagataattttaattctg

SEQ ID NO: 299208 - DNA, 761 bp, Unknown
  Bacterial polypeptide expressing nucleotide sequence isolated from the Sargasso Sea
acttttgaggttaaaaaatttaaagactatggaaaattatctaataaaaacttagatgaattaattgctggttcaagagttgaaatatctgataataaaaaaaatccagaagactttgttttatggaaaccttctaaggataacgaaccatattgggattctccctggggaaagggtagaccgggttggcatttggaatgttctgtaatgtcaaaaaaatatttaggagacaaatttgatattcatggaggaggaatagatttaatttttcctcatcatgaaaatgaaatagctcaatctagatgtgcaaatgaaaacacagtttttgcaaattattggattcataatgggtttataactttgtcaaatgagaaaatggcaaaatctcaaggaaatattttaaaaattagtaattttaaaaatagtattaacggtcaagtattgaggttagcattgatgagtgcacactataagcagccattagattggaatgataaactaattgatgaatgtcagagtactttaaataaatggtatgaaagttatgaagagttaaaaaaaccagtcataataccagaagaatatttaaccccgctttatgatgatttaaatactcctgggtatattgctaacttacataaactatttgaaaaatcacaaaaaggtgagttaaaagataaagaaatttttacttcagcatgtaattttgttgggttacttacaacaacaaaaaaggaatggattgaatttaaaaaaagtaa

SEQ ID NO: 299209 - DNA, 853 bp, Unknown
  Bacterial polypeptide expressing nucleotide sequence isolated from the Sargasso Sea
acaatggatgaaattattgaaatgattcaaggtcttattgataaggaaaaagcctatgtgcttgaaggagaggttttcttccatgtgccgagttttaaagagtatggaaaattatctaggaaaaaattagatgaacttcaacatggaagaagagttcaagtagataaaagaaagaaaaatggtgctgattttgttttatggaagccggccaaagaaggagagccattttgggattccccttggggaaaaggtcgaccaggttggcatatagaatgttctgcaatggcaaaaaagtatttaggagaaacgattgacctccaccatggcggtgtagacctgatgtttccccatcatgaaaatgaaatagcccaaagtgagtgtgcgaacggttgtgaattttctaaaaattggtgtcataacgaatttttaaattttggtttagaaaagatgtctaaatctttaggtaacgtcattacaattcgtagttttgttgagtctttcggaggagaggttctaaggcatgttttaagttcggttcattacagatctaaaatggattggtcccaagaagttattgaaaaagctatctcagaaatggaaagaattcacgtatttgttcaaaatatggaagagacagttgaaaatgaggtagatgaagaaagtgaaaagcacttgttagaagtgaactctcttttagataaaatgaagaaagaattatcagatgactttaatgtaccaggggcattaagctgtttattttctttgataaggatgattaatagagagtactttggagctaaaaaagaaggagataagatctttgttggtaagagtttaaggaataaagttatga

SEQ ID NO: 299210 - DNA, 862 bp, Unknown
  Bacterial polypeptide expressing nucleotide sequence isolated from the Sargasso Sea
tatgcatggtggccctacagtttataattatgcgcacattgctaatgcccgaatggcggttgtgtttgatacctttgtaagaaccttaagaattttttatccaaaagttacatatgtatcaaatattactgatatcgatgacaaaattatagaggcagctcatgagcagaaagttgaaatttcttcaattacaaaaaaatatacaaaaatctataatgatgatatggctgaattaaatgttttgatgcctgacatccaaccaaaagctacagagtatattccagaaatgattgaattaattcaggatttgatttcaaaagattttgcatatgaaaaagaaggccatgtactttttcatgttcctaattatgttaattatggaaaactttcaaaaagaaatagagatgaacaaattgcaggtagccgagtagagatagcacctttaaaaaaagatcctgctgatttcgttttatggaaaccaagtgataagtcacaaccaggctgggattctccttggggagttggtcgcccaggttggcatacagaatgttcagcaatgtcaaaaaaaacattaggccttccttttgatattcatggtggcggcagggacttaatttttccgcatcatgaaaatgaaatagctcaaagttgctgttcttccgcaaacattgaagatcccacatcttatgctaaatattggatgcataatgggtttgtaactattgatggtgaaaaaatgtctaaatcactaggcaacataatacttgtaaatgagttaacagaatcccaccatggtgaagtgattagactggctctattatcatcacattataggcagggcttagattggaacgaaaaataa

SEQ ID NO: 299211 - DNA, 820 bp, Unknown
  Bacterial polypeptide expressing nucleotide sequence isolated from the Sargasso Sea
ttttgtgctgtggaaaccaagcagtgaggcgcagcccggctgggacaacccgttttctgatacgcctggccgtcccggatggcacatcgaatgctcggcgatggcaaagcattatctcgggccaaccttcgacatccatgctggcgggctcgaccttgtgtttccgcatcatgagaacgagatcgcgcagtcctgctgtgcccatggcaccgatatcatggcggcctactggcttcacaatggctatgtgacaatgggcgatgagaaaatgtcgaagtcgcttggcaacatccttgccgcacatgaggccatcagcgaacatcgcggcgagacagtgcgggcagcgttgctggcggcgcattaccgggcgccggtggtgctgagcgatgatgcgcttgccgaggcgcgcaatgtccttgaccgcctctatcgtactgttggcgacgcagaggccagtaaagatgccgtcgacgatgtgtttctggcggcgttggctgatgatctgaacacaccggctgccatggcgcggcttcacgagctggccggcgcggcaaaccgtggtgaggctggcgccgcgacggcgttgaaatcaagcgccgccctgcttggtcttctggagcagagcgcaggcgactgggcgcgcggtgacacaggtgccgacggcatggatgacgccgccatcgaagctgcaatcgaggcacgcaaggcggcccgggcgaaccgtgattttgcggctgctgacagaattcgcggcgatctggctgcgaatggcattcttcttgaagatggaccagacggtacggtttggcggcgaagctag

SEQ ID NO: 299212 - DNA, 826 bp, Unknown
  Bacterial polypeptide expressing nucleotide sequence isolated from the Sargasso Sea
ggaaacaattaagtattttcatgatgattgtttaagtttacaaaatattttgcctgatatagagccgaaagccactgatcatataaatgaaatgattgaaatgattaaagttcttatagaaaaagattttgcttatgaatcatctggaaatgtattgtttaaagttaataggtataaagattatggcttgctttctaaaagaactttggaagagatgatagccgggtcaagagtagaaatagctgattacaaagaaaacccaggggactttattctatggaaaccttcctcaaatgatcttcctgggtgggtaagtccctggggcagaggtcgtccaggttggcacatagaatgttctgcaatgagcaaaaaatatttaggtaagacttttgatattcatggaggagggatagacttggtctttcctcatcatgaaaatgagattgcacaatcatgttgtgctaatgaaactgaaatcatggcaaaatattggattcataatggatatgttaattttgagcataaaaaaatgtctaagtctttaaaaaattttgtaactatttctgaattattagaaaaatttaatggtgagataataagatattttttattacagacacattatagagccccattaaattataggtatgaatatttaaatgaatcgaaggcttcattatcaagattatatagagcagttcaaggtttagaagttaacggtatcccagatgaagaaataataaaatgtctaaaaaatgacttgaatacccctaaagccattgctagatctcattatctagctgaaaatgcaaataaaggaagtaaa

SEQ ID NO: 299213 - DNA, 410 bp, Unknown
  Bacterial polypeptide expressing nucleotide sequence isolated from the Sargasso Sea
aatgagtaaagatatttttttaacaaacaatttaacaaataaaaaagagaagtttgttccactagataaaaataatattagaatgtatgtgtgtggtccaactgtttatgatgatcctcatattgggaatgcgagaccaatagttgtatttgatattctatttaaaatttttaaaaaaaattatcctaaagttacttacgtccgaaatattacagatgtagatgataaaattattaaatcttcaaaagaaaataatatttcaatttcagaattaacaagcaaagtaactaaaagttttagcgaagattgcaattacttaaattgtgaagaaccaacacatcaacctaaggcaacagaaaatatagatttgatggttgaaatgatttctgaattactaaaaaaaggatttg

SEQ ID NO: 299214 - DNA, 445 bp, Unknown
  Bacterial polypeptide expressing nucleotide sequence isolated from the Sargasso Sea
gatgacgttaacactctacaatacgctatcccgcgacaaggaagaattcgtccccatcgagcccgaccgggtgacaatgtatgtctgcggaccgacggtctattcctatgcccatatcggaaacgcccggcccgcggtcgtgttcgatgtcctggtccggctgttacgtcaccaatggccgagggtgatattcgcccgaaatattaccgatatcgacgacaagattaacgccgcggccgcggaacagggcgtcgacattggcgagatcacggcaaaattcgaaaagatatacctggaagatatggcctcgcttggggtcgccccgccggatatcgacccgcatgcgaccgatcatatccccgagatgatcgcgatgatggaacgactgatcgaagagggccacgcctatgcggcagagggccatgttctgttcaacgttccgagc

SEQ ID NO: 299215 - DNA, 762 bp, Unknown
  Bacterial polypeptide expressing nucleotide sequence isolated from the Sargasso Sea
aatgatgagaatagtaaaaaacttaatccgcaagattttgcactatggaaaaaagccaaagatgatgagccattttttgattctccatggggtaaaggtaggccaggatggcatattgaatgttcggcgatggttaaagatgaattaggagatactattgatatccatttaggtggttctgatttaatttttccacatcatgagaatgaaatcgcccaatcagaagcagccaatggcaaaaagctagcgaactattggttacacaatgggatggtcaatgtaaatggacaaaagatgagtaaatcccttaaaaattttaaaactatcagagagctaattaagtcaggtataagccctatgactttgcgatattttgttatgactgtaaattacagaaaaccacttgattttactgaagaagctttaaggagtgcttcagaagcttggaaaaacattaatgtagccctgtctttcatagacctcacaaaaggtgcttttaaatcaattgatataaatgaatctatcgaagaagaatataaagagaaaataagttttgaattatctcaaaaaaagattagcttttctgaagctctgggaaatgaccttaatacagcaggtgctattgcaattatttacgatttagcgaaaccattaaaaaactttttaaaccaatttcaaaggatcgaagattttaaaatagacctaaatgaaaaattctttctacttgagaactttaaaacacttaaaaagttaactgaggta

SEQ ID NO: 299216 - DNA, 778 bp, Unknown
  Bacterial polypeptide expressing nucleotide sequence isolated from the Sargasso Sea
atttaaaccaattaatccaaaaaatatcgggatgtatgtatgcggtccaacagtgtacgatgatccacatattggaaatgcgagaccactaataatttttgatatcttgtttaaagttttaaaatgtaaatacggaaataaatcagttacttatgttcgaaatattactgatatagatgacaaaattataaaatcctctgaggaaaaaaaaatttcgataaccgaattaacttcgaatataatcaaaaaatttcatgaagattgtaaatatttaaattgtgaaacaccaactcacgagccaaaagccactgataacattgaattaatgatcagcatgattaatgatttaattaaaggtgaatttgcttatgaaagtgagcaccatgtttattttagggtgaaaaaatttaaaaattatggaatgctttcaaataaaaatgttgatgatttaatagcaggtgcgagggtagaattatctgacaacaagcaaaatccagaagactttgtattatggaaaccatcaattgacactgagccatcttgggactctccatggggcaaaggtagaccaggatggcatttagaatgttctgtgatgtcaaaaaaatatcttggtaatacctttgatattcatggaggtggtagagatttaatattccctcatcatgagaatgaaattgctcagtcattatgtgcaaataaaacgaaaaaatttgcaaattactgggtgcacaataaaatcattactatgtcaaaagagaaaatgtctaaatcccaa

SEQ ID NO: 299217 - DNA, 823 bp, Unknown
  Bacterial polypeptide expressing nucleotide sequence isolated from the Sargasso Sea
tatgaataacttatatttatataatacccttgaaaaaaaaacatctgtttttaatcccattgataaaaataatgttagaatgtatgcatgtggacctacagtttatgattttattcatattggtaacgcaagacccttagttgtatttgatgttttagttcgattacttagaaaaatgtatcctaaagttacttatgttagaaatatcactgacattgatgacaaaatcaacaaaagagcgactgagaaagaaatacaaatatcggaattgactaaagaaacgataaaaaattttcattacgattgtaaatctttaggtaatttaaatcctgattttgaaccaagggctacagatcacattaatgaaataattgagatgattgaaatattaatttcaaaacggtttgcttatgtttcttcaggaaatgttcttttttcggttggaaaatttaaaaaatatggaatgttatcaggaaggtcgctcaaagatatgatatcaggttcaagagttgatattgcagaatataaagataaaccaggagacttcattctatggaaaccttctacagaggatttaccaggttgggatagtccttggggaagaggacgaccgggttggcatattgaatgttctgcaatgagtaaaaagtatttaggtgagcagtttgatatacacgcaggtggtttagatttaattttcccgcaccatgagaatgaaattgctcaatcttgttgtgcaaatgattcagaagttatggctaatttttggcttcataatggttatgtaacttctgatggtgaaaaaatgtcaaagtcactggaa

SEQ ID NO: 299218 - DNA, 706 bp, Unknown
  Bacterial polypeptide expressing nucleotide sequence isolated from the Sargasso Sea
gttaattattggatgcacaatggttttgttcgaatcaatcatgaaaaaatgagcaaatctaaaggaaatttttttactcttaaaaaaatctatgaaacttttcatccagaaatcgttagattttttattttaggtactcattatagaaatcctatagatttctcctatgaggtaatgagcgatgcttctaaggggctagatcgactatataatttattgttgaaattaaacactacgtctaagaaaaaagatcaaaaacttttttcgttaattcaaaaatgtacaacagaattcagggaactgttttctgaagctatggatgatgattttaatagtgcacgcgctttaggttacttttttgattattcaaaaaaaataaatgcgatattgaatgacaaagagatacttattactgaagatgctgctttactagtgaaagaacaatttgaagttattgagcaagtattaggtattttatcccataatcctgaggaatggttcaaattgagattaaatcgagatcagtttgggaaagaagatacggaattaaaacctgaagaaatagaaaaattaatattattacgtaatgaagcgaggaataataaagattacgaacttgcagataaaatacgtcatcaattaggtgattcaggaatttcagttgaagacagtagcgacggaacgatttggaaaattatcagatgaa

SEQ ID NO: 299219 - DNA, 835 bp, Unknown
  Bacterial polypeptide expressing nucleotide sequence isolated from the Sargasso Sea
aggaacataactgatattgatgataaaattatcaaatcgtctcaagaacaaaaaatttccacaaaagaacttacagaaaaagtaacttcaagttttttaaaagattgtaaatttttaaattgtgaaaatccaactcatcaacctaaagctactgagcatatagatcttatgattgaaatgattgctgaattgatcaagaaaggttttgcttatgaaaatcaaaaacatgtgtattttgaggtaaaaaaattttctgattatggaaaactatcaaataaaaatttggatgatttgattcctggatcaagaatagaaattagtgaaaataaaaaaaattctgaagactttgttttatggaaaccctcaataaatgatgaaccttactgggactcaccttgggggaaaggtagacctggttggcatttggaatgttcagcaatgtcaaaaaaatttttaggtagcgagtttgatattcatggtggtggtatagatttaatctttccacatcacgaaaatgaaatagcacaatctagatgtgcaaatgaaacaaaaacttttgcaaaatattgggtccataatgcctttatcacaatgtctaatgagaaaatggctaagtcacagggtaacattcttaaaattaaagactttagaaataagattagtggccaaataattagattagctttgatgagtgcgcattacaaacaaccacttgattggaacgataaattgttaagtgattgtgaaaatactttagataaatggtatcgagtttattcatctgatttaaaatctgtgaaaattccagatgaaattttaaaacccactatatgaa

SEQ ID NO: 299220 - DNA, 698 bp, Unknown
  Bacterial polypeptide expressing nucleotide sequence isolated from the Sargasso Sea
gatgagtaaagatatttatttaacaaataatctaacaaataaaaaagaaaaatttgttccactagataaaaacaacattagaatgtatgtgtgcggtccaacagtttatgatgatcctcatattggaaatgcgagaccaatagttgtatttgatattctatttaaaatttttaaaaaaaattatcctaaagttacttatgttcgaaatattacagatgtagatgataaaataataaaatcttcaaaagaaaataaaatttcaatttcagaattaaccaacaatgtaaccaaaagttttggtgaagattgtaattacttaaattgtgaagaaccaacacatcaacctaaagcaacagaaaatatagatttgatgatagaaatgatttctgaattaataacaaaaggatttgcttatgaaaataataagcatgtttattttgaggttaaaaaattcaaggattatggtcaattatcaaataaaaaattagatgaacttattgctggatcaagagtagaagtcagtgaaaataaaaaaaattcagaagattttgttttatggaaaccgtcagaagatgacgaaccttcatgggaatctccatggggaaaaggaagaccaggatggcatctagagtgttcagcaatgtcaaagaaatttttaggagatgagtttgatgttcatggaggtggtatagatttgt

SEQ ID NO: 299221 - DNA, 874 bp, Unknown
  Bacterial polypeptide expressing nucleotide sequence isolated from the Sargasso Sea
ataatgaataaagatatttttttattaaatagccttggtggaaaaaaagaaaaatttaatccaatagataaaaaaaaagttggcatgtatgtatgcggacctactgtgtatgatgagccacatattggtaatgctagaccacttgtagtttttgacttgctgtttaaagttcttaaatgcaagtatggtaacaaatctgtaacctatgtcagaaatataaccgatattgacgataaaattattcaatcatcaaaacaaaaaaatatttcaattaatgaattaacgtctagtgttacaaaaaaatttcacgatgattgtaattatttaaactgcgaagtgccgactcacgaacctaaggcaacagataatatcgaattaatggttaagatgataaaagaactaattaaaaatgaatttgcatatgaaaacgagaagcatgtatattttaaagttaaaaaatacgaaggttatggaaaactctcaaataaaaatattgatgatttaatagcaggatctagagttgaactatctgattataaggaaaatccagaagattttgttttatggaaaccgtcaacagacgatgaaccttcgtgggattcaccatggggcagaggaagaccgggatggcatttagaatgctctgtgatgtctaaaaaatatcttggtaatacatttgatattcatggaggtggtagggatttaatatttccacatcatgaaaatgaaattgctcaatctgtatgtgcaaataaaacacaaagttttgcaaattattgggtacacaatggttttattactatgtcgaaagaaaaaatggccaaatctcaaggaaatattttgaaaattagtgattttaagaaaaaagtataat

SEQ ID NO: 299222 - DNA, 139 bp, Unknown
  Bacterial polypeptide expressing nucleotide sequence isolated from the Sargasso Sea
tataaaagatatttgggtgaagaatttgatattcatgggggtggtagagacttgatttttcctcatcatgaaaatgagattgctcaatcaagatgtgcaaatgaaacaaattcatttgcaaattattgggttcataatg

SEQ ID NO: 299223 - DNA, 634 bp, Unknown
  Bacterial polypeptide expressing nucleotide sequence isolated from the Sargasso Sea
aatgaataaagatatttttttaacaaatagcttcagtggaaaaaaagtagaattccaaccaattgatgaaaataatattaaaatgtatgtttgtggcccaacagtttatgatgatccacatataggtaatgcaagaccattggttgtattcgatttactttttaaagttctaaaatgtaaatatggaaatgacaaagttacatatgtaagaaatattacagatattgatgataaaataattcaatctgctaaagataaaaaaatttcaattaaagatctaactgtaaaaataaataataattttcaaaaagattgtaattatcttatttgtgaaaaaccgagttttcaacctaaagcaacagaaaatattaaagaaatgatagagatgattagtattttaattgaaaaaggttttgcatatgaaagcaataaccatatctattttgaagtaaataaatttaaagattatggaaaattatctaataaaaaaatagatgatttaatatctggatctagagtagagatatcaagcaataagaaaaacgctgaagatttcgtattatggaaaccttcaaatagagatgagccaagttgggaatctccttgggggaaggcagaccagggtggcatttag

SEQ ID NO: 299224 - DNA, 827 bp, Unknown
  Bacterial polypeptide expressing nucleotide sequence isolated from the Sargasso Sea
gcaggctggcgcgcgcgttgatgtcgttgacgtcaagcgtaacccgatggacttcgtgctgtggaaaatgtcgaaagagggcgagccgagctggccgtcgccgtggggcaacggtcgtcctggctggcacattgaatgttcggcgatgaactgcaaacagctgggcaaccattttgatattcacggcggcggttcggatctgatgttcccgcatcatgaaaacgaaatcgcccagtccacctgtgcccatgacggggaatacgttaactactggatgcactccgggatggtgatggttgaccgcgagaaaatgtcaaaatcgctgggcaatttctttaccgtgcgcgacgtgctgaagtactacgatgcggagaccattcgctacttcctgatgtccggccactatcgtagccagctgaactacagcgaagaaaacctcaagcaggcgcgttctgcgctggagcgtctgtataccgcgctgcgcggaaccgacaaatcggcagagccggccggcggcgacgccttcgaagcgcgctttattgaagcgatggatgacgatttcaacaccccggaagcctattccgtgctgttcgatatggcgcgtgaagtgaaccgcctgaagacggaagatgtcgccgcggctaacgccatggccgcccatatgcgcaagctctccggagtgctggggttgctggagcaggagccggatgtcttcctgcaaagcggcgcgcaggctgacgacggtgaagttgcggaaatcgagcagctgattcagcagcgtctggatgcgcgtaaagcgaaagactgggccgctgcggatgcggcgc

SEQ ID NO: 299225 - DNA, 571 bp, Unknown
  Bacterial polypeptide expressing nucleotide sequence isolated from the Sargasso Sea
tttaggtaacttcttcaccattcgtgatgtattaggccattacgacgctgaaaccgtgcgttacttcctgctatcgggtcactatcgtagccaaatcaactactcagaagaaaacctcaagcaggcgcgtgccgccctagagcgtttatacactgcgattaaagatgttgacctgactgttacagcagcacctgcggaagagtttgtcgctaagtttaaagcggccatggacgatgactttaatacgccagaagcttattcagtgctgtttgatatggtacgtgagatcaaccgcttgaaaaccactgatatggcgcaggcgtcagctatggccgttgccatgaagcaactggccgatgtattgggattattgcaccaaacgccagattccttctttaaaggcgaaggtagtgacgatgaagtggcagagattgaagcgcttatcgttgagcgtaatcgtgcccgcgccgagaaagattggccagcggctgatgttgcgcgcaatcggttaaatgagcttggtgtggttttagaagatggcccaagcggtaccacttggcgtaagaaatag

SEQ ID NO: 299226 - DNA, 571 bp, Unknown
  Bacterial polypeptide expressing nucleotide sequence isolated from the Sargasso Sea
atgaataacgatatttttttaacaaacaatctaactaacaaaaaagaaaaatttgttccaatagatgaagaaaatgtaagaatgtatgtttgtggaccaacagtttatgatgatcctcatattggtaatgcaagaccaattgttgtttttgatatcctctataaaatttttaaaaaaaaatattcaaaagttacatatgttagaaatattacagatgtagatgacaaaatcattaaatcttctaaagaaaataatatttcaatttcagagttaaccaacaaagtaaccaaaagttttggtgaagattgtagttacttaaattgtgaaactccaaatcaccaacctaaagcaactgaaaacattgatttgatgattgaaatgatttctaaattaatcaaaaatggttttgcttatgaaaataataaccatgtttattttgaggttaaaaaattcaaagattatggtcagctatcaaataaaaaattagaagacttaattgcaggatcaagaattgaagtaagcgataataaaaaaaactcagaagattttgttttgtggaagccatcagcaa

SEQ ID NO: 299227 - DNA, 598 bp, Unknown
  Bacterial polypeptide expressing nucleotide sequence isolated from the Sargasso Sea
acctaaggctacagaaagtatttctataatgattgaaatgattgaagtgctattaaaaaatggatttgcttatgaatcagataagcatgtttattttgaggtaagtaaatttaaagattacggaaaattatcaaacaaacaattagatgagctaatagcaggtgcaagaattgaagtttcaaaaaataaaaaaaatcctgctgattttgttttatggaaaccttcaacaaaagaggagccatcttggaattcaccatggggaagtgggaggcctggttggcatatagaatgttcagctatgtcaaaaaaatttcttggagacacatttgatattcatggaggtggcagagatttaatttttcctcaccatgaaaatgaaattgctcaatcaagatgtgctaatcaaaaaaatgtttttgctaattattggatccacaatggatttataacaatctcaaatgaaaagatgtcaaaatcacaaggcaatattttaaaaataagtgattttaaaaataaaattaatgggcaagttcttagattagcattgattagctctcattataaacagccacttgattggaatgaaaaactattctag

SEQ ID NO: 299228 - DNA, 760 bp, Unknown
  Bacterial polypeptide expressing nucleotide sequence isolated from the Sargasso Sea
cattaaaggtatgattaacatggctaaaaatcttttgaaaaataatcatgcttatgaaaaagataaacacgtatatttttcaataaattcatttaaaaattacggcaagttatctaaaaaaaatcccaaggaattagttgcaggagcaagagtagaggtttctaaatcaaaaaatcatcctctagactttgttctttggaaaccttcagcaacaggtgatccaggttgggattcaccttggggcagaggaagacctggttggcacttagaatgttcagtaatgagtgaaaaatttcttggaaaaaactttgacatacacggtgggggattagatcttgtttttcctcatcacgaaaacgagatagcacaatcatgttgtgcaaaccaagtagataaatttgcaaattattggttacataatggctatgttacttttaacaaagaaaagatgtcaaaatctttaggaaatattgttacgattgaaaaaatgagaggaacaattaacggacaggtcgttaggtttgcactgttgagcacccattacaaacaaccattagattggaacgaaaatttaataaaggaaagccagaatacacttgataaatggtatactcaatttgaaaatacaaagcaagaagatttgaacgaagatttattgcagcctctcttagaggacataaatactccaggttatatatcaaaattacactcactttatgacaagtcatctaaaggagatgttactgcaaaaaaacttttt

SEQ ID NO: 299229 - DNA, 817 bp, Unknown
  Bacterial polypeptide expressing nucleotide sequence isolated from the Sargasso Sea
atctaattctggagaaccattttgggatagtccttggggcaagggtaggccaggttggcatatagaatgttctgcaatggtaaagaaacatcttggggatcagatagatattcatggcggaggaatggatcttatttttcctcaccatgaaaatgaaattgctcaaagtgaatgtttttcctcaaaaaaaccattcgttaagtactggatgcataatggtatgttgagagttaagggggcggaaatgagtaaatctctaggaaatacatttagcataaatgaggccctgaaacgatttagttctgacgcaataagactatggatattacaaacccactatagaacaaatccattactagatttagattcaattaaatcaaccgaaaaatctcttacacgtttacgattaataaactcagaagtaaaaagtaaacctgaactcaaaaaaatgaatttcatcagtttcaaacaaagatttatagaatctatggatgatgacttaaatactcctaaagcaatagcaactgtatttgatttagcaaaaatgattaataaatcatcatcaacacatgacgttagcgaagggttgattttgtttagagaactttcaaatattttaggattaaattataagaaattaataaaagataaagttgctaatgatgtaaatatcaacgagattgaattaatgattgaagaaagaaatcaagccagattagacaagaactggaaagaggcagatttaattagagataaactgtttgagttaggtatagaaataactgatacctcagaaggaactacatggaagaactag

SEQ ID NO: 299230 - DNA, 766 bp, Unknown
  Bacterial polypeptide expressing nucleotide sequence isolated from the Sargasso Sea
gacaaatgaaccctcttgggatagcccttgggggggtggaagaccaggatggcatatagagtgttcagctatgatttctgaattacttggagaaactattgacattcacgctggaggtattgatttaatattcccccaccacgaaaatgaaatagctcaatcaacatgttgtcatgataaaaaaatgtcaaacttttggctccataatggttttatcaactttaagggagaaaaaatgtcaaaatctttaggtaatacaacaattgttaatgatttgttagctaaacatgacccaactgttttaaaatattctctcttaactacccattatcggcaaccaatagatttttcaaatgatctactaacttatagtcaaaacattataaataagtgggaaaactatatacaagaggttaaaagttcagaattagacactgaatttgtcagtgcacttttagatgatttaaataccccaaaagcactaatgagattgcagcaaattatagcaaatttgaaaaaagatagtaataaagaggttttattggctcattttaataatggcttaagtctattgggtttaaatcctagttttctaaaaaaagatttagaccttgataaagaatatattgaaaatatgatatctcgccgacaaatagctaaaagcaacaaagactttgaacttgctgataaaattagagatgagctatttaaacaaggaattgttttagaagacacaaaaaatgagacgacatggaagaaaaactag

SEQ ID NO: 299231 - DNA, 700 bp, Unknown
  Bacterial polypeptide expressing nucleotide sequence isolated from the Sargasso Sea
ggtaatacatttgatatacatggcggtggaagagatttaatgtttccacatcatgaaaatgaaatagctcaatcggtatgtgctaacaaaactaaaagttttgccaattactggatacataatggttttataactatgtcaaaagagaaaatggcaaaatcacagggaaatattttaaaaataaatgattttaaaaataaatttaacggacaagttttaagattagcattgataagtgctcattacagccaaccactagattggaatgataaactcatggatgaatgttatagaacacttgataaatggtatgggtgttatgtacctataaataaaaaaattttaatagaagacgatgatttaaaaccattatatgacgatttaaataccccaggatatattgcagtacttcacaaactctatgaaaaggctaaagaaggaagtatttcagataaagaagtatttacaacagcttgcaattttattggattattgaatgaaacaacagaacaatggaattactttaagaaaggaaagctaactttaaccgatgagcaaattttacaaaagatagaacataggaataaagcaagagatgaaaaaaactacaagcttgctgatgaaatacgaaacgaattattggataaaggtattttaattgaagataaagatggtaaaacaatctggaaaattaaatgag

SEQ ID NO: 299232 - DNA, 844 bp, Unknown
  Bacterial polypeptide expressing nucleotide sequence isolated from the Sargasso Sea
gatgctttacgatacatttaccaattcaaaaaagaagtttgaaccaattgatccaaataatgtgcgaatgtacgtttgtgggccaactgtttacgattatgcgcatgtaggcaatgctcgaccagttatagtgtttgatattttatttcgattactccaaaggatttatggtagtgaaaatgtaacttatgtaagaaatatcactgacgttgatgataaaattatacacgcagcaaatgatcaaaatgaagacattggaatacttacagaaaagacaattaattactttcatgacgatgcgaaatatcttggtgctttaaaacctacatttgagccaagagcaaccgaacatatacctgagatgatcgagttgattgaaaaactcatatcaaaagagtttgcatatatagcgaatggtaatgttcttttttcttcaaataaatttaaagaatatggaaaactctctggcaagaatttaaatgaaatggttgctggttcgcgtgtaggtgtagaaagttataaaaaagaagagtctgattttgtattatggaaaccttctaaagaagatgagcccagttggaaaagtccatggggcgatgggagacctggctggcacattgagtgttctgcaatgagtgaaaaacttttaggggaaaattttgatattcatggaggaggccaagatttaatatttccacatcatgagaatgaaattgctcaaagtgagtgtgcaaataataacaaatttgcaaattattgggttcacaatggctttgtcactgttgaaggtaataaaatgtcaaagtctgatggtaattttgtaactgtaaacgagttaaaagac

SEQ ID NO: 299233 - DNA, 710 bp, Unknown
  Bacterial polypeptide expressing nucleotide sequence isolated from the Sargasso Sea
gatgtcaaaaaaatatttaggtgaaacatttgatatacatggtgggggaagagatttaatttttcctcatcacgaaaatgaaatagctcagtcggtatgcgcaaataacaaaaaatttgcaaattattgggttcataatggttttatcacaatttcaaaagaaaaaatgtctaagtcccaaggtaatattcttaagattaacagtttaaaaaataaatataatggtcaagttttgagattagctttaatgagctcacattacaaacagcctttagattggaatgatcaattaatggaagaatgttataaaactttagataaatggtattcttgttatcttaaattagaaaaaaaagttttaattgatgatgatgatttaatgccattatatgacgatctaaatacgccaggttatatatctgtacttcataaattatttgataaagcgaagtctggaaaccaacaagacaaagaaaaatttatagcaggatgtaattttgtaggacttttacaggagagtaaagatgattggttatcttttaaaaaaagtaaaatggatatttcagaggcagaaataaacatattgattgataaaagaaatgaagcaagggctaataaaaattacagtttagctgacaaaatcagaaaagagcttttggacaaaggtgttttaattgaagataaagatggtaaaacaatctggaaaataa

SEQ ID NO: 299234 - DNA, 779 bp, Unknown
  Bacterial polypeptide expressing nucleotide sequence isolated from the Sargasso Sea
accattttgggattctccatggggtaaaggcagacctggttggcaccttgaatgctcagtaatgtctaagaaatttttaggtgataaatttgatatccatggcggaggaatggatttaatttttccacatcatgaaaatgaaattgcacaatccagatgttctaacgaaaatgatacatttgcaaattattgggttcataatggatttataacaatctcaaatgaaaaaatgtcaaaatcacaaggtaacattttaaaaattggtgattttaaaaataaagtaagtggacaagtattaagattagctttgatcagtgcacactacaagcagcctttggattggaatgataaacttttaactgagtgtgaaaaaacaattaacaagtggtatgaaagttatactgatattaaaaaacaagttttaattcctgaagattatctttctccattatatgatgatttaaatacaccaggttatattgccaatcttcataaactatttgaaaaatctcaaaaaggttcaagtaatgataaagagatatttgtttcagcatgtaattttatcggcttattgaatgaaactaaaaattcatgggatcaatttaaacaaaaaaaatctaagatttcagaagaagaaattaaacaaaaaattgctgaaagaaataatgctagaaaaaataaagattataaagctgctgataaaataagaaatgaattattagataaaggagttttaattgaagacaaagatgataaaactctgtggaaatttaaatgag

SEQ ID NO: 299235 - DNA, 778 bp, Unknown
  Bacterial polypeptide expressing nucleotide sequence isolated from the Sargasso Sea
tctaagcatgtgaaaatatatgcatgcggaccaactgtttataattatgcgcatataggcaatgcgagaatggcagttgtttttgatacttttgtaaggacgctaaaggctgtttatccaaaagtaacttatgtatctaatattacagatattgacgataagataattgaagcagcaaaagaacaagaagttgaaatatctcaaataacagacaagtatacaaaaatttataatgaagatatggcaagacttaatgttttaccgccagatgttcaacccaaggctacagaatttatccctgaaatgatcaatttaattgaagatttgattagtaaagattttgcttatgaaaaagaaggacatgtcttatttcatgtacctttgtatttaaattatggaaaattatcaaatagaaacagggaagaacagatagcgggcagcagagtagaggtagcaccttttaaaaaagacccagcagattttattttatggaaaccaagcgatgatacacaacccgggtgggattctccatgggggattggaagaccaggatggcatacagaatgttcagctatgtccgaaaaaacacttgggttgccatttgatatacatggaggaggaagagacttaatctttcctcatcatgaaaatgagattgcacaaagctgctgctcttcggcaagtatcgatgatccaacttcttatgctagatattggatgcacaatggatttgttacgattgatggagaaaaaatgtctaaatctctaggtaatatta

SEQ ID NO: 299236 - DNA, 361 bp, Unknown
  Bacterial polypeptide expressing nucleotide sequence isolated from the Sargasso Sea
atgaaattgcgaatttatgatacttttaaacgagcgaaagttgacttcacacctaataactcctctcacgtgaaaatttacgtctgtggtcctacagtctatgactttgcgcatataggaaatgccagacccgtaatcatatttgatgttttagtccgattactcaggcatctatatccaaaagtaacatacgttagaaatattacagatatcgatgacaaaattaatgctcgaagtctggaaactggagagagcataaatttaataacggaccgaaccactagagccttcgaagaggatatgtcagcattaaactcgcaaaagccagactatgaacctcgtgcaacagaccacgtgaaga

SEQ ID NO: 299237 - DNA, 398 bp, Unknown
  Bacterial polypeptide expressing nucleotide sequence isolated from the Sargasso Sea
cgtggagttctatgtgtgtggaccgacggtctatgactacgcgcatatcggcaatgcgcggccgatcgttgtgttcgatgtcttgtatcggctgctgcagtgtctctacccgaaggttacatacgtccgcaatattacggatatagacgacaaaattaacgcgcgttcggccgagagtggcgagcccattaatgagattaccgcccggacgactgctcaatttcatgaggacatcgccgctttgggtgccttgccgccggatattgagccgcgcgcaaccaatcatgtcgcggagatggttgaaatgatcgaaggcctgattgaaaaaggtcatgcttatgccgccgaaggccacgtcctctttaacgtaccgtcctgggaggcatacggtcgcttat

SEQ ID NO: 299238 - DNA, 265 bp, Unknown
  Bacterial polypeptide expressing nucleotide sequence isolated from the Sargasso Sea
aatgagcaaagatatatttttaactaattcatttggaaacaaaaaagaaaaatttattccaattaaccccaaaaaaattggaatgtatgtttgcggaccaaccgtttatgatgatccacatattggtaatgcaagaccattagttgtctttgatatactgtttaaaattttaaaatcaatttatggaaatgatgctgtaacttatgtaagaaatataacagatatcgacgacaaaataataacttcttcaatagaaaaaaaaatt

SEQ ID NO: 299239 - DNA, 694 bp, Unknown
  Bacterial polypeptide expressing nucleotide sequence isolated from the Sargasso Sea
aagaaaacaatatttcaatttcaaaatcttacaaaaaaaatcactcaaagttttaatgaggattgtatttatctaaattgtgaaaaaccaaatcatgagccaaaagcaactgagcatatttctgagatggttgaaatgatctctgaattaattaaaaaagaatttgcatatgaaaataagaaccatgtttatttcgaagtaaaaaaatttaaagattatggccagttatcaaataaaaatttagatgaattggttgcaggatcaagaattgaagtaagtgaaaataaaaaaaatcctgaggattttgttctatggaaaccatcagaaatagatgagccatcatgggactcgccttggggcaaaggaagacctggctggcatttggaatgttcagcaatgtctaaaaaatacttaggaaaagaatttgatattcatggaggaggtgttgatttgttatttcctcatcatgaaaatgaaatcgctcaatcaaggtgtgcaaatgatagtaaggtatttgctcattattggttacataatgcatttattacaatgtccaacgaaaagatggcaaagtctcaaggtaatattttaaaaattaaagattttagaaatacgaaaagtggtcaagtattaagattagctttactgagcgcacattatcgacaaccactcgatggaacgataagcttttaaa

SEQ ID NO: 299240 - DNA, 776 bp, Unknown
  Bacterial polypeptide expressing nucleotide sequence isolated from the Sargasso Sea
aatggatatttttttaacaaacaatttaacaaataaaaaagagcaattcatcccgatacaaaaagaaaatattggcatgtatgtttgtggaccaacagtctatgatgatccacatattggcaatgcaagaccactagttatttttgatattctatttaagattttaaaaaataatttttcaaaagtcacatatgtaagaaacatcacagatattgatgataaaattattttatcttcacaaaaacttaaaatatcgacaaaagagttaactgaaaaaataactaaaagtttttttgaggattgtaaatttttaaattgtgaaaatccaactcatcagcctaaagcgacagagtatatagatataatgattcaaatgattaatgatttgattttaaaaggttacgcatatgaaaacaataaacatgtatattttgaagtaaaaaaattttctgaatatggaaaattatcaaataaaaagttagaggatttaattgcaggatcgcgagttgaaataagtgacaacaaaaaaaactctgaggattttgtgttatggaaaccatcaattaaagatgaaccttcttgggattctccttggggaccaggtagaccaggatggcatttggaatgttctgctatgtcaaaaaaacttttaggtaatgaatttgatattcatggtggtggtatagatttaatttttcctcatcacgagaatgaaattgctcaatcgagatgtgctaacgacacagaagttttttctaatttttggattcataatg

SEQ ID NO: 299241 - DNA, 229 bp, Unknown
  Bacterial polypeptide expressing nucleotide sequence isolated from the Sargasso Sea
atgagtaaagatatttttttaacaaataatctaacaaataaaaaagaaaagtttgttccaatagataaaagtaacattagaatgtatgtgtgtggtccaactgtttatgatgatccccatattggaaatgcaagaccaatagttgtatttgatattctatttaaaatttttaaaaaaaattatcctaaagttacttatgtgagaaatattaccgatgtagatgataaaa

SEQ ID NO: 299242 - DNA, 673 bp, Unknown
  Bacterial polypeptide expressing nucleotide sequence isolated from the Sargasso Sea
tatgaagtggccatctccatggggaattgggtttcctggttggcacttggagtgctcagctatgggtgcaaagtaccttggggatcaatttgatattcatggaggtggaatggatttaaaatttccgcatcacgaatgtgaaattgcccagtgtgttagtgctcacaagaaaaatcctgttaattattggatgcatgcaaatatgctaactttaaatggcaagagaatgtctaagagtacaggaaatacgttacttcctgaggatattttttctggtgaaaatgcaattttaaacaaggctttttctcctatggtagtacgttttttcatgcttcaagcacattaccgaagtatcttggatttttcaagtgaggcattgagtgcttcggagaaagggtttaataaactgatgcaggcaaatttactgttgcaaaaagctatttattctaaagcaacattggataagcaattggaaactaaagttgttgatttaataaatggttgttacaaacacatgaatgatgattttaatactcctttaactattgcaaccctttttgaattggttgcaataattaacacactaaattcaacgaattcttttggaaccctttctgaaaaagtatttaatagtcttcaaaatacaatgaatggctttattattgatgtactt

SEQ ID NO: 299243 - DNA, 901 bp, Unknown
  Bacterial polypeptide expressing nucleotide sequence isolated from the Sargasso Sea
atggtaacgataaggtttacttatataagaaacataacagatattgatgataaaattatacaggcagcaaaagaaaaaaagatttcaattaaagatttaacaaataatacaaataaaaattttcaagatgactgtaaatatctcaactgcgaagatccaactttccaaccaagagcaacagaaaatattaatgaaatgattgagatgattaagtctttaatatctaaaaattatgcttatgaaagtaacaatcatatttattttgaagtaaaaaaatttaaagaatatggaaagttatcaaataaaaaaattgatgatttaatgtctggatctagggttgaggtatcaagtttcaagaagaatgcagaggattttgtattatggaaaccatccaaagacgacgaacctagctggccatctccttggggaaaaggtagaccaggttggcatttagaatgttctgctatgtcaaaaaaatatcttggattgaaatttgatattcatggaggcgggagagatttaatttttcctcatcatgaaaatgaaattgctcaatcaagatgtgctaatgaaactgatgtattttcaaattattgggttcacaatggttttattacactttcaaatgaaaaaatggcaaaatcacagggtaatattttaaaaataagtgactttaaaaaaactataaatggccaagctcttagattagctctaataagtacccattataaacaacctttggattggaatgaaaaacttttagaggaaagtcaaaagactatagacaaatggtacaaaagctatgtcaaaattgacaaacaaaaattaatttcagatgaagatctttatcctttatatgacgatctgaatactccaaaagtatatagccaatcttcataaa

SEQ ID NO: 299244 - DNA, 474 bp, Unknown
  Bacterial polypeptide expressing nucleotide sequence isolated from the Sargasso Sea
tttatcaaacagcttaggcaacaaaaaggagaaatttattccaataaatgtcaataaaattggaatgtacgtttgtgggccaactgtatatgacgatccacacatagggaacgcaaggcctttagttgtttttgatatattgtataaaattttaaaatgtaaatttggagttagtaaagttacatatgttaggaatattactgatattgatgacaaaataattgaagcatcgattgaaaaaaaaatatctatcaaaaatctaaccaaagatattactcaaaagtttcatgaagattgcagttatttgaattgtgaaaaaccatcatatgaacccatggctacagaaaatatttctttaatgattgaaatgattggcaaattgctaaaaaaaggttttgcatatgaaaataataatcatgtttattttcaagtgaaaaaatttaataaatatggagatttgtctaataaaaattt

SEQ ID NO: 299245 - DNA, 856 bp, Unknown
  Bacterial polypeptide expressing nucleotide sequence isolated from the Sargasso Sea
agctgactttgccctttggaaaatctcttctgatgaagcttcttgcaattcaccttgggggaaaggaagacctggctggcatattgagtgttcggctatgagtagagattatttgggaaaaaattttgatattcacggaggaggtttagaccttaaatttcctcatcatgaaaacgaaaatgctcaatctaaatgtaaccatgatggattatttgctaacttttggttgcacactggacctttaactatagaggaagagaagatgtcaaagtctcttggaaatttcgttactatcaaagacatcctgaaaaaatatcacccggaggtgattagattttttcttttttctactcactatagaaatcctttgaatttttcttttcatggacttgaagaaagtaaaaaaacacttgataaattttatgatgctttgagaaaagtagatttatctgatactaaaaatattcctctcgatgagggagtcattgaaagtttaaaagatgatttcaactctcctaaattgatctcttttctgcataagattttagataaattaaatcagtcatttcttaataataaaaacgaatctaaatctacagctgatcttctcatttcatcggggagtgtaatgggattatttcaatctaagccagacgagtattttaaatttatttcatctgaagtgcttgtaacagaggaagaaatagaagatctaataactgaaagaaatcttgcaagaaatcaaaaagactttattaagtcagacaagattagagatgatttaaaagctaagggaattaatcttgaagattttggagaaaaaactatctggaaaaggatgactttagatgaataa

SEQ ID NO: 299246 - DNA, 826 bp, Unknown
  Bacterial polypeptide expressing nucleotide sequence isolated from the Sargasso Sea
gaaccaaaggcaactgaaaatatttcattaatgatcgaaatgattaataaacttattaaaaataaatttgcatatgaaattaataatcatgtttatttcgaagttaaaaaatttaaagattatggaaaattatcaaacaaaaatttagatgagttaattgcaggtgcaagagttgaggtttcggaaaataaaaaaaatcctgctgactttgttttatggaaaccttcaacagaaaatgaaccatcgtgggattctccatggggaaaaggtagacctggttggcatcttgaatgttcagtaatgtcaaaaaaatttttaggcgataaatttgatattcatggaggtggaatggatttaatttttcctcatcatgaaaatgaaattgcgcagtctagatgtgctaatgaaaatgaaacatttgccaactattgggttcacaatggatttataacaatcgctagcgaaaagatgtcaaaatcacaaggcaacattttaaaaattggtgattttaaaaataaagtaagtggacaagtgttaagattagctttaatcagtgcacactacaaacagcctttagattggaatgaaaagcttttatctgagtgcgaaaaaacaattaacaaatggtatgaaagttatactgacattaaaaaacaagtattaattcctgaagattatctttctccattatatgatgatttaaatacaccaggctatatcgctaatcttcataaactttttgacaaatctcaaaaaggctcaattaaggataaagaaatatttgtttcagcatgtaattttattggtcttttaaatgaaaataaaa

SEQ ID NO: 299247 - DNA, 742 bp, Unknown
  Bacterial polypeptide expressing nucleotide sequence isolated from the Sargasso Sea
atgatcgagaatctgattgagggagaattcgcctacgaaagtgaggggcacgtcctgtttcatgtgcctagtgaccccaactatggctcgctctctaaacgaagcttagaggatatgctggctggggcaagggtggagatcgcctcatacaagaaagatccaaaggatttcattttgtggaagccctcttcatcagacctaccaggatgggatagtccctggggaagaggtaggccgggatggcatattgagtgctcagcaatgattcaaaaacacctaggcgtccatatagacattcatggaggcggtagcgatttaaccttcccccaccatgagaatgaagcagcacagagccgctgcgcaaatcgatctaaagattatgtgaactactggttacataatgggatgatcactctggcaaatgagaagatgtctaagtctttaggcaatattttgggcattcgagcattactgaagaagcactcaggagaagttttacgatacgcccttctatccggccattatcgttcatcactctcgtggtctgatgaccttattcaacaagcgaaatcgagtttagactcgctttaccaaactttacgcgatcacagtcaaacggcagcactcagatcagttccaattgactcttctcttgaatgcgatcacgaatttgaactcgcactttgcgatgatctgaacacacccaaagcacttgctgctctgcatagaatcagcgatgaaa

SEQ ID NO: 299248 - DNA, 827 bp, Unknown
  Bacterial polypeptide expressing nucleotide sequence isolated from the Sargasso Sea
atgcgtccggatagtatgccaagagcaacgaatcatatatgtaatatttgctcctttataacaattcttgaggacaaaggttatgcatactctagggatggagatgtttattattctgtttttaaaaataaaaattatggaaagctaagtaatcaaaatatacaagaacaaaatatcaatcagcaaggcagaatggctaatgatgaaaatagtaaaaaacttaatccgcaagattttgcactatggaaaaaagccaaagatgatgagccattttttgattcaccatggggtaaaggtaggccaggatggcatattgaatgttcggcgatggttaaagatgaattaggagatactattgatatccatttaggtggttctgatttgatttttccacatcatgagaatgaaatcgcccaatcagaagcagccaatggcaaaaaactagcgaactattggctacacaatgggatggtcaatgtaaatggacaaaagatgagtaaatcccttaaaaattttaaaactatcagagagctaattaattcagggataagccctatgactttgcgatattttgttatgactgtgaattatagaaaaccacttgattttactgaagaagctttaaggagtgcttcagaagcttggaaaaacattaatgtagccctttcttttatggaccttacaaaaggtgcttttagatctattgataaaaatgaatatattgaagaagaatataaagagaaaataagctttgaattatctcaaaaaaagcttaaattttctgaggctctggaaaatgaccttaatacagcaggtgctattgcaat

SEQ ID NO: 299249 - DNA, 849 bp, Unknown
  Bacterial polypeptide expressing nucleotide sequence isolated from the Sargasso Sea
gtttttgattttttaattagatatctggctttcctagactatgaagttaattttgttagaaatataactgatattgaagacaaaataattgaaagggcagtagaggaaggaatcactaccaaggaattagctgatcgagtaacgaaagaatttcaagatgcctatgcaagcctgaattgcttacatccagatagagaacctaaggctactgaaactatagatcatataataaattttattgaggtcctaattgaaaatggatatgcatatgcaacacaatcaggtgtttattttgaagttactaaatttaaagattatttgaaattatcgggtagaaataaagaagaagtcatttctggtacaagagttgaccttgagtctgataagaaaaatactgaagattttgcactatggaagatttcaaaggaaaacgaacctaagtggaattcaccttggggggatgggagacctgggtggcacattgaatgctctgccatgatagataaaatattcgattcaggtatcgacattcactgtggaggtaatgatttaatttttcctcaccatgaaaatgagcttgcacaatcttctgctgcatttgaaaatcaagtatttgtaaaatactggttacataatggcatgattaacctttcaggacagaaaatgtctaaatctgaaggcaatataaaactcctaaatgaatatatagataagtttggtggaaacgtaattagatttttctttttaagatcacactatcgaaagccacaggagttttccgaagacttattagaagagtcaaaaacaacttttaaaagaatacaggatttcacaagtagtgttgaggct

SEQ ID NO: 299250 - DNA, 628 bp, Unknown
  Bacterial polypeptide expressing nucleotide sequence isolated from the Sargasso Sea
gatgactaaaaatttaaatttttttaataccttatcaaataaaaaggaaaaatttattcctataaacaatgataaagtaggcatgtatgtttgcggtccaaccgtttacgattttccacatattggaaacgcgcgccctctggttgtttttgatgttttgtttagacttttaaaaaatctttatggaaaaaataaagttacatatgtaagaaatattactgatatagatgacaaaattattcaatcatctaaaaaaaataaaaaaagtattaaagaattaacagaaactataacaaaaagttttcatgaagattgtaaatatttaaattgtttgagtccaacttttgaacctaaggctacacaacatattaaagaaatgataaatatggtttcgaatttgttaaaaaataatcatgcctatgaaaatgagaaacatgtttatttttctgtttcttcatttaaaaactatggaaaattatcgaacaaaaattctgagcaactggtagccgggtcaagagttgaggtttctaaatacaaaaaggacccacttgattttgttctatggaagccctcagatgaaaatgatcctggctgggattcgccttggggcagaggacgccctggttgg

SEQ ID NO: 299251 - DNA, 777 bp, Unknown
  Bacterial polypeptide expressing nucleotide sequence isolated from the Sargasso Sea
aatgattaaattttataatactattgatagaaaaaaagttaatttcatgcctatggttgatggaaagatttctttatacacatgtggaccgacagtttataattttgcccacattggaaattttagagcatatatttttgaagatctcttacgtagaacattagaattttgtgactatgaggttttgcatgttatgaatttgacggatatcgatgataaaacaatcaacaaagcaaatttagagaagattccattaaaagagtttacggataaatatattgctgctttttatgaagatgtggaagctttaaatatactccctgcacaccactacccaagagctacagagtttattgatggaatgattggtatgattcaagatttagaatcaaaaggttatacttacactactgaagacggatcggttttttttaagatatctcaatataaagattatggacgattagccaatttgcaagttgaagatttattattaggtgagagagtggaaaatgatgagtatgaaaaagaagagatgagagattttgcactttggaaaagttataaaaaagaagaaggtgatatcttttgggaatctccatggggcaaaggtagaccgggttggcatatagaatgttctgttatgtcgacacactatttaggcaatcactttgatattcactgtggaggggttgacaacatcttccctcatcatgaaaatgaaattgctcagagttgttgtgcaacagatgaaaaatttgttaattactggcttca

SEQ ID NO: 299252 - DNA, 607 bp, Unknown
  Bacterial polypeptide expressing nucleotide sequence isolated from the Sargasso Sea
ttggcatatagaatgttctgctatgagcatggatgccttaggggaaacatttgatatacatggaggaggtttagatctgaaatttcctcatcatgagaatgaaatagcacaatccgaatgtgcaactaataaagagtttgctagatattggatgcacactggacctttgaggattgaagatgaaaaaatgtctaaatccttaggaaattacataacaattaaagatgcattaaggaatttttcttctgaggctctcaggttcttcttgctgtctacgcattacagaaaccctataaactttaaggaatcctcagttaaagaagctcaagtaagcctgaataagctttacacctctcttgcaggtcttgatttagataaagaaatatctttatctacaaataaaagcaaaaaagaatttatgaaagttatggatgatgatttcaatatcccgggctcattagctgtactttttaatctttcaaaggaaattaatgtaaaaaaagataatggagatatagaagaagcaatagccttagctaaagagcttatagatatagcagagcctctaggaatactgcaacaaaaccctgaggactatcttaaaact

SEQ ID NO: 299253 - DNA, 877 bp, Unknown
  Bacterial polypeptide expressing nucleotide sequence isolated from the Sargasso Sea
tagggctgcggaacgaggtatctcgattactgatttatgtgaagaaactatcaagatatttcatcaagatacaaggcgtttaggggcattggatcctgatattgagccgcgcgcaacccaccatattgaagaaatgcaagcaatgatcacaatattggtcgaaaaaggccatgcttatgaagctgatggtcatgtgctgtttcaggtttcaactatgggcgcttacggcgcattatcgaaacggtcgatggatgacatgattgcaggagcccgtgttgaagttgcaccctacaagcgtgaggctggtgatttcattttatggaaaccaagcatcggtgatcagcctggatggaatagcccgtggggttggggacgcccgggctggcatattgaatgctcggcaatggcaaaagcctatcttggcgaagtttttgatattcatgcgggtggccttgatttgatttttccccatcacgaaaacgagattgcgcaaagctgctgtgcgcatgacagcaaacacatggcacattattggctgcataatggctttgtgacaatgaatgatgaaaaaatgtcaaaatcacttggcaatattatttcggtaacggatgcagctgataaatatcgcggcgaaaccctgcgggccgctttactgtcttctcactatcgggctccattagatttatccgacgacgccatgcgcgatgcacgcaatgggttggacagattgtaccgtgctgtgggcgagagtactgctataccagatagggttgataaagaatttgccgcccacttgttagatgatttgaatacacctgcggcatttgcgcgtttgcatgagctcgcgaggcttgcaaacaagcgtgagataggagcc

SEQ ID NO: 299254 - DNA, 566 bp, Unknown
  Bacterial polypeptide expressing nucleotide sequence isolated from the Sargasso Sea
aatgaagaataatcaacttaatctgtctaatactataagcggaaagaaagaaacttttattccaatcgatccaaaaaagattgggatgtatgtttgtggcccaactgtttatgattttccacatatcggaaacgctaggccattagttgtatttgacattttatatagagttttgtctaaaatctttggaaaaaaaaatattacgtacgttagaaatataactgatatagacgataaaattattgaaagttccaaaaataaaaaaatacctataaataaacttacatccgaaattacaaaaagttttcatgatgattgtgaatatttaaattgtttaaaaccaagttttgaaccaaaagctaccgaacacatcaaaggtatgattttaatgatagaaaatcttttgatgaataattatgcttatgagcaagacaaccatgtatatttttctataaattcttttaaaaattacggaaagctatcaaaaaaaaatccagaagaattagttgctggagcaagagtagaaatttcaaaatcaaaaaaacatcctcttgattttgttcttt

SEQ ID NO: 299255 - DNA, 733 bp, Unknown
  Bacterial polypeptide expressing nucleotide sequence isolated from the Sargasso Sea
tgaaccttcttgggattccccatggggaaaaggtagacctggatggcatcttgaatgttcagttatgtctaaaaaatttttgggagataaatttgacattcatggtggaggtatagatttaatttttcctcatcacgaaaacgaaattgctcaatctagatgtgcaaatgaaaatgaaatatttgcgaattattgggttcataatggttttataacaatatcaagtgaaaaaatgtcaaaatcacaaggtaacgttttaacaattgatgatttaaaaaataaagtgaatggacaggtaataagactagctttaattagtgctcattataagcaaccgttagattggaatgaaaaactcttatctgaaagtgaaaaaactataaacaaatggtatgaaagttacactgaattaaaaaagcaagttttaattccacaagaatatctatcgcctttgtacgatgatttaaatacaccaggctatatagccaatcttcataaattatttgaaaagtcccaaaaaggttcagcaaaagacaaagaaatatttgtgtctgcatgtaattttattggtttattaaacgaagataaaaaaatttgggaaaaatttaaacaaagtaagtcaaaaatttccaaggaagaaattgaaaaaaaaatagaagaaagaaatattgccagaaaaaacaaagattataatgcggctgataacattagagatgaattattagataaagga

SEQ ID NO: 299256 - DNA, 778 bp, Unknown
  Bacterial polypeptide expressing nucleotide sequence isolated from the Sargasso Sea
ctctggccgaccaggctggcatattgaatgctcagcgatgataagtaagcatctgggccaaaccatagacatacatgggggaggctccgacctcacctttcctcatcatgaaaatgaagcagctcaaagtcggtgcgccaatgattcaccagattatgtccgatattggttgcacaatgggatgctgaatcttggggctgaaaaaatgtctaaatccctgggcaatgtaaaaaccatcagagacctctgctcaaagcattccggtgaggtcttaaggtacgcactattgtctggtcaatatcgctcgcgcctcgcctggtccgatgacttagtaatccaggctaaatctagcttagactcactgtaccaatcacttcgtgacaaaagtgggagcctcacatcatctgatctgctaattaatgaactgtctttcgaccagtatcccaaaggcgtcacagagcctctcacggacgatctgaacacaccaaaagcactggcagcgatgcacgatcttgcggcagtccttcagcgagcggaatccgaacaggaggtttttgcagcgacacaaatgctactggcaggaggtagattgctgggtcttctcgatcaagaaccggaaacttatttcaagcaaggctctaaagaggcttcgctgagcgaagacgagatagaaaatcttattcaagaacggcatgcagcgagagcggagaagaactttcagagggcggatgagatcagagaggaattatctaatctcggcgttgaactggaggattta

SEQ ID NO: 299257 - DNA, 529 bp, Unknown
  Bacterial polypeptide expressing nucleotide sequence isolated from the Sargasso Sea
cgacgctgaaaccgtgcgttacttcctgctatcgggtcactatcgtagccaaatcaactactcagaagaaaacctcaagcaggcgcgtgccgccctagagcgtttatacactgcgattaaagatgttgacctgactgttacagcagcacctgcggaagagtttgtcgctaagtttaaagcggccatggacgatgactttaatacgccagaagcttattcagtgctgtttgatatggtacgtgagatcaaccgcttgaaaaccactgatatggcgcaggcgtcagctatggccgttgccatgaagcaactggccgatgtattgggattattgcaccaaacgccagattccttctttaaaggcgaaggtagtgacgatgaagtggcagagattgaagcgcttatcgttgagcgtaatcgtgcccgcgccgagaaagattggccagcggctgatgttgcgcgcaatcggttaaatgagcttggtgtggttttagaagatggcccaagcggtaccacttggcgtaagaaatag

SEQ ID NO: 299258 - DNA, 913 bp, Unknown
  Bacterial polypeptide expressing nucleotide sequence isolated from the Sargasso Sea
aatgcttaagttatacaattcatatagcaattcaatagaaaaaattgatttaaataaaagagaagtaaaaatttacttatgtggaccaactgtccagtcatcaccccatttaggtcatggaagatcagcagtggtttttgatttttttgttaggtatctgaagtatttaaaatacaacgtcatatttgttagaaatattactgatatagatgataagataatcgaaaagtcttttgaagagaatatctcttataaagaacttgcaatgagagtttcaaaagaatttgattatgcctaccaaaagctaaattgtattaagccagatgaagagcctagagcaactgaatttattaaagagattattagttatattgaaacattaataaaaaatgaatatgcatatataactaaatctggtgtttactatgatatttcaaaatttgatgaatatttattgctgtctggaagaacaaagaatgaggtaatttcaggaacgagagttgaattggaggaagataaaaattcaccagaagactttgctctgtggaagttctcaaaagaaaatgaaccatattgggagtctccttggggaaacggaaggcctggttggcatattgagtgctcttcaatgattgaaggaattcttggtaaaaccatagattttcattgcgggggaaatgatttaatttttccacatcacgaaaatgaaattgcacaatcaaaaggagcacacccaaaagaacaatttgtaaaatattggcttcataatggaatgttaaatttatctggcaaaaagatgtccaaatctgatggaaatgttaaattattaaatgaatatatagatgaattcagtggtcctattctaagatttttctttttaaaatctcaatatagaagtcctcaagaattaatg

SEQ ID NO: 299259 - DNA, 847 bp, Unknown
  Bacterial polypeptide expressing nucleotide sequence isolated from the Sargasso Sea
ttttgaaccaagagctaccgaacatattaaaggcatgattagtatgacagaaaatttattgaataataaacatgcctatgaaaaagataaacatgtctatttttcagtaaactcttttaaaaattatggaaagttatctaataagaaacccgatgaacttgaggcgggttcaagagtagagatttcaagattaaaaaacaatccactagattttgttctttggaaaccatcttctacagatgatcctggttgggactcgccatggggcagaggtaggccaggatggcacctagaatgttctgtgatgagtgaaaaatttctaggaaaaaattttgacattcacggtggtgggttagatcttgtatttccccatcatgaaaacgaaatggctcaatcatgttgcgctaatgaaacagataaatttgctaattattggctacataatggttatgtgacttttaataaagaaaaaatgtctaaatctgttggaaatattgtaactattcaaaagatgagagagaaaataaacggtcaagttataagatttgctttgttaagtactcattacaaacaacctcttgactggaatgaaaaattaattaatgaaagccaaaacacccttgataaatggtattcactattcgaaaaaataggtgaaaacgaattaagtgatgatttattgcaaccacttctacaggacctgaataccccaggttatatatcaaaattacattcactttacgataaagccagtaaaggagataaatattcaaaaaaactttttcttactggttgtaatgctattggtttattagaggaagatttaaaatcatggggaaaaatttaa

SEQ ID NO: 299260 - DNA, 756 bp, Unknown
  Bacterial polypeptide expressing nucleotide sequence isolated from the Sargasso Sea
acatagaatgtagttcaatggtactaaatactataggtgacactgttgatattcatggaggcggtatagatttaatatttccccaccatgaaaatgaaattgcacaaagtgagtcgttaaatgggaaaaagtttgcaaatatttggatgcacaatgggatggttaagattcagggtgaaaaaatgagtaaatctttgggcaacctcataaaacttaaagatgccatccaaatttttggcgtcgatttgctaagaatgtggatactttcttcacattacagaaaaccattgctttatgacgaaaaaataataaatagtttttcaaagccccttaaaagaataaaagatgcaaaaaatttaatgccaataactagtgaaaaaaaacttgattctaaaaaagaatttgatgaatttaatttagctctttcaaatgacttaaatacttctgtggcgttatcacaaattatttcgctatcaaaaaaaatcaataactcaaaaaatgaattagatatttcatttgctcaaaatgatttaaataaaatgttagaaattactgggttgtgccaaaatattgaagatgaaaataacaataaaaatatatttattgacatagaagtagaacagttactagaaaaaagaaataattacaggaaaaataaagaatttattaaggcagatgagataaggaatcagcttttgaaaaaaggcatagagattgttgacaatggatttaattcaacttggaagaaagtttaaa

SEQ ID NO: 299261 - DNA, 811 bp, Unknown
  Bacterial polypeptide expressing nucleotide sequence isolated from the Sargasso Sea
tgataaatcacaaccgggttgggattctccttggggggtaggtcgcccaggatggcatacagaatgctcagcaatgtctaaaaaaacattaggtcttccttttgatattcatggtggtggtagggacttaatttttccgcatcatgaaaatgaaatagctcaaagttgctgttcttccgcaaacattgaagaccctacatcttatgctaaatattggatgcataatggttttgtaacgattgatggtgaaaaaatgtctaaatcgctaggcaatataatacttgtaaatgagttaacagaatctcatcatggtgaagtaattagattggctctattatcatcacattataggcagggcttagattggaacgaaaaaataattcatcaagcaagcatccttctagataaattatacgaaattaaatttttgttaaatggtgaaaatataaaacattcatctgaaacaaatttagagccaatcgcctacctagctgatgatctaaatacacctggactaatcgctgaactgcacaaactagtcaaagattttaatacttcaaattccaataaatcagagattaaaattcatctaaatttaatttcacaagctttaggaatcttacaagatgactcttacaaaaaaatatctgaggaattagaatcaaaaatccatgcattaattttaaaaagaaaagtagcaaaagataataaggattatgaattagcagataaaattcgaaatgaactattggatttaggtgttgaaatcaaagacactagtagcggtactgattggaatttgaaatcatga

SEQ ID NO: 299262 - DNA, 714 bp, Unknown
  Bacterial polypeptide expressing nucleotide sequence isolated from the Sargasso Sea
gagcacattaaagaaatgatagtccaaataaatgaattaattgctaatggtcatgcatatgaggaagaaggacatgttctattcaacgtaagtacatttccaaaatatggaacactttcaggaagagataaagaccagcaaatagcgggcagtagggtggaagtggctaattataaaaatgacccattggattttattttgtggaaacccagtgaagagggtcaacctggctgggattcgccgtggggttttgggcgcccaggatggcatctagaatgttctgcaatgtcacaaaaaactcttggtgttccttttgacatacattcagggggccaagatcttattttccctcatcatgaaaatgaattagcacaatcttgcggagcaaatggaggtgttgaagactcttcaagttatgctagatattgggtgcataatggtatgatcagatttgatggtgataaaatgtcaaaatcgttgggtaatattttgtatataaatgatatacttaaagagtatgatggggaggtattacgatatgtattattatctacacattacaggcagccacttaattggtctgaaagatctcttaaacaagcaaagacatctttagatagattatatagaatattaaaaaacaataagaatgttttaactaaagatgttgaccctgccaaggaaattattaatgcactttgcgatgatataaat

SEQ ID NO: 299263 - DNA, 832 bp, Unknown
  Bacterial polypeptide expressing nucleotide sequence isolated from the Sargasso Sea
aaagaaattaattcgaaaaggatatgcctatctacaagatgacggctcagtatattttaacataaatagttacaaaaaatatggtcagttagcaaacttagcttttagtaatcagcagaaaacaaatcgtattctaaatgatgaatataataaggatgaccctcaagactttgctctatggaaaagttggaagaaggaagatggagatatttattgggaatctccgtggggaaaaggtcgtcccggctggcatatagagtgctcagtgatgagcaatgaaattttaggagatcattttgatattcattgcggcggggtagacaatatttttcctcatcacgaaaatgaattagctcagtccaggtgttcaagcgggaaaaaatttgtgaactattggcttcattcagagcatttactgattgatggtgggaaaatgagtaaatcagcaggtaccctcaaaaatatcagtgagttgattaggttgggctattctcctgagagcattaggtatttacttctttccggtcattacaggacaaaaataagttggtctgaatcaaaaaaaagagagggtgagcgaatagttaaaaggttatcggaatttaagatgagattatttgagaaaggggcagactcactgggagacaaaaattatccaaaagaatattacgattttattgataaattagatgacgaccttgatgctccgggtgcattggctgttttttttaaatggatgcgaatgcagaatgaaaaattgcgaaataaaattgaagatcccaatgctctttctcaagcatggtcctttctatcagcctttgattcaattttg

SEQ ID NO: 299264 - DNA, 793 bp, Unknown
  Bacterial polypeptide expressing nucleotide sequence isolated from the Sargasso Sea
accttcagaagaaatgatccaggggctgggactcaccatggggggaaaggaaggcctggatggcatttagaatgttctgttatgagtgaaaaattcttaggaaaacaatttgatatacatggaggaggtcttgatttagtttttccacatcatgaaaatgaaattgcacaatcatgttgtgcaaataagactgaaaaatttgctaactattggttacataatggattcgtcacttatgataaggaaaaaatgtcaaaatctgtaggtaatattgtgactattaataaactaaaacaaaatataaatggtgaagtagtaagacttgctttgatgagtgcacactataaacaaccgcttgattggaatgaaaagttgctaatggaaagtcaaaatactctagataaatggtatgagcaatttgaaaaaattgaaaaacatgaattaaaagatgatgtacttaatcctcttcaagaagatttaaatacaccagagtatatagctaaactacattcactttttgatgaggcaaataagggaaaaaaatcatccaagaatcaatttttatctgcttgccatcaaattggtttattggaagacaagcaatcatgggaaaattttaaaaaatcaaaagtaaaagttgatgaaaactttattaataataaaattaaagatagaaatgaggctagaaaaaaaggaaattataaactggcagatactttaagaaaagaattagaagaagctggtgtaattattgaggacaaacaagataacactaaatggaaatataaatgag

SEQ ID NO: 299265 - DNA, 756 bp, Unknown
  Bacterial polypeptide expressing nucleotide sequence isolated from the Sargasso Sea
tgaagcttcgaaaaataagaaaataaatatttcatatttaacaaaaaatgtaacagaaaaatttcatgaagattgcaaaattttattttgcttaaacccaacaaaagagcctagagcaacggatcatgttgagggtatgatatctatgacaaaaaaattaattgaaaaaaatgctgcttatgaaaaagagggacatgtttttttttcagtagcctcttttaaaaaatatggaaaactttcaaataaaaatccagaggatcttaaagctggtgctagagtagaagtgtcaaaattaaaaaaagatcctttagattttgttctttggaaaccttcagataataacgatcctggttgggactcaccatggggaagaggaagaccaggatggcatttggagtgctctgtaatgagtgaaaaatatttaggtaagaattttgatattcatggaggaggactagatttaatttttccacatcatgaaaatgagatcgctcagtcatgtgtttataatgaaacagataagtttgctaattattgggtgcataacggttttgtaacaatgaataaagaaaaaatgtcaaaatcacttgggaatataacaacaattgaagacgcaaccaaaaaatattcagggcaagtcgttcgcttatctcttctaagtgctcaatataaacaaccattggattggaataacgatttactcatggaacaatcaaaaactctagataaatggtattccttgtattcatctgaagt

SEQ ID NO: 299266 - DNA, 962 bp, Unknown
  Bacterial polypeptide expressing nucleotide sequence isolated from the Sargasso Sea
cgaaccgccgactatgaacccattcgcaaccaaacatattccggaaatactggatatgatgaaagtactaatccggaaaggctttgcatatgtgtccgaaaaacatgtgctgttttctgtcagttctatgcccagttatggacaactttcgggtaagtctttgcaagatttaacgattggagcacgagtcgaaattggaaaatataaacgggacgccaatgactttgtgctttggaagccctcaaaaaaaggagagccagcttgggatagcccttggagtaggggaaggcctggctggcatatagaatgttccgccatggcacaaaagcatttgggtgtcaccgttgatatccacggtggaggattagatttgttgtttcctcaccacgaaaacgaaacggcacaaagttgctgtgcgaatggcggtaagccattagcgaatttctggatgcacaatggctttatccaacttgatggccaaaagatgtcaaaatcacttggaaacttcaaattagtttgcgatctgctggaacactatccgggagaagttttgcgctacgtcattttgtcggcacactatagatcagagcaacaattcaacgcttcccttctggagtcagcaaagcgttcgctagacacgttatatcgttgtcttcaatccacggaaagcctggataatatcgtcgtggacctttcaaccaatagcggttttctggctttgctggatgatttgaacacctcggaatctattagcgaattgcatgcgctggctcggcagactaaacaaggccccaaaaaaaaacgagttatggcaagaggaaaactcctgtctttggctaatatgttgggattacttcaacaaaatccagacgaatggtttaagaaggcacacgaccccgatgcactatcccaacaagagattgaagaagcaattctcctcagacaacaagcaaaagagtgaa

SEQ ID NO: 299267 - DNA, 859 bp, Unknown
  Bacterial polypeptide expressing nucleotide sequence isolated from the Sargasso Sea
tttgatcttctcttcagaattcttattgaactttatggagagaaaaaagttacttatgtaagaaatattacagatatagatgacaaaattattgaagcttcaaaaaataagaaaataaatatttcagatttaacaaaaactgtaatagataaatttcacaaagattgcaaaaatttattttgcttaaatccaactaaagaaccaagagcaactgaacatgttaatggtatgataaacatggcgaaaaaattaattgaaaaaaatgctgcttatgaaaaagaggggcatgtttttttttcagtagcctcatttaaaaaatatggaaaactctcaaataaaaatccaaatgatcttaaagctggtgctagaatagaagtttcaaaattaaaaaaagatcctttagattttgttctttggaaaccttcagataataacgatcctggttgggactcaccatggggaagaggaaggcctggatggcacttggagtgctccgtaatgagtgaaaaatacctgggtaagaattttgatatacacggtggagggctagatttaatttttccacatcatgaaaatgagattgctcaatcgtgcgtttataatgaaacagataaattcgcaaattattgggtgcataacggttttgtaacaatgaataaagaaaaaatgtcaaaatcacttgggaacataacaacaatagaagacgctaccaaaaaatattcagggcaagtcgttcgcttatctcttttgagcgctcaatataaacaaccattagattggaataatgacttactcatggaacaatcaaaaactttggataaatggtattcaatgtattcatctgaagtaagcgaaaaga

SEQ ID NO: 299268 - DNA, 820 bp, Unknown
  Bacterial polypeptide expressing nucleotide sequence isolated from the Sargasso Sea
attcctgatatcctttaccgattactactttcatattatcctggtgatgttgtgtacattaggaatataactgatgtagatgataaaattctcaaagctgcgaatgaacaaggcgtaaaaccgacggaaatatccgagaaatttactgatgtttatttaaataacatggcccagttaaatattcttcatccaacacatcaacccaaagttactgagtttatggatagcattatctcaatgattcataaaattattgattcagggcatggttatgttgaaaacaatcatgtactttttaatacagaaaaagataataattatggatgtctatcaagaaaaaaactggatgaaatgatagatggcgctagggtagaggttgcagaatataaaaagtctcctcgagattttgttttatggaaaccatccgataacgatagttttggctgggatagtccctggggatatggaagacccggatggcatatcgaatgtacttctatgataaaaaaaattattggagatcattgcactttagatatacatggtggtggtaatgacttgatattccctcatcatgaaaatgagatagcacaaggatcatgcatttcaactagcaaatattgcaactattggtttcacaatggtattgtgcttgttaataaaaagaaaatgtcgaaatcattagggaatgtcattctattagatgatttgcttaaagagcataactcgtctgtgattcgtttagctttactatctgcacaaaatagacaaccgcttaatggacagaacaaactattatcaatgcgaaaaatctgtataa

SEQ ID NO: 299269 - DNA, 676 bp, Unknown
  Bacterial polypeptide expressing nucleotide sequence isolated from the Sargasso Sea
atgaataaagatatttatttaacaaatagcttaggtaacaaaaaagagaagtttataccaatcaatgaaaaaaatattggcatgtatgtttgtggacccactgtgtatgacgacccacatattggaaatgcaagaccattagtagtttttgatattttatataaagttttaaaatgcaagtatggaaaaaaaaatgtttcttatgttagaaatataactgatattgatgataaaatcattaaggcctccaatgaaaaaagtatttctatcaaagaattaacagagaatattacaaagagatttcatgatgattgcaattacctgagttgtgatgtgccaacaaatgaaccaaaggcaactgataatgtttcgttgatgattgaaatgattaatgatttgattaataaaaaatatgcttacttaaataaaaagcatgtttattttgaaattaaaaaatttaaagattatggaaaattatccaatagaaatattgatgaattaattgccggttcaagggttgaggtatctgataataaaataaataatgaagattttgttttatggaaaccatcaaataataatgaaccatcttgggattcaccttggggaccaggcagacctgggtggcatttagaatgctcagttatgtccaaaaaatatttaggtaaaaaatttg

SEQ ID NO: 299270 - DNA, 694 bp, Unknown
  Bacterial polypeptide expressing nucleotide sequence isolated from the Sargasso Sea
aatgaatagcttaaaattaacaaattctctaacaaaaaaaaaagaagtatttaagccaaataatacaaaaaagatttccttatatgcttgtggcccgactgtatatgagagtccccatgtaggtaatgcaagaactcttgtagtgtttgatgttttatttagagttttaaaggttctctacaattcgaatgtaacgtacgtaagaaacattactgatgtagatgacaaaataatagaagcttctcaaaatcataaagaagatattaatgaaattactaatagggtgattaaaattttccatgaaaattgcaagagtctaaactgtttaaaaccaacgatagagcctaaagccacagagcatgtaaaagaaatgattgaaatgacatcttcattaatcaaaaagggatttgcttacgaaaataaaaaccatgttttttttgctgtaagtaaatttaaagattatggaaaactatcaaataaaaatttagatgagttaaagtcagggagtagagtagaaatttctgatctaaaaaaaaatccaatggactttgttttatggaagccctcaaaagaaaaagaccctggttgggagtcaccttggggaagaggtagaccgggttggcatcttgaatgttcagcaatgagtgaaaaataccttggtaaaaatttagatattcatgggcggcggtcttga

SEQ ID NO: 299271 - DNA, 949 bp, Unknown
  Bacterial polypeptide expressing nucleotide sequence isolated from the Sargasso Sea
catggaggatggaaaagtaaaattgtacacatgcggtcctacggtttatgactattctcatgttggaaactttagaacatttctttttgaggatctcttaaaaagagtgttgatagcttttggatttgaagtgaagcatgtgatgaatattactgatgtggatgacaagactattagtaaatcaactcagcaacaaatagaattaaaagatctaacacagcgttacactaatgcatttatgaaagatattgaattcttgagaatcctaaaggccgatgaatatccaaatgcaactgatcatgttgatgaaatgatattaatgatacaggccttaattgataaagaacatgcatacataagtaaagatggatcagtgttttttaaaatagatagctgttcggattatggtgttttggtaaatattgaaaaaagtgacaattctcatcgctatgaaatttcggatgaatattcatccgatagtgctaacgattttgcattatggaaatcatacaaaaaggatgatggcaaaatttattgggattcaccctggggaaagggtcgccctggttggcatatcgaatgctcagcaatggcaacaaaatatttgggggatcattttgatattcattgtggaggagttgacaataaatttcctcatcatgaaaatgaaatagcacaatccacctgcgcattggaaaccccctttgttaattactggcttcattctgagtttttaatggttgagggtagtaaaatgagcaaatctttgaataatttttacacaatatctgatatttatgacaatggatttactcctgaagaatttagatttttaattttaagcgcacattacagatcccgggtaaacttcagcctcaatcgaaggaaagaggctaagtctgcaataaagcgcataactgaaacgcaagatcgtttgtcaattattagt

SEQ ID NO: 299272 - DNA, 589 bp, Unknown
  Bacterial polypeptide expressing nucleotide sequence isolated from the Sargasso Sea
tcatataaaagaaatgatcgagttaatagaaaaattaattgatgaaaataaagcttatgaaaaagaggggcatgttttatttcatgtgccaagttttgataattatggaattctttcaaaaagaaatagagatgaacaaatagctggaagccgtgttgaagtagccccgttcaaaaaagatccagcagattttattttatggaaaccatctccctcacccttacctggttgggattcaccttggggatttggaagaccaggatggcatttagagtgctccgttatgtcagaaaaatcattaggcctaccttttgatatccatagcggtggtattgacttggtgtttccgcatcatgaaaatgaaatagcacaaacttgttccatttctgaaaataaagatcctaaagattttgcaacttattggtttcataatggatttgttaatgttgagggagaaaaaatgtcaaagtcaattggcaatattagactcgttcatgatctcaataaaaaatacaagggagaggttttgcgattaacattgttgtcagctcattacaaacagccattgaactggacagaagaaatcatt

SEQ ID NO: 299273 - DNA, 565 bp, Unknown
  Bacterial polypeptide expressing nucleotide sequence isolated from the Sargasso Sea
atgaataaagatatttttttaacaaatagccttggcaataaaaaggacaaatttataccaattgatccaaaaaaaattggtatgtacgtttgtggaccaacagtttatgataatccacacattggaaatgctagacctttggttgtatttgacattttgtttaaaattttaaaatgtaaatatggaaaaaattcagttagttatgtaagaaatattacagatattgatgataaaataatatcttcatcaatcgaaaaaaatatttcaattggtgaccttacaaagaatattacaaatatatttcatcaagactgcaaatatttaaattgtgaagctcccactaaagaacccaaggcaactgaaaatattttattaatgattgaaatgattaataaacttattcaaaataaatttgcatatgagatcaataaccatgtttattttgaagtaaaaaaatttaaagattatggaaaattatcgaacaaaaatctagatcagttaattgcaggagcaagggttgaggtatcagaaaataaaaaaaatccagctgattttgtattatgaa

SEQ ID NO: 299274 - DNA, 694 bp, Unknown
  Bacterial polypeptide expressing nucleotide sequence isolated from the Sargasso Sea
atgagtaaagatatatttttaactaattcatttggaaacaaaaaagaaaaatttactccaattaatacaaaaaaaataggtatgtacgtgtgtggaccaactgtatatgacgatccacatattggtaatgcaagacctttagttatttttgatatcttatttaagattcttaaattaaaatttaaggatagctcagttacatatgttagaaacatcacagatgtagatgataaaataatcacttcatccaaagaaaaaaaaatatcaatttcagaattaactaaaaaaataacgaataattttcatcaagattgtgaatatttattttgtgaaaaaccgacaaaagaaccaaaagcaactgagaatatcgatttaatgattaagatgatatcggatttaatttcaaaaggttttgcctatgagaaaaaaaatcatatatattttgaagttaagcagtttaaagattatggaaaattgtcaaataaacaattagatgatttagttgctggatcaagagttgaagtttcagataataaaaaaaacccagcagactttgtgctatggaaaccttcgcttgatgatgaaccattttggccttcaccatggggcaatggaaggcctggttggcatttggaatgttcagtgatgtcgaaaaaatttttagacaatgagtttgatattcatggaggaggaa

SEQ ID NO: 299275 - DNA, 763 bp, Unknown
  Bacterial polypeptide expressing nucleotide sequence isolated from the Sargasso Sea
aaactttcaaatcaaagtaccgaggctatgctttcaaatacaaggatagaattaaatcctaataaaaaaaatgacttagattttgcattatggaaaaatgctaaacctgatgaaccttcatgggaaagtccttggggtaaaggtagacctggatggcatattgaatgttctgcgatgagctgtaaatatcttggtgagcaatttgatattcatggcggaggcagagatttaattttcccacatcatgaaaatgaaatcgctcaatcagaatgtatctctaataagaattttgcaaattattggatacataatggcttaataaatattaataaagaaaaaatgtccaaatcaataggaaatatagttaacataaaagatgctttagagagatggaataaaaatttaatcagaattttttttctaagtcatcattatagaacaccagttgatttgtcagaagaaaaattaattgaagttgagaagagtttgaaaaaattatcaaaaaaaataactcagtctaaagctgatgagtctgatgattttgagaaagcctggaaaaaatgtatgagtgacgatttcaatacggctaaagcatttggaatcttctttaaatatgcaaatgagggaaaactttctttaaacaattcaaaaaaccttgaagaatttgaaaatgtaatgggtataagcggttggagagatataatctctgaaaataaaaatattgagattaaccaagatgaaattgaatcaataattccgaaag

SEQ ID NO: 299276 - DNA, 769 bp, Unknown
  Bacterial polypeptide expressing nucleotide sequence isolated from the Sargasso Sea
tgggcttccccatggggtagaggcagaccaggttggcatttagagtgttcagtaatgagtgaaaaatttcttggaaaaaattttgatattcatggcggaggattagatctagtttttcctcaccatgaaaacgaaattgcacaatcatgctgtgctaacaaaacagataggtttgcaaattactggttacataatggttatgttactttcaataaacagaaaatgtcaaaatcattagggaatattgttactattgaaaaaatgagaggaacaattaatggccaggttataagacttgcgctattgagcgctcattataagcaacctttagattggaatgaaaaattaattaacgaaagtcagaataccttagataaatggtatactcagtttgaaaagattactgaaaatgatttagatgaaaatttattaaaaccacttttagaagacttaaacactccggcatacatatcaaagttacatttgctttatgacaaagcgtctaaaggagacaagtcatcaaaaagactttttcttagtggttgtaaacttataggtttattagaagaggatttagaaacttggaaaaaatttaaaaaaataaaatcaagtattgatgaaaaaactattaaaaataaaattaaggatagagaaaatgcaagaaaaaagggcgattataaattagcagacaatattagagaagatctagaaaataatggagttataattgaagacaaaggtgataaaactaattggaaatataaatgag

SEQ ID NO: 299277 - DNA, 272 bp, Unknown
  Bacterial polypeptide expressing nucleotide sequence isolated from the Sargasso Sea
aatgaacaaagatatttatttaacaaataatctaaccaacaaaaaagaaaagtttgttccaatagataaaaataatgtaggtatgtatgtttgtggaccaacagtgtatgatgatcctcatattggaaacgcaagaccactagtagtttttgatattctttttaagattcttaaaagtaaattttcatcagtttcttatgtaagaaatattactgatgtagatgataaaataataaaatcatcgaatgaaaaaaatatttctattaaagatt

SEQ ID NO: 299278 - DNA, 877 bp, Unknown
  Bacterial polypeptide expressing nucleotide sequence isolated from the Sargasso Sea
gttctatgtatgtggaccaacggtttatgactatgcgcatatcgggaacgcgcgaccgatcgtcgtcttcgacgtgctgtttcgcttgctacagcggctctatccgaaggtgacctacgttcgcaacatcacggacatcgacgacaagatcaatgcgcggtcggcggagacgggcgagccaatttcggagattaccacccggacaacggcgcagttccacgaagatatagccgctctcaatgccttaccgccgaccgtggagccgcgggcaaccgatcatgtcgctgaaatgatagtgatgatcgaagatctcatcgccaaagggcacgcctatgaggcggacgggcatgtcctcttcaatgtgctgtcctgggatgcgtacggtcgtctatcgcggcacagtcgggatgagctggtggccggcgcgcgcgtcgacgtcgcgccgtacaagaaggacgctgcggatttcgttctttggaagccgtcgacggaaaatctgcctggatgggacagcccttggggatgggggcgtcccggctggcatatcgagtgctcggcgatggcgtcgaaatatctcggcgacatattcgatatccatggaggtggacaggatttgatcttcccgcaccatgagaacgagatcgcccagtgcctgtgcgacaagccgtcagaacgcttctcgaaatactggatgcacaacggctatctcatgtccgaaggcgagaagatgtcaaaatcgctcggcaacttctacaccatcaacgagttgctgcaggaatatcccggcgaggcggtccgtctgttgctgttgaagacgcactaccgccagccgctcgacttcacgaagagcggattggatgaggcgaagcgcgagctg

SEQ ID NO: 299279 - DNA, 643 bp, Unknown
  Bacterial polypeptide expressing nucleotide sequence isolated from the Sargasso Sea
tatggtaattaataatattggagaaactgttgatattcatggtggaggaattgatttaatatttcctcatcatgaaaatgaaattgctcaaagtgagtctttgactggaaaaaaatttgcaaacatatggatgcataatggaatggtaaagctttcaggtgaaaagatgagtaagtctctaggaaaccttattacagttagagaggctttaaaagagtttgattcagaccaaattagaatgtggatactatcatcacattatagaagtccattaatttattctaaggagataatttctagtcagtctaggcccttatctagattaagagagtcactcaaaaatgtagaaaataataatactgaaaatacagattatgcgaaggaaaaagaaatttttattaacgcactgtcttcagatttaaatactcctgtcgctctttctcaagtacttttactttcaaaaaaaattaattctggtaataataagggtcatgatacccgagaagctagaaaaacacttaatactatggtttctgtgcttggtttatgtcagagcaaaaaagatttaaaaaatgatatagatgacattgagataagagaattaatcaataaaagagaaacatatagaaaaagcaaagaattt

SEQ ID NO: 299280 - DNA, 817 bp, Unknown
  Bacterial polypeptide expressing nucleotide sequence isolated from the Sargasso Sea
ttcagaaataaaaaataatcaaagggactttgtgctctggaagccatccactgggaaaactcctggttgggatagtccttggggttttggaaggcctggttggcatcttgaatgctcagcaatggcaaagaaatatttaggaaggacattggatatccatgggggtggaagtgatcttttgtttcctcatcatgagaacgaatgtgcgcagagcatgtgctcacattcaggagaaccgctcgcaaactattgggtccataatggaatgatcgattttgataacgtaaagatgtcaaaatctgaaggcaatcttttgcttattcgagatctcctaaatgaaatcagaccagaggttatacgaatggcatttttaaccacacactatcgtaaaccaatcaattggaatgatgcattgatcagtgattcagagaaaaagcttgaccgtctgtatggttcgatcagaaaattgggaaagatctcaccagcagagccctcagaagaagtcatgaatgcaattgcggatgatatcaatacgccgaaggcactgagcgagctttttgccatagtaaaaaatatcaataatgcaaaatcagatgaagagtctagacaattggcatctattctcattgggtctgctcatttattgggtttaatgaatgaagatgcggaaatgtggtttgaaaacatcgatattgatgaggcactaattgatcgactcttgactgagagagaagcagcaagatccaatagaaattttgaacgagctgatcaaattagacaagagatcgagtcactcggtgtaacaatagaagatggt

SEQ ID NO: 299281 - DNA, 955 bp, Unknown
  Bacterial polypeptide expressing nucleotide sequence isolated from the Sargasso Sea
tgaatatccaaatgtaacttatgtaagaaacataacagatgttgatgataaaataattaaatctgcaaaggaaaataaaatttctttttcagttcttacaaaaaaaattactcaaagctttaatgaagattgtatttatctaaattgcgaaaaaccaaatcatgagcctaaagcaactgagcatatttctgagatgatagaaatgatctcagaattgattaataaaggatttgcatacgcaaatcagaagcatgtttattttgaagttaaaaaatttaaggattacggacagttatcaaataaaaaattagatgaattagttgcaggatcaagaattgaagtaagtgaaaataaaaaaaatcctgaagattttgttctgtggaaaccatcagaaccagaagaaccatcatgggattcaccctggggaaaaggaagaccgggttggcatttagaatgttcagcaatgtctaaaaaatatttaggaaaagaatttgatattcatggaggaggcgttgatcttttattccctcaccatgaaaatgaaattgctcaatctagatgtgcaaatgatagcaaagtatttgctaattattggctacataatgcttttatcacaatgtccaatgaaaaaatggcaaaatctcaaggtaatattttaaaaatcaaagattttagaaataataaaagtggtcaagttttaagattggctttaatgagcgcacattacagacagccacttgattggaatgataagctcttagaggattgtgaaaatacaattagtaaatggtataatgtttacttaaatattgaaaaaaaaatacaaatttcagatcaaattctaaaacctctttttgacgacttaaatacaccaggctatattgctaatttacataaattatatgaacaagcatcaaaaggttctgatgaagatagagattatttgtttctgcat

SEQ ID NO: 299282 - DNA, 627 bp, Unknown
  Bacterial polypeptide expressing nucleotide sequence isolated from the Sargasso Sea
tatgaataaagatatctttttaacaaatagttttggtaacaaaaaagaaaaatttgtgccaataaataaaaataaagttggtatgtatgtttgtggaccaactgtttatgatgacccacatattggaaatgctagaccattagtagtttttgatattttatacaaagttttaaagtgtaagtatggaaaaaaatcggttacttatgtgagaaacataacagatgttgatgataaaattattcaatcgtctactgaaaaaaaaatatctattgaagatttaacaaaaaaaataacagcaaactatcataatgactgtgattatttaaaatgtgaaaaaccaaacgaggaaccaagagctacagaaaacatttcacttatgattaaaatgactgaaaacttaattaaaaaaaattatgcatatgttaataataagcatgtttattttgaagtaaaaaaatttaaggattatggaaaactctcaaataaaaatttagaagagttgattgctggttctagagttgaaatatcagagaataagaaaaatccagaggattttgttttgtggaaaccatctaaagaaaacgaaccatcttgggattcaccttggggcaaaggtagaccggggat

SEQ ID NO: 299283 - DNA, 882 bp, Unknown
  Bacterial polypeptide expressing nucleotide sequence isolated from the Sargasso Sea
attcatcaagagttgataaaaatcatagtaaaaaacataataatgattttgctctatggaaaatatctaaagaaggggaaccattttgggatagtccctggagtaagggtaggcctggttggcatattgaatgttcagcaatggtaaagaagcatcttggtgaccagatagatattcatggtggaggaatggatcttatttttcctcatcatgagaatgaaattgctcaaagtgaatgtttttcctcaaaaaaaccattcgttaagtattggatgcataatggtatgttgagagttaagggagcggaaatgagtaagtcactaggaaatacatttagcataaatgaagccctaaaacgatttagttctgacgcaattagactatggatattacaaacacactatagaacaaatccattactagatttagatttaattaaatcaactgaaaaatctcttacacgcttaagattaataaactcagaattaaaaagtaaacctgaactcaaaaaaatgaatttcatcagttttaaacaaagatttatagaatctatggatgatgacttaaatactcctaaagcaatagcaactatatttgatttagcaaaaatgattaaaaaatcatcatcaacacatgacgttagccaagggttgattttgttcagagaactttcaaatattttaggattaaattataagaaattaataaaagataaagttgctaatgatgtaaatattaacgaaattgaactaatgattgaagaaagaaatcaagctaggtcagataagaactggaaagaggctgatttaattagagataaactgcttgaattaggtattgaaataactgataccacggaaggaaccaaatggaagaagtagt

SEQ ID NO: 299284 - DNA, 772 bp, Unknown
  Bacterial polypeptide expressing nucleotide sequence isolated from the Sargasso Sea
agcgaaagtcagcctggatgggaatctccatggggtattgggagaccgggatggcatacagaatgttgtgtgatgtctgaagtaaatctaaaaataccttttgatattcatggtggtggacaagacttactctttcctcatcatgaaaatgaaattgctcaatcttgtgcaagcgttaattctgacaatcctgaagattatgctaagtattggatacataatggttttgtaactatagatggcgaaaaaatgtcaaaatctcttaataatattattcttctgaatgatcttttaaaagaacatgatggagaaacaataagactagcactgttatcctctcattatcgaaaatcacttgattggaatgaaaatgtaattaagcagtctaaagtattgttggataaagtttatgattttcttgttacctatgacgatgatccagaaggtgaaattgatgaaagtctcatagaaaatttttctaatgatcttgatatacctaaagtattaacttctattaatgaacttttaaaaaataaaaattcttctaaccctcgaactatcaaacaatctttattatttgcgggcagtattttaggagtatttaataaaaaaccatcggaatggaatatgcaaattgaaatgagtaaatctgaaatggcagaaatagaaaagcttattaatgagaggaaaactctcaaagaaaataaagattttattggcgctgatgcaatcagagattcattgttggaaaaaggtattgagcttatagatt

SEQ ID NO: 299285 - DNA, 454 bp, Unknown
  Bacterial polypeptide expressing nucleotide sequence isolated from the Sargasso Sea
atggataaagatatttttttaacaaacagccttggcaacaagaaggaaaagttcaatccaattaattctaagaaaattggaatgtacgtgtgtggtcctacggtatatgataatccccatataggtaatgcaagacctttgattgtatttgatattttgtttaaagttttaaaatgtaaatatggaaacaaagaagttacttatgttagaaatattactgatattgatgataaaattattaaatcatctttagaaaaaaatatatctataggagatcttacaaaaaaaattactaaaatcttccatgaagattgtaagtatttaaattgtgaagttccttcacacgaacccaaggccactgaaaatatttctttaatgattgaaatgattagcaaacttataaaaaacggtaatgcttatgaaagcaaacagcatgtttattttgatgtaaata

SEQ ID NO: 299286 - DNA, 832 bp, Unknown
  Bacterial polypeptide expressing nucleotide sequence isolated from the Sargasso Sea
agcggtataacaaaagtttttcataacgattgtgaaagtctaaattgtttaaaaccaacaaaagaaccaaaagctactgaacatataaatgaaatgattcagatgacttcctcattgattaagaaaaattttgcttatgaaaataatgggcatgtatatttttcggtatcttcttttaagaattatggaaaattatctaataaaaacctagatgaattaaaagcaggatcaagaattgaagtatcaggtttaaaaaaaaacccaatggattttgttttgtggaaaccatcaaacaaagaagatccaggttgggactctccatggggtagaggaagacctggatggcatttagaatgttcagttatgagtgaaaaatatctaggaaaaatttttgatattcacggaggtggtcttgatttaatttttccacaccatgaaaatgaaatagctcaatcttgttgtaataattcaactaaaaattttgctaattattgggttcacaatggttttgtaactattaataatgaaaaaatgtctaaatctcttggaaatataatctctatttctgatgcagtaaataaatattccgggcaagttgttagactagctttgttgagcgctcattatagtcagcctctagattggaatgatgattttttaaataaccaaaagaacacaattgataaatggtatagtctttatgatgaacaaaatgatgaaaaaatatcagatattgtagaagtattattagacgatttaaatactccaggtttcatagcaaaaatacacgagctatataacaaggctaattcaggcgataaaaaaaagatct

SEQ ID NO: 299287 - DNA, 764 bp, Unknown
  Bacterial polypeptide expressing nucleotide sequence isolated from the Sargasso Sea
tccatggggcaaaggaagacccggatggcatttagaatgttcagcaatgtcaaaaaaatttttaggagatgagtttgatgtccatggaggtggtattgatttaatatttcctcatcatgaaaatgaaatagcacaatcaagatgtgctaatggtacaaaggcatttgctaattattggttgcacaatgcatttattactatgtccaatgaaaagatggcaaaatcacaaggtaacattttaaaaataaaagattttagaaataagataagtggccagattttaaggttagctttaatgagcgcgcattacaaacaaccattagattggaatgataagcttttagaagattgtcaaaatacaattaataaatggtacaatgtttatttagatagtaaaaacaatacggatatctcggatgaaattcttgaacccctgtatgatgatttaaatacaccaggttacatagcaaatttacataaattatatgaaaaagcacaaaaaggtgatgacaatgacaaagctatatttgtttctgcttgtcgatttgtaggtttattaaatcaaaataaagaggagtggttaagtttgaagaaaagtaaagcctctatatctgaagaagaaatattgaagaaaattgacgaaagaaacaaagcaagagagaaaaaaaattatgaagaagctgataaaattagaaatgaactctcagataaaggtgttttaatagaagataaagatggtaaaacgatttggaaatttaaatgag

SEQ ID NO: 299288 - DNA, 778 bp, Unknown
  Bacterial polypeptide expressing nucleotide sequence isolated from the Sargasso Sea
gatccaggttggcattctccttggggaagggggcgtcctggttggcatcttgaatgttctgttatgagtgaaaaatttttaggaaaacaatttgatatacatggtggaggaatcgatcttatttttccacaccatgaaaatgaaatagcccaatcttgttgtgcaaatagaactgaaaaattcgtaaattattggctacataatggatttgttacaattaataaagaaaagatgtcaaaatctattggtaatattgttacgattaataaacttaaggaaacagtaaatggtcaagtagttagacttgctcttttaagttctcattacaagcaaccgctagattggaatgaaaaattaattatggaaagtcaaaatacattaaataagtggtacagtcagtttgaagagattaattatgaagaattaaatgatgacatcattaaaccacttcaagaagatttaaatactccagagtatatagctaagttacattcgctttatgattcttcatctaaaggagataaatcatctaagttaaaatttttatctggttgtaaacaaattggtttgcttgaagaaaataaacaaacatgggaaaattttaaaaaaatcaaatcaaaagttgatgtgaactttattgaacagaaaataaaagatagaaataatgctagaaataagggagattataaactagcagatactataagaaatgaattagagaataacggtgtaattattgaggacaaacaaaataaaactatatggaaatataaatgaa

SEQ ID NO: 299289 - DNA, 471 bp, Unknown
  Bacterial polypeptide expressing nucleotide sequence isolated from the Sargasso Sea
gatggatatttttttaacaaacaatttaacaaataaaaaagagcaattcattccaaaagatagagaaaaaataggaatgtatgtttgtggacctactgtatatgatgatccacatattggtaatgcaagacctttagttgtttttgatatcttatttagattacttaaaaataatttttcaaaagtaacttatgttagaaatataactgatattgatgataaaattatcaaatcgtctcaagaacaaaaaatttccacaaaagaacttactgaaaaagtgacttcaagctttttaaaagattgtgaatttttaaattgtgaaaatccaactcatcaacctaaagctaccgaacatatagacctaatgatagagatgattacagaacttattgaaaaaggttttgcttatgaaaatcaaaaacatgtatattttgaagtaaacaaatttgctgattatggaaaattatcaaa

SEQ ID NO: 299290 - DNA, 904 bp, Unknown
  Bacterial polypeptide expressing nucleotide sequence isolated from the Sargasso Sea
aaaatatataatgagaatctaaatgagcttggtattgaccctccagattttcaacctagagcgactgagcacatcccagagatgatagatcagatcaaggctcttatcaaaaatggtcatgcatacaaggcagaaggtcatgtattatttagtgtaaatacctttcttggttatgggtcgctttctgggagagataaggaagagcagattgcaggaagcagggtagaggtagcaccttataaaaaagacccaatagattttattctttggaagccaagtatagaagatcagccaggctgggattctccgtgggggtttggccgtccaggatggcatcttgagtgctctgcaatgtcggagaagacgttaggagtaccatttgatattcataccggagggcaggatcttcttttccctcatcatgagaatgagctggcccaatgctgtggagttcataacaatcttgataacataagctcctatgcccggtattggatacataatggtatgattaggtttgatggagataaaatgtcgaagtcacttgggaatatacaattcatcaatgatctgcttaatgatcacaatggagagactctaagattggtgcttatgtcaacgcactatcgacagcctcttaactggtcagcaaaaaccattgaccagtcaaagaaaacactcgatagattataccgaacaataaaaagtctaaatatttcattagatgatactaatgcaaaaccagctcaggaggttattgatgcactttgcgatgatctaaataccccggaagccttagggcagtttaaccttttaatgaaagatctagagaattctgaaagaagccaaaaagaagaaaaactatccataataatttctactgctagaatacttggtatacttc

SEQ ID NO: 299291 - DNA, 789 bp, Unknown
  Bacterial polypeptide expressing nucleotide sequence isolated from the Sargasso Sea
catggctttgcgactgactaatacgctatcccgggaaaaagaggagttcattccgattaatccagaacaggtccaaatgtatgtatgcggaccaactgtctatgacttcgctcacattggaaacgcacgaccggtcgttatatttgacgttttatataggttgctacaatttttgtatcccagcgtgacctatgttcgaaatattactgacgtagatgataaaatcattgcagcgggtcaaatttcgggagaaaaaattgaaaatatcactcaaaaatatataaaatattttcatgctgatatgctcgctcttaatgcacttccgccagatgttgaaccacgtgcgaccgaacatattaatgagatgttagagatgattaagtcattattagataataatcatgcttatgaggcggatggacatgtcttgtttagcgttgctgcaatggaagactatggcaagttgtcaagacattctcgcgaggagttagtttccggagcaagagtagaagtggcaccatataaagaggatccagcagattttgttttatggaagccatcggatgatgatcaaccgggctggaacagcccgtgggggcggggccgcccaggctggcatttggaatgttcagctatgagcgcaaaacatcttgggacaacctttgatattcatggtggtggtcaggatttaatttttccgcaccatgagaacgaaattgcacaatcagtatcgtgtaataaaggcgctccatttgtcaaatattgggtacacaacggttatttgacagt

SEQ ID NO: 299292 - DNA, 822 bp, Unknown
  Bacterial polypeptide expressing nucleotide sequence isolated from the Sargasso Sea
attctaaaaaataaatatggatcatcacatgtaaattatatcaggaatataacagacattgatgacaaaataattaaagcatccaatgaccaaaatatttctataaacgatttaacttcaaaaattactgaaaactttcatgaagattgtaattacttaaaatgtgaaacaccaaacaatgaaccaaaggcaacagaaaatataaaacaaatgattgaaatgatcactgaactagagaaaaaaggatttgcatattcaaaggataagcatgtttattttgaagttaaaaaatttagtgattatggaaaactatctaataaaaaattagatgaattaatagctggttcacgagtagaagtttcagaaataaaaaaaaaccctgaagattttgtattatggaaaccgtcaacagataaagagccttcatgggactctccttggggcaaaggtagaccaggttggcatttagaatgttcggttatgtcaaaaagatatttaggggaagaatttgatattcatggtggtggtagagacttaatttttcctcatcatgaaaatgagattgctcaatcaagatgtgcaaatgaaacaaattcgtttgcaaattattgggttcataatggatttataactctttcaaatgaaaaaatggcaaaatctcagggaaacatattaaaaataaaagattttaaaaataaatataatggtcaagttttaagattggcattaattagtgctcactatagacaaggattagattggaatgaaaaactaatatcagaatgtgagaagactttaagcaaatgggtattcagcctattc

SEQ ID NO: 299293 - DNA, 769 bp, Unknown
  Bacterial polypeptide expressing nucleotide sequence isolated from the Sargasso Sea
atgatccaaggtttgattgataaaagccatgcttatgagaatcaaggacatgtttttttcagcatagatacatttaatgattatggcttcctctccaatcggtctgaagaggagcagatttcagggacacgaataaaaccatccgaaataaaaaagaatcaaaaggactttgttttatggaagccatctactggggatactcctggctgggatagtccgtggggttttggaaggcctgggtggcacctcgaatgctctgcgatggcaaaaaaatatcttggaaaaacattagatattcacggaggcggtagcgatcttctgtttccacaccatgaaaatgaatgtgcacagagcatgtgttctcattcagggaagcccttggcaaactattggattcacaatgggatgatcgattttgataacgtaaagatgtcaaaatctgagggaaaccttttgcttattcgagatcttctaaaacaaattggaccagaggtcattcgcatggcatttttaacaactcactatcgaaagcccatcaattggaatgatgctcttatcaccgattctgagaagaagctcgatcgcttatatggttccatcaggaagctaggtaaagtttcaccagcagaaccaacagaagagatgatcaatgcgcttgcagatgacatcaatacacccaaggccttgagcgagctattcgccattgcaaaaagagttaataatgcaaaatcagaaaatgaatccaaacagcttgcatcgacacttgttg

SEQ ID NO: 299294 - DNA, 274 bp, Unknown
  Bacterial polypeptide expressing nucleotide sequence isolated from the Sargasso Sea
atgacgctaaagttatacgatacatattccaacgaaaaaaaactttttaagccaatcgatgcatcaaacgttcgaatgtatgtttgcggtccaactgtatattcattcccacacatcggaaatatgagaccagtgatcatctttgatttgctgtacaggcttttgattcatacttatggaaaagagcatgttacctatgtgagaaatattacggatattgatgataaaattatagaagaagcaaactcacaaaagattactatcgaaaaatgac

SEQ ID NO: 299295 - DNA, 767 bp, Unknown
  Bacterial polypeptide expressing nucleotide sequence isolated from the Sargasso Sea
atggggacttggccgacctggttggcatattgaatgtacatcgatgattaaaaatatcattggtattgattcaactcttgatatccatggaggaggaaatgatttgatttttccacatcatgaaaatgaaatagcacagggtagctgtgtatcttctgcgaaatattgtaattattggttccataatggcattgtcttggtcaacaaaaagaagatgtcaaaatctctagggaatgtaatactagttgatgatttgttgaaaaaacatgattctggaacgattcgactagctcttctctctgctcattacaggcagccattaaattggacggactcgacgattgttgaggcaggaaatcttatgaagaaatttaaagcactcgctaaatctggtaattttgatacaagaaattctgaccaaacagaaaaagagattgttgatatattatctgatgatttaaatacacctgaagcaattaaatatctgtcctctcttgctaaatctgctaggaaaaataaggatgatctaaaaaaactagttatatctgcaaagtttattggtctagatcttttaagaaaagagaaggtcatagtccatgaaaatattaacaaaaaagagattgaaaaacttattcaagaaagattagaatcaaggcttaaaggggactatgaaaaagctgataaaattcgcgaaaaacttttatcgatgaagattcacataaaagatttggaaggaaccactgtttgggactataatcctgactaac

SEQ ID NO: 299296 - DNA, 853 bp, Unknown
  Bacterial polypeptide expressing nucleotide sequence isolated from the Sargasso Sea
acaaattttattggagaaagggaaggcttataagcatgatgatggatctgtttatttcaaaatttcatctttccaagattatggaaaactttcaaacataaaaataaataaaaaaaagcttaataatagaataatatcagatgagtatgataaaaacaatgttcaagattttgttttgtggaaagcttggaaagtagatgacggtaatgtttactgggattccccatggggaaaaggaaggcctggttggcatattgaatgttctgcaatgagcaaggctacattggggtcacactttgacattcattgcggaggtgttgataatattttccctcatcatgagaatgaaatcgcgcaatctcaatgcgctaatgggaaaagctttgttaattattggctacattctgagttcttaatgatcaatgattcaaaaatgagtaaatcgtcgggaaattattacactttacatgatttaaaaaaaatgaatttctcacctgaatctattcgttaccagcttttatcaggtcattataggacaaaacttctattctccttaagaaaaaaacatgaaagtgacaagataatacaaaggataaatgatttttataatcatttaaaagaaaatggtgctaatcaaattgaagcaaaaacttacccaagtgtttacaaggattttcaaaaagctatgaacgatgacttgaattctccaaaagctattgcaatatttatggaatggatgaaaattaatcaaaaaaaaattgcaaataatgaattttccaaaggtgacctaggcgatagctggagatttttgaaaatttttgattcaatttttggctttataaaaaaagaaaaa

SEQ ID NO: 299297 - DNA, 860 bp, Unknown
  Bacterial polypeptide expressing nucleotide sequence isolated from the Sargasso Sea
ttaacgaaagattgtataaattcaatgcatgatgatttccaggctttaggaatgatcagtcctgatgccgaacctcgggctacagagaatattgactcgattatttctctcataacaaaacttatagataagggtcatgcatatgtgagtgaatcagatgtttacttttctactgaatcttttgaagaatatggaaagcttagcaaaagaaaattagaagatatgttgtctggagccagaattgatattgatctagataagaaaaatcctgctgattttgtcttatggaaaaaggatactaagggattgaaatgggactcaccttggggaccaggaagaccaggttggcatatagagtgctcagcaatgagcatggatgctcttggggaaacttttgatattcatggcggtgggtcagatcttaagtttcctcatcatgaaaatgaaatagctcaatcagaatgtgtcacaggaaaagagtttgcaaaagtatggatgcacactggatctttgaggattgatgagcagaaaatgtctaaatctctcaagaacttcatcacaataaaggaggctctaaatgatagctcttcagaggtactccgttttttcttaatttctagtcactaccgcagtccattaaattattctgatgaaggtttgaaggaagcgaagaattccttggatcgcctttataactctttacaagacctttcttacgaaatggacgatcatattccttctgaatattcagagaagtttcatgatgcaatgcaggatgactttaattctccgtcagccatatctgttttgtttgagatggtaaagcaaataaacattcttaagaaagaagatcagttaac

SEQ ID NO: 299298 - DNA, 334 bp, Unknown
  Bacterial polypeptide expressing nucleotide sequence isolated from the Sargasso Sea
atggactttccaaccgccaaaccactttctttctatgatactttcactcgtaaaaagataccatttgttcctttagataaaagtaacatccgattgtatgtgtgtggtccgaccgtctacgactatgcccatattggcaatgctaggcctgttgttgtctttgatgttttatatcgtcttttaaaatatcggttcccaacggtgacttatgttaggaacataacggacgtggatgataaaattaatgaacgtgctaagaaaagtggtagatccatcaaggaaattacagaggaaacgacaaaaactttccattcggatatgaatgcccttggag

SEQ ID NO: 299299 - DNA, 398 bp, Unknown
  Bacterial polypeptide expressing nucleotide sequence isolated from the Sargasso Sea
aatgaataaagatatttatttaacaaataatctaaccaataaaaaagaaaagtttgttccaatagataaaaataaagtaggcatgtatgtatgtggaccaacagtgtatgatgatcctcatattggaaacgcaagaccactagtagtttttgatattctttttaagattcttaaaactaaattttcatctgtttcttatgtaagaaatattactgatgtagatgataaaataataaaatcatcgaatgaaaaaaatatttctattaaagatttgaccacaacaataactaaaagttttcacgaagattgtaattatttaaattgtgaaaatccatctcaagaacctaaagcaacagagcatatagatttaatgattgagatgatttcacaattaatta

SEQ ID NO: 299300 - DNA, 797 bp, Unknown
  Bacterial polypeptide expressing nucleotide sequence isolated from the Sargasso Sea
accttcaaacgaaaacgaactttcttggaattctccttggggcaaaggtagacctggatggcatttagagtgttccgttatgtcaaaaagatttttaggcaatgagtttgatatacacggtggaggaagagatttaatttttccacatcatgaaaatgaaattgcacagtctagatgtgcaaatgatactaaatcatttgcaaggtattggatgcataatggttttattactatgtcaaatgaaaaaatggcaaaatcacaaggaaatattttaaaaattaaagattttaaaaataagtataacggacaagttttaagattagccttaataagtgctcactacagacaaggcctagattggaataataagctaatagaagaaagtgaaaaaactttagacaaatggtattcagtttattttgatttaaagagaaagatttgtattccttacgaagttttaaaacctttatatgatgatttaaatactcctggttatatagcaaacttacacagcttatttaacaagtctgtaaaaggaacccacaatgataaagagctttttattgcatcatgtcaatttattgggttgttacatgaatctaaagaacaatgggctaaaattaaaaaaaataaattaattatttctgaagaagagataatttttaaaataaatgaaagaaataaagctagagataataaagattacaaattagctgacaaaattagatacgaacttcaagataagggagttttaattgaggataaagatggtaaaacctcgtggaaattaaaatgag

SEQ ID NO: 299301 - DNA, 373 bp, Unknown
  Bacterial polypeptide expressing nucleotide sequence isolated from the Sargasso Sea
tatggatatttttttaataaataatttaactaacaaaaaagaaaaatttgtcccaaaggataagaaaagaattggaatgtatgtttgtggacctacagtttatgatgatcctcatattggaaatgcaagaccattagttgtttttgatattttgtttaaactattaaaaaataaatttcctaaagtaacttatgtaagaaatattactgatattgatgataaaattataaagtcatcacaagagaaaaaaatatctactaatgaattaacagaaaaaataaacaaaagttttttagaagattgtaaatttttaaattgtgataatcccactcatcagccaaaggccacagagcacattgatttgatgattgag

SEQ ID NO: 299302 - DNA, 758 bp, Unknown
  Bacterial polypeptide expressing nucleotide sequence isolated from the Sargasso Sea
gatgatcaaactttttaataccttaagcaaaaaagttgaggttttcaagcctattgatgatgtagtaaaaatttattgttgtggggtaactgtttatgatttatgtcatcttggtcatgccagaagttatatcgcttgggatatattaagaagatttttaatttacagtgatttcaaagtgaagtatgttcaaaattttacagatattgatgacaagatcttaaaaagagcgaaagaagaaagtagttcaatgaaggaagtatctgaaaagaatatcattgaatttcataaagatatggattctttagggataatgcgtccggatagcatgccaagagcaacgaatcatatatgcaatatctgctccttcataacaatccttgaggacaaaggttatgcatactccagggatggagacgtttattattctgttttcaaaaataaaaattatggaaagctaagtaatcaaaatttacaggaacaaaatatcaatcagcaaggaagaatgattaatgaggaaaatagtaaaaaacttaatccgcaagattttgcgctatggaaaaaagccaaagatgatgaaccattttttaattcgccatggggtaaaggaaggccaggatggcatattgaatgttcggcgatggttaaagatgaattaggagatactatcgatatccatttaggtggttctgatttaatttttccacatcatgaaaatgaaatagcccaatcagaagcagccaatggcaaaaagcttg

SEQ ID NO: 299303 - DNA, 243 bp, Unknown
  Bacterial polypeptide expressing nucleotide sequence isolated from the Sargasso Sea
aatgaatagagatttgcatttatcaaatagtcttggaaacaaaaaagaaaagtttgaacctttagatataaaaaatattggtatgtatgtttgcggaccaactgtttatgatgatcctcatataggaaatgctagacccatagttatttttgatttactttttaaagtccttaaatgcaagtttggaaaagaaactgtaacttatgttagaaatattactgatatagacgataaaataataaa

SEQ ID NO: 299304 - DNA, 908 bp, Unknown
  Bacterial polypeptide expressing nucleotide sequence isolated from the Sargasso Sea
ggaaataaggcagttacatatgtaagaaatattactgatattgatgataagataatagcatcatcagttgaaaaaaaaatcacaattaaagatcttactaataaaattacaaatatttttcatgatgattgtaaatatttaaattgtgaaaaccctacccatgaaccaaaagctactgaaaatatttcattaatggttgaaatgatcggtacgcttattaaaaataagtttgcttatgaaaaaaataaccatgtttattttgaagtaaaaaaatttaaagattatggaaaattatcaaataagaatttagatgaattaattgcaggtgctagagtagaggtatctgaaaataaaaataatcctgctgattttgtgttatggaaaccttcagttgaaggtgaaccttcttgggattctccatgggggaaaggaagacccggttggcaccttgaatgttctgctatgtctaaaaaatttttaggtgacaaatttgatattcacggtggaggaagagacttaatttttccacatcatgaaaatgaaattgcacaatctagatgcgctaatgaaaatgaaacttttgccaattattgggttcacaatgggtttataacaatttcaaatgaaaaaatgtcaaaatcccaaggtaatattttaaaaattggcgatttcaaaaataatgtaagtggtcaggttttaagattagcattgataagttctcattataaacaaccattagattggaatgataaactattatctgaatgtgagaaaactattaacaaatggtatgaaagctacatagaaattaaaaaacagactttaattcctgacgaatatttatctcctttgtatgatgatttaaataccccaggctttattgcaaatcttcataaactatttgaaaa

SEQ ID NO: 299305 - DNA, 778 bp, Unknown
  Bacterial polypeptide expressing nucleotide sequence isolated from the Sargasso Sea
gctttgaacgtgctaccgcctgatattgagccacgagcaacagaacatattacgcagatggttgctatgatcactgggcttattgaaaagggatttgcttacgaagcagagggccatgttttgttttctattgaaaagatgccggattatggccggctttcaggtcgcagccttaatgaaatggttgctggagctcgggttgaaattgcgccgtacaaggcacatccagctgattttgtgctctggaaaccatcaaaagcagaaaatccaggctgggacagcccctggggccgaggtcggccgggatggcatattgaatgttcagctatgtcatcagattatctgggtgtagagtttgatattcatgcgggcggtcttgatctggtttttcctcatcacgaaaatgaaattgcacaatcacgctgtgcgcatggcacatctcaaatggctgcgttttgggtgcataatggctatgtgactgttgaaggtgagaaaatgtctaaatcattgggcaatttcacttcagttgaagatgcacttcagcggcacaggggagaggtgattaggtttagcctgttatccgcacactaccgcgcgccatttgatttttctgatgctgcgctccagcaagcccgcacggttctggataaattctatcgggcagtatccgtcgcggacagagctgatatcatcacagatttaactttgctagacactgaatttattactgcattggcggatgacatgaatacgccgctagccatcagctgcctgcacc

SEQ ID NO: 299306 - DNA, 731 bp, Unknown
  Bacterial polypeptide expressing nucleotide sequence isolated from the Sargasso Sea
catgagtaaagatatttttttaactaacagtttaggaaacaaaaaagaaaaatttgtacctattaataaaaataaaataggaatgtatgtttgtggtccaacagtttatgatgatccacatataggaaatgcaagacctctagtaatatttgatgttttatttagaatactaaaatgtaattttggagaaaagaatataaactatgtaagaaatattactgacatagatgataaaattatatcatcagctattgagaaaaatatttctacaaatcaattaacgaaagaaattacaaaaaattttaatgctgattgtacatatttaaaatgtcaagagccaacatttcaaccaaaggctacagaaaatattcctttaatgattgaaatgatcaataaacttatcaaaactaattacgcataccatagcagcaaacatgtgtattttgaggttaaaaaatttaaagactatggaaagttatcaaataaaaaattagatgagttaattgctggatctagagtagaaatatcagaaaataaaaaaaaccctgaggatttcgttttatggaaaccttcaaaagaaaatgaaccttattgggattctccatggggaaaaggcaggcctggatggcatttagaatgctcagtaatgtccaaaaaatttttaggggataaatttgatattcatggtggaggaagagatttaatttttccacatcatgaaaatgaaattg

SEQ ID NO: 299307 - DNA, 589 bp, Unknown
  Bacterial polypeptide expressing nucleotide sequence isolated from the Sargasso Sea
atgaataaagaattaaatatttttaatacactttctggacaaaaagaaaaatttgttcctattaacaaggaaaaagtaggcatgtatgtttgtggtccaacagtatatgactttccacacataggaaatgccagaccattagttgtttttgatgttttatacagacttctattaaagatttttggaaaaaacaaagtgacttatgtcagaaacataaccgatatagaagataagataattgaagcatcaaaaagaaataaggtacctatagatatgcttacaacaagtacaacaaaaagctttcatgatgattgcaaatatttgaattgttttaaaccaaattttgaaccaaaagcgacagaacatatcaaaggtatgattgccatgactgagaaactattaaaaagtaaaaatgcttatgaaaaagataagcatgtctatttttctgtaaattcatttaaaaattacggcaagttatccaaaaaaaatctagaagaattagttgctggagcaagggtagaagtttcaaaatcaaaaaaagatccacttgattttgttctttggaaaccatcagcaacagaagacccgg

SEQ ID NO: 299308 - DNA, 493 bp, Unknown
  Bacterial polypeptide expressing nucleotide sequence isolated from the Sargasso Sea
aatgaataaagatatttttttaacaaatagttatggtggaaaaaaagaaagattccaaccaattgatgaaaataatgtcaaaatgtatgtttgtggtccaacagtttatgatgatccacatataggtaatgcaagaccattggttgtatttgatttactatttaaagtcttaaagtgcaaatatggtaatgataaagttacatatgttagaaacatcacagatattgacgataaaataatccaatcagcaaaagaaaaaaaaactacaattaaagatctaaccactaaaacaaataacaattttcaagaagattgtgattatcttatttgtgaaaaaccgaactttcaacctaaagcaactgagaatattaaagtgatgatagaaatgataagtattttggttgaaaaggtttcgcatatgaaagtaagaaccacatttatttcgaagttaacaaatttaaagactatggaaaattatctaataaaaaagtag

SEQ ID NO: 299309 - DNA, 335 bp, Unknown
  Bacterial polypeptide expressing nucleotide sequence isolated from the Sargasso Sea
cctgcgcttcaccaacagcctcaccagccgtaccgaagcatttgagcctatcgaggccggcaaagccacgatctactgctgcggcgtcacggtctacgacctctgccatctgggccatgcccgcagctacatcaactgggatgtgctgcgtcgctacctgatctggcgcggctacgacgtcacctacgtccagaactacaccgacatcgacgacaagatcctcaaccgtgccaatgaggaaggcagttccatggaggaggtcagcgaacgcaatatcgaggcctttgaaatcgatatgggccggctgaacatccttccgggccgatcgcatggcc

SEQ ID NO: 299310 - DNA, 840 bp, Unknown
  Bacterial polypeptide expressing nucleotide sequence isolated from the Sargasso Sea
aaattcaaggattacggtcagctatcaaacaaaaaattagatgaactaattgctggatcaagagtagaagtaagtgaaaataaaaaaaattcagaagattttgttttatggaaaccgtcagacagtgatgaaccatcatgggaatctccatggggcaaaggaagaccaggatggcatttagaatgttccgcaatgtcaaaaaaatttttaggaaaggagtttgatgtccatggtggaggtattgatttattatttcctcatcatgagaacgaaatagctcaatcaagatgtgctaatgatacaaaaatattcgctaaattttggatgcacaatgcattcatcaccatgtccaatgaaaaaatggccaagtctcaaggaaatattttaaaaataaaagattttagaaataagataaacggccaagttttaagactagctttattaagcgcacattataaacagccattagattggaatgataaacttctggacgattgccaaaatacaataaacaaatggtacaattcatatctagaaattgaaaataattatgaggtttctgatgaaattcttcagcccctatacgatgatttaaatacacctggatacattgcaaatttacatcgattatatgaaaaagctcaaaaaggtaacgatcaagacaaatctttatttgtttcggcctgtcaattcgtgggacttttaaatgaaaataaaggaaattggcttaaattcaaaattagtaatgctttaatttccgaaaaagaaattttacaaaaaattcaagaaagaaacaaagcgcgagataacaaaaattacgaagaagctgataaaataaga

SEQ ID NO: 299311 - DNA, 772 bp, Unknown
  Bacterial polypeptide expressing nucleotide sequence isolated from the Sargasso Sea
tatggaaaattatcaaatagaaataggagaagaacagatagcgggtagcagagtagaagtagcaccttttaaaaaagacccagcagattttattttatggaaaccaagtgatgatacacaacccgggtgggattctccatgggggattggaagaccaggatggcatacagagtgctcagctatgtctgaaaaaacacttggattgccatttgatatacatggaggaggaagagacttaatctttcctcatcatgaaaatgaaattgcacaaagttgctgctcttcagcaagtatcgatgatccaacttcttatgctagatattggatgcacaatggatttgttacgattgatggagaaaaaatgtctaaatctctagggaatattattttagtaaaagacttaattgaagatcaccatggagaggttattaggctagcacttttatcatctcactacagacaaggacttgattggaatgaaaaaataatccatcaatctaaaaaactattagataaactttatgccattcttaaagatttagaaaatactaatcaagatgattcaattcaatcaaacaaagatgtaattggaccattgatggacgatttaaatacacccggcttaattgcagaattaaataaaatagttaaagaatttagcacgataaaagatgatgaaaagccagctgttaaatcaaaattaatctttattggatcgatacttggaatccttggagataaaaattttaatcatgtttctgatgagtttaaa

SEQ ID NO: 299312 - DNA, 592 bp, Unknown
  Bacterial polypeptide expressing nucleotide sequence isolated from the Sargasso Sea
atgatcaaactttttaatactttaagcaaaagagttgaggtttttaagcctattgatgatgttgttaaaatttattgttgtggagttactgtttatgatttatgtcatcttggtcatgcaagaagttatattgcttgggatgtattaagaagatttttaatatacagtgattacaaagtgaagtatgttcaaaattttacagatattgatgacaagatcttaaaaagagctaaagaagaaagcagttcaatgaaagaagtatctgaaaaaaatattattgaatttcataaagatatggattcattgggaataatgcgtccagatagtatgccaagagcaaccaatcatatatgtaatatctgctccttcataacaatccttgaggacaaaggttatgcatattctagggatggagatgtttattattctgtttttaaaaataaaaattatggaaaactaagtaatcaaaatatacaagaacaaaatatcaatcagcaaggaagaatggcaaatgatgaaaatagtaaaaaacttaatccgcaagattttgcactatggaaaaaagccaaagaagatgaaccattttttgatt

SEQ ID NO: 299313 - DNA, 532 bp, Unknown
  Bacterial polypeptide expressing nucleotide sequence isolated from the Sargasso Sea
attctaggtgtgaagcaaccagatatacaaccaaaagcaactgattatattaaagagatgataaatcttattgaaaaattaattgaaaatagttttgcttatgaaaaagatggtcatgttttatttcatgttccgtcatttaaaaattatggtatgttatctggccgcaaccgtgatgaacaaattactggaagcagagttgaagttgctccatacaaaaaagaccctacagactttgtattatggaaaccaagtccgactcccttaccagggtgggagtctccatggggacttggaaggccaggttggcatttagagtgttcagcaatgtcagaaaaaactttgggtttaccatttgatatacacagtggaggagctgatttaatttttcctcatcatgaaaacgaaattgctcaaacatgtgcggcacataaaagtaatgataatttaaaatccttttcaaagtattggtttcacaatgggtttgtaaatgtagagggagaaaaaatgtctaaatctattggcaatatta

SEQ ID NO: 299314 - DNA, 554 bp, Unknown
  Bacterial polypeptide expressing nucleotide sequence isolated from the Sargasso Sea
aatgaatattgaaatatttaatacattttcaaaaaaaaatgaaatttttcaaccaatagattccaataacgttcgtatttatgtttgtggccctactgtatatgacataattcatattggtaatgcaagaccactaattgtttttgatgttctagtcagatttttgaaacttatctaccctaaggttacatacgtaagaaatatcacagacgttgatgacaaaataataattcaatctcaaaaaaataatgaaagtataactgaattaacatcaagaactatagaggcttttgctgaggatgctaaatccctttatgttttaaaacccgattatgagccaaaggctactgagcatattcctgagatgttgaaaattataaaaaccttaataggaaataataatgcatatgtatccaatgggcatgtatttttttcagtttcatcgatgtcaaaatatggtgagctttcaggaatgaaactagatgagatgattgatggtgctagagtagatgttgatagtaataaaaaagaccaggtgactttgtattatggaa

SEQ ID NO: 299315 - DNA, 862 bp, Unknown
  Bacterial polypeptide expressing nucleotide sequence isolated from the Sargasso Sea
tagtaatgtaaggatgtatttatgtggtcctaccgtgtacgaccgatcccacctggggaacgcaagaaatgttatattatttgatgttttattcaggttttttagggaaatttatggtgatgataatgtaaaatatgtgagaaattttaccgatatcgacgacaagattaacaaaagagctaaagatcttggcaaagaaatacaagttataacggatgaaacaattgcttggtatttggaagatatggcgctacttggcaaccttttgccgaatgaaatgcccagggctacagactatatggctaaaatgataaaaatgatcgaagatcttgttcagttaggtcatgcgtacgaagcagagggtcatgtcctcttttctgttaaaagctttgaggactatggtaggctttctggccgctctattgaggatatgatagctggagccagggtggaaattgctccttataaggctgaccctttggattttgttttgtggaagccttcgagtgatgatcttcctggatggcaaagtccgtgggggagggggcgacctggttggcatttagaatgctcagccatgagccatgatctattaggagatacttttgatattcatggcggggggaacgatctaatatttccacatcacgaaaatgaacttgcccaaagcaaatgctgttttccttcgggcggtttcgcaaatttctggttgcataatgaaatgctccaggtagatggaaaaaaaatgtcaaaatcgctgggtaatttttttacagtccgagatctgatagataaagggtttccgggagaggttatccgatttgtgtttttatctactcattaccgcaaaccgatggattgg

SEQ ID NO: 299316 - DNA, 817 bp, Unknown
  Bacterial polypeptide expressing nucleotide sequence isolated from the Sargasso Sea
gaagattttgttttatggaaaccttcagaagatgatgagccttcatgggagtctccatggggaaaaggaaggccaggatggcatctagagtgttcggcaatgtcaaagaagtttttaggagatgagtttgatgttcatggtggtggtatagatttattatttcctcatcatgaaaatgaaatagctcaatcaagatgcgctaatgatacaaaaatatttgcaaaattttggatgcataatgcattcattactatgtctaatgaaaagatggctaagtctcagggaaatattttaaaaataaaagattttagaaataagattagcggtcaagttttaagattagctttgctaagtgcaaattataaacaaccattagattggaatgataaacttctggaagactgtcaaaatacaataaataaatggtacaattcatatttagatattgaaaaaaattctaaagtttctgatgaaattcttcagccactttacgatgatttaaacactcctggatatattgctaatttacatcaattatatgataaagctcaaaaaggtaacgatgaagataaatctttatttgtttctgcttgtaaatttgtaggactattaaatgaaagtaaagaaaattggcttaaatttaaaattaacaaagctttaatttctgaaaaagaaattttacaaaaaattcaggaaagaaataaggctagagagaacaaaaaatacgaagaagctgataaaattagaaatgagctttctgacaaaggtgttttaatagaagataaagatggtaaaacgacttggaaatttaaatgag

SEQ ID NO: 299317 - DNA, 697 bp, Unknown
  Bacterial polypeptide expressing nucleotide sequence isolated from the Sargasso Sea
tatggctaaagatatatttttaactaatagtcttggtggtaagaaagaaaaatttacacccaaaaatgaaaaatccataggaatgtatgtttgtggtcctactgtttatgatgatccacatattggtaatgccagaccattagttgtttttgatattctatataaaattttaaaaaatagatatggatcaacatctgtaaaatatatcagaaatataacagacatagacgacaaaataatcaaagcatctaatgatcaaaatatttcaataaatgatttaacttcaaaaattactgaaaattttcataaggattgtaattacttaaaatgtgaaacaccaaacagcgaaccaaaggcaacagaaaacataaaacaaatgattgaaatgatcacagaactagagaaaaaagggtttgcatactcaaaggataaacatgtttattttgaagttaaaaaatttagtgattatggaaaactatctaataaaaagttagatgaattaatagctggttcacgagtagaagtttcagaaataaaaaaaaatcctgaagattttgtgttatggaaaccgtcaacagataaagagccttcatgggattctccttggggcaaaggtagaccaggttggcatttagaatgttcggttatgtcaaaaagatatttaggagaagaatttgatattcatggtggtggtaga

SEQ ID NO: 299318 - DNA, 415 bp, Unknown
  Bacterial polypeptide expressing nucleotide sequence isolated from the Sargasso Sea
gaagggcgcccaggttggcatattgaatgttcagctatgagctcaaagcacttaggtgaacattttgatattcatggtggggggtctgatttacagtttccgcaccatgaaaatgaaattgcgcagtcatgctgtgccaataatggtgagtatgtaaatacgtggatccatacgggtatggtacaagtaaataaagaaaaaatgtctaaatcgttagataatttttttactgtacgcgatgtgctaaaagagtacgaccctgagtcggttcgttactttttaatatcaggccattaccgcagccaacttaattactcgcaagaaaacttagaccaagcgcgttcatcgctagagcgtatttatactgctttacgggacgttaaacccatcgagtgtgagcttgagagtaacgagt

SEQ ID NO: 299319 - DNA, 803 bp, Unknown
  Bacterial polypeptide expressing nucleotide sequence isolated from the Sargasso Sea
aatgaataaagatatttttttaacaaatagcctaggtaataaaaaagataaattcataccaataaacccaaaaaaaattggaatgtatgtttgtgggccaacagtttatgacaatccacatattggcaacgcaagacctttagttgtttttgatattttgttcaaaattttaaaatgtaaatacggaaataattctgtaagctatatcagaaacataacagatattgatgataaaataatatcttcatcaattgaaaaaaatatttctattaacgaacttacaaaaaatattacaaatatttttcaccaagattgtaaatatttaaattgtgaaaagccaacaaaagagccaaaggcaacagaaaatatttcgttaatgattgaaatgattaataaactaattcaaaataaatttgcttatgaaattaataaacatgtttattttgaagtaaaaaaatttaaagattatggaaagttatcaaacaaaaatttagaagaactgatcgcaggagcaagagttgaggtgtcagaaaataaaaaaaatccagctgattttgtattatggaagccctctacagaaaatgaaccatcatgggattcaccatgggggaaaggtagaccaggttggcatcttgaatgctcggtcatgtctaaaaaatttttaggagataaatttgatattcatggaggaggaattgatttaatttttcctcatcatgaaaatgaaattgcacagtcaagatgcgctaatgaaaatgaaacatttgcaaattactgggttcacaatggatttataacaatct

SEQ ID NO: 299320 - DNA, 286 bp, Unknown
  Bacterial polypeptide expressing nucleotide sequence isolated from the Sargasso Sea
atggacttgatgctttacgatacatttaccaattcaaaaaagaagtttgaaccaattgatccaaataatgtacgaatgtacgtttgtgggccaactgtttacgattatgcgcatgtaggcaatgctcgaccagtaatagtgtttgatattttatttcgattacttcaaaaaatttatggcagtggaaatgtaacttatgtaagaaatatcactgacgttgatgataaaataatacacgcagctaatgatcaaaatgaagacattggaatacttacagaaaagacaa

SEQ ID NO: 299321 - DNA, 748 bp, Unknown
  Bacterial polypeptide expressing nucleotide sequence isolated from the Sargasso Sea
aatggaaaaaaatattaaaatatataactctctcacaggaacaaaagaaaatttcattccaatcaataaagaaattattggtatttatgtttgtggtcctactgtctacagtgaagttcatttaggcaattgtagaacctttgttttttttgatacacttgtaagatattttaaattcctcggatacaaagttaggtacgtaaggaatattactgatgttggtcatttagaaaatgatgcagatgaaggagaagataaaatttctaaaaaagctagaatagagcaattagaacctatggagattgctcaaaagtatacaaacgattttcatgatgttatgaaatcatttaatgctttgccaccagatattgaaccaactgctacaggacatatcattgagcaaattaacatgattgaaaaaatcattgaaaatggttttggttatgttgtgaacaactccgtttattttaatgttgataaatacatcagtcaagggtacaattacggtgaactaagcggtagacaagtagatgaactaattgctggttcaagaactttagaaggtcaggccgataaaaaatcaccaaatgattttgcattatggaaaaaagcggattcatctcacatcatgcaatgggactcaccttggggcaaagggtttccaggttggcatttagaatgttctgcaatgagtgctaaatatttagggtcaacttttgacatcccacggtggaggaatggatttaaa

SEQ ID NO: 299322 - DNA, 562 bp, Unknown
  Bacterial polypeptide expressing nucleotide sequence isolated from the Sargasso Sea
tatggtaactatatataatagttttactaggcaaaaagagctatttacaccaatcgagccaaataaaattcggatgtatgtctgcggcatgactgtctacgatttttgtcatattggtcatgcacgagtaatggttatttttgacatggtctctcgctacttgcgcagcattggttttgacgtactttatatcagaaatatcacggatatcgacgacaagattatagagcgtgctaagagtaataatgaatcaattactgatttaacaaatcgattcattgaagaaatgaataaagatgctaacgctttaggcgtcttacctcctgattcagaaccaaaagcaaccgagcatatgaccgagatcattgcaatgatttcagaattaattaaaaagaagcatgcctatctagcaggtaatggcgatgtttattttaatgtaggctcatttaatgattacggaagattatcgggaaagaatattgaagaattaagggcaggggatagagttgaagtccaaaaagagaaaaatgacccactagatttcgttttgtggaaatctgca

SEQ ID NO: 299323 - DNA, 268 bp, Unknown
  Bacterial polypeptide expressing nucleotide sequence isolated from the Sargasso Sea
atgtcagcttacaagcagcaactaaaaatatacaactcgttatcatccaaaaaagaagtatttaagtctaaaaataaagacctagttggaatgtatgtttgtggaccaactgtctataacactgttcatctaggtaattgtagaacctttatttcttttgatctaatatttagatatttgaagcatttgggatacaatgtaaggtatgtaagaaatattactgatgtaggtcatcttgaagaaaatgaagaagatgataagatttgaa

SEQ ID NO: 299324 - DNA, 918 bp, Unknown
  Bacterial polypeptide expressing nucleotide sequence isolated from the Sargasso Sea
tttaacgtgtcacttattgtgcgcaatatcactgatgttgatgataagattaacgaacgtgctgcggcaaatggacagacaattgaagatttgtgcgcagaaacaatcataagtttccatgctgataccgctaccttgggcgctgagccgccagatgttgaaccgcgggccacgcaacatattaacgaaatgattgcgatgataagtgtgttgatagacaaggggcatgcctatgccgctgatgggcatgttctgtttcatgtgacaacaatggataattatggggcgctatccaaacgcagcatggaagatatgatcgccggtgctcgcgtcgaggtcgcgccctacaaacgcgcaccagaagattttgtgttgtggaaaccaagcgcacctgaacaacccggttgggacagcccatgggggcggggtcgtccgggttggcatattgaatgttcggcgatggcaaaaacttatcttggtgatgtctttgatattcatgccggtgggctggatttgatttttccccatcatgagaatgaaattgcgcaaagttgttgtgcgcatgggacaagccttatggccaaatattggttgcacaatgggtttgtcaccatgaatgatgaaaaaatgtccaaatcgcttggtaatataattactgttgaagaggcaacatcccgttaccgcccagaagtgctgagggcggcgttgttgtcggcgcattatcgcgcccctcttgatttatctgatagcaccatgcaagacgcgcataatagtttggatcgcttgtacagggcggctggttcagcagaaatttcagatgatcatgttgatgatgaacttttgacttgtctttgtgatgatattaacacgccagcggcgatggcccgtcttcatgagcttgcgcgctgtgccaataaa

SEQ ID NO: 299325 - DNA, 840 bp, Unknown
  Bacterial polypeptide expressing nucleotide sequence isolated from the Sargasso Sea
gaatataactgatattgatgataaaataattaaatcctcacaagagcaaaaaatttctacaacagaacttacagaaaaaataactttaagtttttttaaagattgtgagtttttgaattgtgaaaatcctactcatcagccaaaagcaactgaacatattgagctgatgattaaaatgataaatgatttaattaaaaaaggatttgcatatgaaaataaaaagcatgtttattttgaggttaaaaaattttctgattacggaaaattatcaaacaaaaatttagaggatttagttgctggatctagagtagagattagtgaaaataaaaaaaatttagaggactttgttttatggaaaccatcaaatactgatgaacctacatgggactcaccttggggcaaaggtagaccaggttggcatttagagtgttcagctatgtcaaaaaaatttttaggtaatgaatttgatattcatggtggaggtatagacctaatttttccccatcatgaaaatgaaatagcccaatctagatgtgcaaatgatacaaaagtttttgcaaattattgggtgcataatgcatttatcaccatgtctaatgaaaaaatggctaaatcacaagggaacatccttaagataaaagattttagaaacaagataagtggtcaaataataaggttagccttaatgagtgcacactataaacaaccattagattggaacgataaattattaagtgattgcgaaagtactttagataagtggtataaagtatattcatctaatcttaaacctgtcaaagtttcagatgaaattttaaaaccactttatgaagatttgaa

SEQ ID NO: 299326 - DNA, 816 bp, Unknown
  Bacterial polypeptide expressing nucleotide sequence isolated from the Sargasso Sea
gatgagcataagattttacaattcatacagtagaaaaaaagaatctttcaagccaataattgatggcaaagtaggcctgtatacttgtggaccaacagtatatgattttgcccatattggaaatttcagaacattcatatttgaggaccttttgaaaagatggttaattcattctggctataatgtgacccatataatgaacataactgatttagatgataaaactattgcaaaggcaaaaactcagaaagtagacttgagggttataactgaaaaatataccaagcaatttatgaatgatcttaggtggcttaagatcttaccagctgataaatatccaagagcaactaaatcaattgataagatgataaaaattataaaaattttaattgataaaggccacgcatatattgaatcagatgggtcggtctattttaacataagtactttttcagattatggaaagttgactagggtaactttaaaaggccaaaagaaatcagatcgaataaatgatgatgattacgataaaagttcccctcaagattttgcactctggaaaggatggaaaaaagaagacggtagagtaggatggaatgccccgtggggaaaaggtcgtcctggttggcacatagagtgttctgctatgagtagtgaaaatctaggcaaccattttgatatccattgtggtggagttgacaatatgtttccacaccatgaaaatgaaattgcacaatctaagtgttctagtggagaaaaatttgttaattactggcttcattcagaatttttgctggttgatggtggtaaaatgag

SEQ ID NO: 299327 - DNA, 834 bp, Unknown
  Bacterial polypeptide expressing nucleotide sequence isolated from the Sargasso Sea
taattacatcatctttagaaaaaaaaatatcaacacaagaattaacaaaaaaaattacaaaaagttttcatgaagattgtgaatatttggtttgtgagaggccttcacaagaacccaaagctaccgaaaatatttctcagatgatcgaaatgattaataaattgatgaaaaatggatttgcatatttaaataagcaacacgtttattttgaagtaaaaaaatttaaagattatggaaaattatctaacaaaaagttagaagatttaattgcaggatcaagagtagaagtatctgaaaataaaaagaatcctgaagattttgttttatggaaaccttcaaaggataacgaacctttttgggaatccccatggggcaaaggcagacctgggtggcacttagaatgctctgttatgtcaaaaaaatatctaggtgataaatttgatattcatggtggcggtagagatttaatttttcctcatcatgaaaatgaaatagcgcaatctaggtgtgctaatgaaaatgaggtatttgcaaactactggattcataatggatttataactatgtccaacgaaaaaatggcaaagtctcaaggcaatattttaaaaattaataaattaaaaaatgaaattaatggacaagtattaaggttagctttaataagcactcattacaaacaggctttagattggaatgataaattgattaatgaatctcaaaacacaataaacaaatggtacgaaagctatatcaatttaaaaaaaaaagttttagtaccagaggaatatctaaatcctttatatgatgatttaaataccccgggccttatatagc

SEQ ID NO: 299328 - DNA, 960 bp, Unknown
  Bacterial polypeptide expressing nucleotide sequence isolated from the Sargasso Sea
tattgaggcctctaaaaataaaaaaatttcaatagacaagcttacgaatgatattacgaaaaaatttcaggataattgtaaatatttaaactgtttaaaaccaaattttgaaccgagagctaccgaacatattaatggcatgattagtatgaccaaaaatttacttaagaataaacatgcttatgaaaaggataaacatgtttatttttctgtaaattcttttaaaaattacggcaaattatctaataagaaacctgatgaacttgaagcaggttcaagagtagaggtttcaaaatttaaaaataatccgttagattttgttctttggaaaccatcttctacagatgatcccggctgggattctccatggggtcgaggacgtccaggttggcatctcgaatgttctgttatgagcgaaaagtttctgggaaaaaattttgatattcatggtggtggattagatcttgtttttcctcaccatgaaaatgaaatagctcaatcttgttgtgctaataaaacagataagtttgcaaactactggttacataatggttatgtaacatttaacaaagagaaaatgtcaaaatcactcggtaatattgtaactattgaaaaaatgagagtaaaaattaacggtcaggttattcgtttagctttattaagcgctcattacaaacaaccattagactggaatgaaaaacttgttaaagaaagtcaaaatactttagataaatggtatagtttatatggagcagaaaccgaaactaatttggatgatgatttggttaatcctctattggaagatttaaatacaccaaattatatatcaaaattacatttattatttgataaagcatctaaaggtgatagatcctcaaaaaaacaatttttagcaggctgtccacttattggattgttggaggaaagccttgagtcctgggaaactttaaaaaaagaaat

SEQ ID NO: 299329 - DNA, 561 bp, Unknown
  Bacterial polypeptide expressing nucleotide sequence isolated from the Sargasso Sea
tatgaaaatctttaatactctttcaggaaagaaagaaatctttgaacccatcgaggacaataagattcgaatgtatgtatgtggtatgactgtttatgatgacacacacataggtcacgcaaggaccttcctatcttttgatcttattgtcagatacttaagaagtatagattatgaagtccaatacataagaaacattactgatgttgacgacaaaattattgcgagggcagaggagttgaatataagtccatcagatttaactctagattgtataaattcgatgcataatgatttccaagcactaggaatgattagtcctgatgctgaacctcgagctaccgaaaatattaactcgattatttctctcataacaaaacttatagataagggtcatgcatatgtgggtgagtcagatgtctacttttctacagaatcttttgaagaatatggaaagcttagcaaaagaaaattagaagatttgttatctgggagcagaattgatattgatctagataagaaaaatcctgctgattttgttttatggaaaaaggatactaa

SEQ ID NO: 299330 - DNA, 733 bp, Unknown
  Bacterial polypeptide expressing nucleotide sequence isolated from the Sargasso Sea
aagtaaattttcatcagtttcttatgtaagaaatattactgatgtagatgataaaataataaaatcatcgaatgaaaaaaatatttctattaaagatttaaccacaacaataactaaaagttttcacgaagattgtaattatttaaattgtgaaaatccatctcaggaacctaaagcaacagagcatatagatttaatgattgagatgatttcacaattaattaaaaaaagatttgcttatgagaataataagcatgtttattttgaagttaaaaaatttaatgattatggaaaattatctaataaaaaaatagaagatctagtagcaggtgcacgagttgaagtaagcgataataaaaaaaactcagaggattttgttttatggaaaccatctttagaaaatgaaccatcatgggaatctccttggggcaaaggaagacctggttggcatttagagtgttctgcaatgtctaaaaaatttttaggtaatgaattcgatatccatggaggaggaatagatttactttttcctcatcacgaaaatgagatagctcaatcaagatgtgcaaacaatactaaagtttttgctaattattggttgcataatgcttttattacaatgtcgaatgagaaaatggcaaaatcacaaggaaatattttaaaaataaaagattttaaaaataaagttagtggacaagttcttagattagctttaatcagcgctcattataaa

SEQ ID NO: 299331 - DNA, 733 bp, Unknown
  Bacterial polypeptide expressing nucleotide sequence isolated from the Sargasso Sea
catttggaatgttctgttatgagtgaaaaattttttggaaaaaattttgatatacatggaggaggactagatctaatttttccccatcatgaaaatgaaattgctcaatcttgttgtgccaacaaagtagaaaaatttgcaaactattggttacataatggctatgttacttttaataaagaaaagatgtcaaagtccttaggcaatattgtaactattgaaaaaatgagaaaaaaaattaatggacaggttatcagacttgctttgttaagtactcattataaacaacctttagactggaatgaaaatttaattgaggaaagtcagagcactcttaataaatggtacactcagtttgaggatactaaagaggatgctttaaaccaagatttattaggaccactattagaagatataaacactccggcttacatagcaaaacttcatttactttatgacaaagcttcaaagggagatatttcctcaaaaaaactttttcttgccgggtgtaaacttatagggttactagaagaagatttagaaacatggaaacattttaaaaaaacaagatcaaaaattgacgaaaagactattaaaaacaaattaaaagaaagagaacaggctagaaaaaaagaggattataagttagcagacagtataagaaaagaactagaaagtagtggagttattattgaagacaaagacaataaaacagtttggaaatacaaatgag

SEQ ID NO: 299332 - DNA, 763 bp, Unknown
  Bacterial polypeptide expressing nucleotide sequence isolated from the Sargasso Sea
tcagaaacagatgagccctcttgggactcaccttggggaaaaggtagacctggttggcatttagaatgttcggcaatgtctaaaaaatatttaggaaacgaatttgatgttcatggaggaggcgttgatttgttatttccgcatcatgaaaatgaaatagctcaatcaagatgtgcgaatgatagtaaggtgtttgctaattattggttacataatgcatttatcacaatgtccaatgaaaaaatggcaaaatcacagggtaatattttaaaaattaaagattttagaaataataaaagtggtcaagttttaagaatggctttgatgagtgcacattatcgacagccacttgattggaatgataagcttttagaggaatgtgaaaatacaattagtaaatggtataatgtttatttaaacataaaaacaaaattaaaaatttcagatgaaattcttaaacctcttttcgatgatttaaatactccaggctatattgctaatttacataaactatatgaaaaagcagtgaagggttctgatgaagataaaatattatttatttctgcctgcaattttattggattattaaatgaaactaaggatgattggcttaaatttaagaaaaacaaggtatcaatttctgaaaatgaaattttaattaaaattaatcagagaaataaagctagagttaataaaaattataaggaagctgacaaaataagagatgagctattagacaaaggtgttttaatagaagataaag

SEQ ID NO: 299333 - DNA, 670 bp, Unknown
  Bacterial polypeptide expressing nucleotide sequence isolated from the Sargasso Sea
atgaataaagatatatttttatcaaatacacttggtggtaaaaaggaaaaattcgttccaatgaatgaaggtaaaattggaatgtatgtatgtggtcccactgtatatgatgatccacatattggaaatgcaagaccactggttgtatttgatttattattcaaagttctaaaatgtaaatatggaaaaaagtctgtaacttatgttagaaatattactgatgttgacgataaaataattaaagcctcggtagaaaagaaaatttctatatcagatttaacaaataaaatttcaaaaaattttcacgatgattgtgtttatttaaattgtgaagccccaacacatgaaccaagagctactgaaaatataaacctaatgattaaaatgataaaggaattattaaaaaatggttttgcttacgaaaatgaaaaaaatgtttactttaaagtcagaaaatacaaagagtatggaaaactatcaaataaaaatttagaagatttaatagcaggctcaagagtagaagtttcagaaaataaaaaaaatccagaggattttgtattatggaaaccatcaaacaatgatgaagcttcctgggattcaccgtggggaaaaggaagacctggttggcatttagaatgttcggttatggcaaaaaaatatttgggtaaca

SEQ ID NO: 299334 - DNA, 397 bp, Unknown
  Bacterial polypeptide expressing nucleotide sequence isolated from the Sargasso Sea
gtctgataagaaaaatattgaagattttgcactatggaagatttcaaaggaaaacgaaccattgtggaattcaccttggggggatgggagacttgggtggcacattgaatgctctgccatgatagataaaatattcgattcaggcattgacattcactgtggaggtaatgatttaatatttcctcaccatgaaaatgaacttgcacaatcttgtgctgcatttgaaaatcaagtatttgtaaaatactggttacataatggcatgattaatctttttggacagaaaatgtcaaaatctgaaggcaatataaaactcttaaacgaatatatagataagtttggtggaaacgttattagatttttctttttaagatcacactatcgaaagccgcaagag

SEQ ID NO: 299335 - DNA, 283 bp, Unknown
  Bacterial polypeptide expressing nucleotide sequence isolated from the Sargasso Sea
tatgagtttagatatttttttaacgaataatcttactaataaaaaagaaaaatttattcctcaagataaaaacaatgtaagaatgtatgtttgtggtccaactgtttacgacgatccacatattggtaatgctagaccagtagttatatttgatattctttttaaagttttaaaaaatgaatatccgcatgtaacatatgtcagaaatatcactgatgtagatgataaaattataaaatcatcacaggaaaataatatttcaattttagatcttacaaaaaaa

SEQ ID NO: 299336 - DNA, 616 bp, Unknown
  Bacterial polypeptide expressing nucleotide sequence isolated from the Sargasso Sea
aatgaataaagatatttttttaacaaatagtctgggtaataaaaaagaaaaatttattccaattaatccaaaaaatattggaatgtatgtttgtggaccaactgtatatgataatccacacattggaaacgcaagacctctagttgtatttgatattttgtttaaagttttaaaatgtaaatatggaactaattcagttagttatgtaagaaatattactgacattgatgataaaataatatcttcatcagttgaaaaaaatatttcaattaacgatcttacaaaaaatattacaaatatttttcatcaagattgcaaatatttaaattgtgaaaatccaacaaaagaacctagggcaactgaaaatatttcattaatgattgaaatgattaataaacttattaaaaataaatttgcttacgaaattaataaccatgtttattttgaagtaaaaaaatttaaagattatggaaaattatcaaacaaaaatttagatgaattgattgtaggggcaagagttgaggtatcagaaaataaaaaaaatccagctgattttgtgttatggaagccctcaatagaaaatgaaccatcatgggactcaccatggggaaaaagg

SEQ ID NO: 299337 - DNA, 782 bp, Unknown
  Bacterial polypeptide expressing nucleotide sequence isolated from the Sargasso Sea
aatgaaattttttatatttgatagtttgtcaagaacaaagaaagaatttgttccaatagatccaaagaaaatcaggatttatgcttgtggtcctaccgtttatgattacgcgcatgtgggtaatgcaaggatggcagtggttactgatcttttggtaagaactttgaggaaaaaatatgataatgtaatctttgtatcaaatattacagatattgatgacaaaattataaatgcctcaaaagagtctggaattccgatttctaatttaacttcaaaatttcataaaatctataatgatgaaatgttatctctaaatgtaaaattaccagatatccaacctaaagcatctgaacatataaatgaaatgattttgatgatcgaagagataattagtaaaggttgtgcctatcttgctaaagatcatgtaatttttaaggtagaaagttataaacattacggtaagttatctggaagaagttttgaagaacaaatagcaggatcaagagtagaagtagcagattataaaaaaaatccaagagattttgtcttgtggaaaccgagtaaagataatgagccaggttgggattctccttggggtaggggaagacctgggtggcatatagaatgtagtgctatgtctcataaatgtttagatacaccttttgatattcattgcggtggtgttgatctaacatttccacatcacgaaaatgaaattgcacagagttgttctgcacaaaaagttaattgtaaacctgaaaatttttgcaaatattggtttc

SEQ ID NO: 299338 - DNA, 787 bp, Unknown
  Bacterial polypeptide expressing nucleotide sequence isolated from the Sargasso Sea
tcagacgagccatcatgggactcaccctggggaaaaggaagacctggttggcatttagaatgttcagcaatgtctaaaaagtatttaggaaaagaatttgatattcatggaggaggtgttgatttgttatttcctcatcacgagaatgaaatagctcaatcaagatgtgcaaatgacagcaaggtgtttgctaattattggttgcacaatgcctttatcacaatgtccaatgaaaaaatggcaaaatctcaaggtaatattttaaaaattaaagactttagaaataatagaagtggtcaagttttaagattggctttaatgagcgcacattacagacaaccacttgattggaatgataagcttttagatgatagcgaaaatacaattaataaatggtataatgtttacttaaacattgaaaaacaattcaaaatttcagatgaaattttaaaacctctcctggatgatttaaatactccaggctatatatctattttacataaattatatgaaaaagcgtcaaaaggatctgatgaggataaaagaatttttatttctgcatgtcattttgttggattattgaatgaaactaaagaggattggcttaaatttaaaaaaagaaagatcttaatttctgaaagtgaaattttacttaaaattaatgagagaaatgaagctagagttaacaaaaattatgaggaagctgataaaattagaaatgagcttttagataaaggtgttttaatagaagacaaagatggtaaaacggtctggaaatttaaatgag

SEQ ID NO: 299339 - DNA, 362 bp, Unknown
  Bacterial polypeptide expressing nucleotide sequence isolated from the Sargasso Sea
ggagggacttggaagaccgggttggcatttagagtgttcggcaatgtcagaaaaaactttgggtttgccatttgatatacacagtggaggagctgatttaatttttcctcatcacgaaaatgaaattgctcaaacatgtgcagcacataaaagtaatgatgatttaaaatctttttcaaagtactggtttcataatgggtttgtaaatgtagaaggagaaaaaatgtctaaatctattggcaatattaaattggttcatgatttggtaaaaaattataaaggtgaagtgttaagattaactcttttatcagctcactaccgccagcctcttaattggacaagaaatatcattaagcaaaata

SEQ ID NO: 299340 - DNA, 289 bp, Unknown
  Bacterial polypeptide expressing nucleotide sequence isolated from the Sargasso Sea
aatgaataaagatatatttttatcaaataccctcggtggtaaaaaggaaaaatttgttccaatgaatgaaggtaaaattggaatgtatgtatgtggtcccactgtatatgatgacccacatattggaaatgcaagaccactggttgtattcgatttattattcaaagttctaaaatgtaaatacggaaaaaagtctgtaacttatgttagaaatattactgatgttgacgataaaataattaaagcctcggtagaaaagaaaatttctatatcagatttaacgaataaa

SEQ ID NO: 299341 - DNA, 826 bp, Unknown
  Bacterial polypeptide expressing nucleotide sequence isolated from the Sargasso Sea
caaacacgcttacgaaaaagacaaacatgtttatttctcagtaaattcatttaaaaattatggcaaattatcaaaaaagaaatcagaagaactagttgcaggagcaagagttgagatttcaaaatttaaaaaaaatccacttgattttgttctttggaaaccatcagcactagaagacccaggctgggattctccatggggtagaggaagacctggttggcacttagaatgctcagttatgagtgaaaaatttctcgggaaaaactttgatattcatggtgggggattagatcttgtttttcctcatcatgaaaacgaaatagcgcaatcatgttgcgctaacaaaacggataaatttgcaaacttttggttacacaacggctatgttacttttaacaaagaaaaaatgtcaaaatctcttgggaatatagttactattgaaaaaatgagaggaactatcaatggacaggttattaggcttgcattgttaagcgcacattataagcaacctttggactggaatgagaatttaattaatgagagccaaagtattcttgataagtggtacactcagtttgaaaatactaaggaagatgatttaaacgaagatttactaaaacctcttttggaagatataaatacaccagcctatatatcaaaactacatttactatatgataaagcctctaagggagataaaccctcaaaaaaactctttcttgctggatgcaagttaatcggcttattagaagatgatttagaaacttggaaaaaatttaaaaaaataaattctaaaattaatgaaaaagatattaaaaataaaatt

SEQ ID NO: 299342 - DNA, 793 bp, Unknown
  Bacterial polypeptide expressing nucleotide sequence isolated from the Sargasso Sea
ttcatcaaaaaaagaagaatcttggtctcaattgaaaaagacagaatcaatctatacgtttgtggcatgacagtttacgatgattgccatattggtcatgcacgtacattcatcagttttgatttatttgtaagatttttttcttatcttggatacaaagttaattatgtaagaaacataactgatatcgaagataaaattatcgataaagcaaagcttgagaaggtatctttcagtgaaatctcagatagatttattttttccatgcatcacgattttagtaaattgaatctcttgtcaccaaaatttgaaccaagagcttctgaaaacatacccgaaatacttaagatgattgaagaattagaagcaaaagaatttgcatattcaatcgatggcggagatgtgtatttcgatattaattcatatgaggattatggaaagctatcaaagagaaagcaaaaagaacttgaatctggttcaagagtagaaattgacgaaaacaaaatgaatccaaatgactttgttctttggaagagatcagaagaagagccattatttgattctaaatggggtaaaggaaggcccggatggcatattgagtgctccgctatgagtaaaaaattccttggtgaaactttcgatatccatgggggcggtttagatttaaagtttcctcatcatgaaaatgaaatagcgcaatctgaatgttgttcgggaaaaacattagctaatcattggatgcatgttgcaccattgaatgttaatggaaaaaaaatgtcgaaatctttaggca

SEQ ID NO: 299343 - DNA, 774 bp, Unknown
  Bacterial polypeptide expressing nucleotide sequence isolated from the Sargasso Sea
catattggtaatgcaagaccggcgatagtttttgatgtattggcaaaattattgcgaaataaatataaaagtgtgacatatgcaagaaatataactgatgttgatgataaaataataaatgcagccttggaacaaaatgttgaaatatctgaaattaccaagatatctacaaatcaatatcattcagatatgaaaattttgaacgttgaagaacctaataaggagccttatgcaacacaatttatttctgagatgattttatttattgaggatctaatagaaaaagataatgcatatgtttctgaaggacatgtgttatttgatattgattcttataaattatatggggatttatctagcagagatcctaaagatatgattgcaggctcaagagttgaagttcaagattacaaaaaaaatcctttagactttgttttgtggaaaccttctaatgaaaatgagattggttggagcagtccttggggaagagggcgaccaggatggcacctagaatgctcgactatgattctagagatatttggagaaacaattgatattcatggtggaggtgaggatttaaggttccctcatcatgaaaatgagtgtgcgcagtcattttgtagaaatgatggtaagcaattagcaaatttttggttacataatggaatggttcaaatggaagattccaaaatgtctaaatctcttggaaatattcttttaattaaagatttacttaatgagatgcctggcgaagtaataagactatctttaatg

SEQ ID NO: 299344 - DNA, 658 bp, Unknown
  Bacterial polypeptide expressing nucleotide sequence isolated from the Sargasso Sea
gtttttcctcatcatgaaaatgagatagcacaatcttgttgtgctaacaaagcagataaatttgcaaactattggttacacaatggttacgttacttttaataaagaaaaaatgtctaaatctcttggcaatgttgttactattgaaaaaatgagaggaaaaattaatggacaagttgttagacttgctttgttaagtactcattataaacaacctttagattggagtgataatttgataatagaaagtcaaagcacactcaacaaatggtacactctgtttgaaaatactaaaaaagatgatctgaacgaggatttgttaagaccacttttagaggatttgaatactcctgggtacatttcaaaactacattcactttatgataaggcttcaaaaggagatagttcctcaaaaaaagcttttattgcagggtgtaaactcattggtttattagaggaagatttagaaacgtggaaaaaatttaaaaaaacaaaatcaaaaattgatgaaaaaacaattaaaaataaaattaaagatagagaaaacgctagaaaaaatggtaattataaactggcagacagtataagaagagatctagaaagcggtggagtaattattgaggataagggtgataaaacaacatggaaatataaatgag

SEQ ID NO: 299345 - DNA, 628 bp, Unknown
  Bacterial polypeptide expressing nucleotide sequence isolated from the Sargasso Sea
gatgtcaatttcacacaaaagtttaaaaatatacaactcattatcatccaaaaaagaagattttaatacaattaatccatcaaaagttggaatgtatgtatgtggtccaactgtttacaacaaggttcatctcggaaattgtagaacattcatatcattcgacttaattgttaggtttttaaagcacattgggtatgatgttcgttatgttagaaatataacagatgttggacatcttgaggaaagtgaagaagataaaattcaaaaaagagcaaagattgaaaaaattgaaccaatggaagttgtccaaaagtatacaaacaattttagagatgtgttgaataaatttaatttgacacctcctaacattgagccaacggcaacaggacatattttggaacaaattgaaatgattgaaatgatcatagaaaatggattcgcgtacgaaaaaaacggctcagtatattttgacttaatgaagttttctgagaaattcaagtatggaaaacttagtaacagaaatttagatgatataattaatgaatcacgtgaactctttggatctgatgaaaaaaagaatcctcaagactttgcactttggaagaatgccacttcatcacacataatg

SEQ ID NO: 299346 - DNA, 572 bp, Unknown
  Bacterial polypeptide expressing nucleotide sequence isolated from the Sargasso Sea
aatgaagatttcagatacgttaacaaatcaaaaaaaagaattagaattttctgataaagtaagaatctatctttgtggcgtaacagtatatgatcaatcacacataggacatgccaggacgataatagtttttgatacattgagaagattccttgaagcaaatggcactcaagttgaattaattcaaaattttactgatgtcgatgataaaataattaatcgtgcaaaagaacagggcgaatcagcaagtggattatcaactaaatatattcaaacatattttgaagattctgataggttaaacattagaagagcaacaaattacccaaaagcaactgaacatatcgatgatatgataaatctaattcaaaatttagtggataaagaatctgcatatgtgtctaaaaatggagtatatttccgtgtttcaaaattttcagaatatggaaaattatcaaaaaagaaaacagaagatctggaaagtggtgccagaatagaagttgatgaatcaaaagagagtcctttagattttgccctgtggaaattttcagatgaacaaccaaattgggaaa

SEQ ID NO: 299347 - DNA, 880 bp, Unknown
  Bacterial polypeptide expressing nucleotide sequence isolated from the Sargasso Sea
atgaataaagatatttttttgactaataaccttacgaacaaaaaagaaatttttgttccattagataaaagtaatatcagaatgtacgtatgtggacccactgtttatgacgatcctcatataggaaatgcaagaccgttagttatttttgatatcttattcagattatttaaaaatactttttcaaaagtaacatatgtcagaaatattacagacattgatgacaaaataattaaatcttcacaagatcaaaagatttctgcaaaagtattaacagaaaaagtaacatcaagtttcttggaagattgcaaatttttaaattgtgaaaatcctactcatcaacctaaagctactgagcatataaatttaatgattgaaatgattgatcaattaatcaaaaaaggttttgcttatgaaaaaaataaacacgtctattttgaagtaaaaaaatttacagattatggaacattatctaataaaaaattagaagatttaattgcaggatctagagttgaagttagtgataataaaaaaaattctgaagattttgtattgtggaaaccatctaataaagatgagccttcatgggattctccctggggagaaggtagaccaggatggcatttagaatgttctgcaatgtcaaaaaaatttcttggaaatgaattcgatgttcacggtggaggaatagatttaatttttcctcatcatgaaaatgagattgctcaatcaagatgtgctaatgactcaaaaatttttgcaaagtattgggttcataatgcttttattaccatgtctaatgaaaaaatggcaaagtctcagggtaatattttaaaaataaaagattttagaaaaagggtgagcggacaagttattagat

SEQ ID NO: 299348 - DNA, 795 bp, Unknown
  Bacterial polypeptide expressing nucleotide sequence isolated from the Sargasso Sea
tttattttgtttgagtcccactcaagaaccaagagcaaccgatcatgttgacggcatgataaagatgacggaaaaattaattaatacaaaagccgcttatgaaattatgggtcatgtatatttttcagtttcttcgtttaaaaaatatggatgtctttcaaataaaaaattggatgatctaaaagttggtgctagagtagaagtatcaaaattaaaaaaagatcctttagattttgttctttggaaaccatcagataagggtgatccaggttgggagtcgccatggggaagaggcagacctggatggcatttggaatgttcagtcatgagtgaaaaatatcttggtaaaaactttgatatacatggtggaggtctagatttaatttttccacatcatgaaaatgagattgcccaatcatgtgtttataatgggactgacaaatttgcaaactattgggtgcataatggctttgttacaatgaataaagaaaaaatgtcaaaatcactcagaaatataacaacaatagaagatgctacacaaaaatattcaggccaagtcgtacgcttatctctccttagcgctcaatacaaacagccattggactggagtaaggacttactcatagaacaaactaaaaccttagatagatggtattctatgtattcatctgaagttagtgaaaaaatacctgactgttttaatgatttattagatgacatgaatacaccactttatatttctaaattacataaattatttcagcaatctcaaaatggagataataataaaaaaaa

SEQ ID NO: 299349 - DNA, 742 bp, Unknown
  Bacterial polypeptide expressing nucleotide sequence isolated from the Sargasso Sea
aatgttcgtatgtatgtttgtggacctacagtttacgaccgggctcatataggtaatgctcgaccagttttagtatttgacatattgttccgacttcttcgatatctatacaaagaggataatgttacttatgtaagaaatatcacggatattgatgacaaaattaatgctaaagctttagaaagaggcgtaaacattgataaaataacggatgaaacaataagttggtttcacaaagatatggagtttctgggagcgcttagacccaatcatgaaccccgagcgacggattatgtttctcagatgaaggacatgatttctaaacttatatctttgtcttttgcctaccccacggaagacggtcatgtattttttgaggtagagcagttttcagattatgggcgcctttctaacaaaaaattaagcgagcttaaagaaggtgtcaggatagaaaatgaaaacacaaagaaaaatccactagattttgttttatggaaaccgtcaaatgctgaagagccaggttgggaaagcccatggggaagaggacgccccggatggcatatcgaatgttcggcgatggccaaggatatattaggagatcaatttgacattcatggaggaggtatcgatttgattttccctcatcatgagaatgaaattgcccaaagtacatgctcaaataatatgaaaaaattcgccaatttctggcttcataatggctttcttaagatcgagggtgaaa

SEQ ID NO: 299350 - DNA, 901 bp, Unknown
  Bacterial polypeptide expressing nucleotide sequence isolated from the Sargasso Sea
caattacttatgtaagaatattactgatatagatgataaaattattgctagttcagtagaaaaaaaaatttctataaataaacttacgagtaagattacatcaatttttcatgaagattgtaaatatttaaaatgtgaaaatccaacatttgagccaaaggctacagaaaatatttctttaatgcttgaaatgataaagcagcttattaaaaataattttgcttatgaaagtaataatcatgtctactttgaagtaaaaagttttaaagactatggaaaattatctaataaaaatttagatgagcttattgctggatctagagttgaaatatctgaaaataaaaaaaacccagaggattttgttttatggaaaccttcatctgaaaatgaacctgcttgggattcaccctggggaaagggtagaccaggttggcatctagaatgttctgtaatgtcaaagaaattacttggtgaggtatttgatatacatggaggtggtagagacttaatatttccccatcatgaaaatgaaattgcccagtctagatgttcaagtaataaaagttcttttgccaattactgggttcataatggatttataactatttcaaaagaaaaaatgtcaaaatcacttggcaatatattaaaaattgatgattttaaaaataaagttaatggtcaagtactaaggctcgcactgataagttctcattatagacaaccgttagattggaacaataatcttttatctgagtgtgaaaaaactttaaacaaatggtacgaaagttatacaaaaataagtaaaactattttaataccagatgaatatttgttgccactatatgatgatttaaatacacctggatatatagcaaatctccataagttatatgaaaaatct

SEQ ID NO: 299351 - DNA, 754 bp, Unknown
  Bacterial polypeptide expressing nucleotide sequence isolated from the Sargasso Sea
atgagtcttaagctttataacactctcactaataaaaaagagatttttgaacccattgaacagggtaaagtcggaatgtatgtttgcggtgttaccgtatatgacaattgtcaccttggccatgcacgagcatatgtagcattcgacattttggttcgttacttccgataccaaggctataatgttaattacgttagaaatattactgacattgaagataagatcattgagcgagctaatgagaattcagagtcaatatacgatttaacaagcagaacaattgcaagcatgcatgcggactttcaagggcttggattaattgaaccaaatagtgagccaaaagctactgaatatattgatggcatggtgacaatgattgaagatttgatagcaaaaggtcatgcatacgttgcagataataatgatgtatttttctctgtaagaagttatgaggaatatggaaaactatctaacaaagttcttgatgatttagacccgggatcaagaattttagaggatcaggcaaaagctgacccattagattttgttttatggaaaagtgcaaaacctgaggaaccatcatgggactcgccatgggggaaaggaagacctggttggcatattgaatgctctgtgatgtctttagaaaagcttggcaagaattttgatattcatggaggcggaccagatttaatttttccacatcaagaaaatgagattgctcaatcaaaatgctcaaacgattctgagttgc

SEQ ID NO: 299352 - DNA, 826 bp, Unknown
  Bacterial polypeptide expressing nucleotide sequence isolated from the Sargasso Sea
ttatcatggtgacatgaagtatcttaataatctccccccaacaatagaacctaaagcaactgaatatattcaagaaatgataatgttgattgaaaaattaatatcaaaagagtttgcgtatgaaaaagaaaaacacgttttgtttaatgttaaaaaatttaatcaatatggaaaattatctggaagaaatattgaagacatgatcgctggatcaagagttgaagtcgcaccttttaaagaaaacgaacacgattttgttttatggaaaccttcagatcaaaattctccaggctgggacagtccttggggacaaggtaggcctggatggcacatagagtgttcagcaatgataaataaaattttaggacctgttatagatattcacggtggtggtcaagacttgatattcccacatcatgaaaatgaaatcgcacaaagctgttgcgctaataacaatgaaactttcgctaatttttggattcataatggctatttaaaaatggaaggcgaaaaaatgtcaaaatcacttggtaatatagttactgttaaggaactttcgaaggattataaaggcgaagttataagattagcattgcttcttacacactacaggaagcccataaactttagtaaaactttattagaccaagctaaaaagattttagataagatatataaagtcaaagaagaggttaatcatataaaagataaaataaattgtataaatgatgaggttataagagcacttaatgatgatctaaatacatcgcttgcaattacaataatgctaagtattaaagacaaaaaggaattagtagatactgca

SEQ ID NO: 299353 - DNA, 672 bp, Unknown
  Bacterial polypeptide expressing nucleotide sequence isolated from the Sargasso Sea
aatgacaaaagaaatttttttaacaaatagtctaggtggcaaaaaagagaaatttattccaagaaatcctaaatctttaggaatgtatgtttgtggtccaacggtttatgatgatcctcatataggaaatgccagaccattagttgtatttgatattttatttagacttttaaaaaatgtttatggtgaaaaatctgtaaattatgtgagaaacataactgatatagatgataaaattataaagacatcaattgaaaaaaatatttctatagatgaattaactacaaaagttataaaaaattttcataatgattgtgattatttaaattgtcaaaaacccaacaacgaacctaaagcgactgaaaatattgatttaatgattgaaatgataaacaaattaataaaaaatggttacgcatattttgaaaaaaatcatgtttattttgaggtaaaaaaatttaatgattatggagagctctctaataaaaaattagaagaattaatcataggatctagagttgaagtttcagatttaaaaaagaatcctgaagattttgttttgtggaagccttcagatgaaaatgctccttcttgggattctccttggggaaaaggtaggcctggttggcatttggaatgctctgttatgtcaaagagatatttaggtgatga

SEQ ID NO: 299354 - DNA, 553 bp, Unknown
  Bacterial polypeptide expressing nucleotide sequence isolated from the Sargasso Sea
atgaaattaaaaatatataatactctatcaaaagaaaaagagctattcgtacctctaaataaaaattctattaagatgtatgtatgcggtccaactgtatatagctatgcgcatataggtaacgcaagacctgctgtagtatttgatacactctatagagttttaaaaaatatttaccctgaagttaaatatgttagaaatattactgacgttgacgataaaataaacgaagcagcaaagaagttaaatcaacctatatctgccataacaactaaatatacagatatttatcacaaagatatgaaaagtctatgtgttcttacaccaacctatgagcccaaagtcaccgacaatattgatgggataatatctatgattcaaaaaattttagataataagaatgcttatatcaatgagaatcatgttttatttgatgtcacttctttttcgcgatatggagagttatcaaatagaaatacagaagaaatgctagctggtgcaagagttgaggttgcagactataaaaaaaatccaggagactttgtgctttgga

SEQ ID NO: 299355 - DNA, 274 bp, Unknown
  Bacterial polypeptide expressing nucleotide sequence isolated from the Sargasso Sea
atgatcaaattatttaatactttaagcaaaaacattgaagtctttaaaccaatagatgaagtagtaaagatatactgttgtggtgtaactgtttatgatttatgtcatcttgggcatgcaagaagttatatagcttgggatgttcttagaaggtttttaatttacagaaattataaagttaagtttgtccagaattttactgatatcgacgataagattttaaaaagagcaagagaagaaaattgttcaatgcaggaggttctcaaaaaaacat

SEQ ID NO: 299356 - DNA, 567 bp, Unknown
  Bacterial polypeptide expressing nucleotide sequence isolated from the Sargasso Sea
catgtctgatttgaaagtttacaatacacttactagagagaaagagattttttcaccaattaatcctccgcacgttgggatgtatgtttgcggtcctactgtatatagtgatgttcatattggaaattgtagaacgattgtttcatttgatgttatatttcgatacttacaatatttaggctactccgttaggtatgttagaaatattaccgatgttggacatcttgaaaacgatgcagatgaaggtgaagataagattgcaaaaaaagcaaaacttgagaacattgagcccatggaagttgttcaaaagtatacaaatggtttccatgaagttgttgatctattgaatactttaaaacctagtattgaacctactgctacagggcatatgattgagcaaattgaatatgttcaacaaattattaaatctggttatgcttatgaatccaatggttcagtatattttgatgttgaaaagttttctgaaaagcataactatggtgaagtatctggaagaaagattgaagacttgaaaaataacacaagagattttaaaggccaaggtga

SEQ ID NO: 299357 - DNA, 677 bp, Unknown
  Bacterial polypeptide expressing nucleotide sequence isolated from the Sargasso Sea
catgcgcatctacgacacgctcagccgtgcgaaggtggatttcctgcccctggaccctgatcatgtgcgaatctacgtgtgcggccccacggtgtatgattatgcgcacatcgggaacgctagaccggtcgttatttttgacgtgttggtgcggttgatgcgccggttgttccccaaggtcacttatgtgcgaaacatcactgatattgatgacaagattaatgcgagggccctggaatcgggtcgtgatattcgcgaaatcaccgaagagactgccaaggtctatcacgaagacatggcggcagtgggcgctttgccaccggatgttgagcctcgcgccaccgaacacgtcacgcaaatgattgctatgatcgacaacctgatcgccaacggccacgcctacgaagccgagggtcatgtcctgttcagcgtgccctccatggccgattatgggaggctttcaaaattggaccgccgcgaaatcgtcgccggtgcgcgagtcgatgttgcgccctataagaaggacgctcaggactttgtgctgtggaagccatccgatctggaagcccccggatgggacagcccctggggacgcggccggcccggttggcacatcgagtgctccgccatgagctatgagcatttgggtgacaagttcgacattcacggcgggggcg

SEQ ID NO: 299358 - DNA, 914 bp, Unknown
  Bacterial polypeptide expressing nucleotide sequence isolated from the Sargasso Sea
taaattactaaaaaataatttttcaaaagtaacctatgttaggaacataactgatattgatgataaaattataaaatcgtctcaagaacaaaaaatttccacaaaagaacttacagaaaaagtaacttcaagttttttaaaagattgtgaatttttaaattgtgaaaatccaactcatcaacctaaagctactgaacatatagatcttatgattgaaatgattgctgagttgatcaagaaaggttttgcttatgaaaatcaaaaacatgtgtattttgaggtaaaaaaattttctgattatggaaaactatcaaataaaaatttggacgatttgattgctggatcaagaatagaaattagtgaaaataaaaaaaattctgaagattttgttttatggaaaccctcaataaatgatgaaccttactgggactcaccttgggggaaaggtagacctggttggcatttggaatgttcagcaatgtcaaaaaaatttttaggtagcgagtttgatattcatggtggtggtatagatttaatctttccacatcacgaaaatgaaatagcacaatctagatgtgcaaatgaaacaaaagcttttgcaaaatattgggtccataatgcctttatcacaatatctaatgagaaaatggctaagtcacaaggtaacattcttaaaataaaagactttagaaataagattagcggccaaataattagattagctttgatgagtgcgcattacaaacaaccacttgattggaacgataaattgttaagtgattgtgaaaatactttagataaatggtacagagtttattcatctgattttaaatctataaaagttccagatgaaattttaaaaccattatatgaagatttgaacaccccctggttttattgcaaatcttcataat

SEQ ID NO: 299359 - DNA, 871 bp, Unknown
  Bacterial polypeptide expressing nucleotide sequence isolated from the Sargasso Sea
gttgatccgtgaaaagaaaaataaaaccgattttgttttatggaaaagaactaaagaaggtttgaattgggactctccttggggtctagggagacctggttggcatatagaatgttctgctatgagcatggatgccttaggggaaacatttgatatacatggaggaggtttagatctgaaatttcctcatcatgagaatgaaatagcacaatccgaatgtgcaactaataaagagtttgctagatattggatgcacactggacctttgaggattgaagatgaaaaaatgtctaaatccttaggaaattacataacaattaaagatgcattaaggaatttttcttctgaggctctcaggttcttcttgctgtctacgcattacagaaatcctataaactttaaagagtcctcagttagagaagctcaagtaagcctgaataagctttacacctctcttgcgggtcttgatttagataaagaaatatctttatctacaaatgaaagcaagaaagaatttatgaaagttatggatgatgatttcaatatcccgggctcactagctgtactttttaatctttcaaaggaaattaatgtaaaaaaagataatggagatatagaagaggcaatagccttagctaaagagcttatagatatagcagagcctctaggcttactgcaaaaaaaccctgaggactatcttaaaactggagttaatgtttcttcagatgagatagataaaatgattgctgaaaggtctacagctagagaaaagaaagacttcaaagaagcagatagaataagagatgagcttcaatctttaggtgtagttttggaggacagcaaacacaccacaacttggcgaagagcttaa

SEQ ID NO: 299360 - DNA, 892 bp, Unknown
  Bacterial polypeptide expressing nucleotide sequence isolated from the Sargasso Sea
tatgaaaaggatggtaatgtgctttttagagtttcatcattttctaattacggctgtctttcagatagaaagctagatgagcatgattctggctctagagtaaaagttgaagattttaaagaaaatcctaatgattttactttatggaagccttcactaaacgacgatcctggatgggattctccatggggtcgaggtagacctggctggcatctagagtgctctgtcatgtctgaatcaacccttgatataccttttgatattcattcaggtggcaatgatctaaagtttcctcatcatgataatgaaattgcacaaacctgtgcttatcatgacaatgatgatccgacatcatttgctaaatattgggttcataatggtttcctaaatcttgaagatgaaaaaatgtctaaatctttaggtaatgtcgtttatatagatcaattgttacaaaagtataaaggaaatgaagtcagacttgcccttctctcaacgcattacaggcaacctattccttggagtgaggatttacttgatcaatctcataatatttacgttaagttgcaatctgccttcaaagaatatggagctattgatggaaaattccatttgaattctaaggttgctgaaatattaatggatgacttaaatactccattagctattaggacgatgcaagaattagttgtaaatcctgatgaaaacataaaaaacgaaatagcgacctttaaatatatttttgaagggtcaaatcaagatctttctttatcagatgaacaagttaatgaaatcaatgaactagttaaagaaagagatgatgctagaatttcaggtgattatgatcgagctgataaaattcgcgataaattgagtaaaatgaatgtgtccataa

SEQ ID NO: 299361 - DNA, 946 bp, Unknown
  Bacterial polypeptide expressing nucleotide sequence isolated from the Sargasso Sea
agaattgactaatgaaacaataaaaaattttcataaagatgcgcatgcgttgggtaatttgaagcctgattttgaaccaaaagcaactgaccatatatctgaaatgatagaaatgatagaaacattaatttcaaatggttttgcttatgtttcatcaggaaatgttttgtttgctgttgaaaaatataataattacggtgctttatcaggtaggtcacttaatgagatgatatcgggatcaagggttgaagttgctgaatataaaaaaaatcctggtgattttattttatggaaaccatcttccaaaaaacttcctggatgggatagtccatggggtagggggcgtccaggttggcatatagaatgttcagcaatgagtaaaaagtatttaggaacacaatttgatatacatgctggtggattagacttgatttttccacaccatgaaaatgaaatcgctcagtcttgttgtgctaataaatctaatattatggccaattactggttgcataatggttacgttacttctgacggtgagaaaatgtcaaaatcactaggtaattttgctactataaataatttgttgttaaattttaggggcgaggcaattagatatgcgttaatgcaagctcagtacagggctcctttaagttttagtaagaaatctttagatgaagctactaaatcactatctagactttatagggctgttgaaggctttgaagtaaacgaagggcaagacactcagataattgataatctttgtgatgatttaaattcacctaaagctcttgccagattacattatctggctgatgaagctaataaaggaagtaaagaatgtgctcaaaagttaaaaaattcttctaatattttaggaattttgtgcaattcttcagaagaatggtttaaatttggagaaataaattcaaacgaagcaatgaaa

SEQ ID NO: 299362 - DNA, 829 bp, Unknown
  Bacterial polypeptide expressing nucleotide sequence isolated from the Sargasso Sea
aggaatgtatgtttgtggaccaactgtttatgatgatcctcatattggtaatgctagaccactaataatatttgatatcttatttaagcttctcaaaaaaaaatttgcgtcagtcacttatgtaagaaatataactgatatagatgataaaataattaaatcatcacaagaacaaaaaatttcaactaaagaattaacagaaaatgttactaaaagttttttggatgattgtaaatttttaaattgtgaaaatccaacacatcaaccaaaagctacagagcatattagtctaatgattgagatgataaatgatttaatgaaaaaaggttatgcttatgaaaataaaaatcatgtttactttgaagtaaaaaaattttctgattatggaaaattatctaataaaaatttggaggaattaattgctggttcaagagtagaagtaagtgaaaataaaaaaaattcagaggactttgtattgtggaaaccatcgaatgacaatgaaccctcatgggactctccctggggaaaaggtagaccaggttggcatttggaatgttccgcaatgtctaaaaaatttttaggtgatgagtttgatatacatggcggaggaattgatttaatttttccccatcatgaaaatgaaatagcgcaatcaagatgtgctaatgatacaaaagtttttgcaaattattgggtccataacgcttttataactatgtccaatgaaaagatggcaaaatcccaagggaatattttaaaaataaaagattttaaaaaaaaaataagtggccaggttgttaggctagcgcttatgagcgctcactataga

SEQ ID NO: 299363 - DNA, 894 bp, Unknown
  Bacterial polypeptide expressing nucleotide sequence isolated from the Sargasso Sea
aatcttacaaaattttatgagcttgagttcaaaaaagatatcgattggctaagaattattaatgcggacttatatccaagagcaacagagtctatatccaagataatatcgataatctcaaaattattagaaaaaaaatatgcttatgttgaaaaagatggttccgtttactttaaaattaactcgtacgaaaaatatggtcagcttagtaaaataaaattaattaaatcagaaaataagaaaaataatttaaatgatgaatattctaaggaatccatgagggactttgccctttggaaaattcacaagccaagcgatgggccagtattctgggattctccatggggaaaaggaaggcctggttggcatattgaatgttcagctatgagtattgagcatttaggagtgtcatttgacattcattgcggaggtgtcgataatatttttccgcatcatgaaaatgaaattgctcaatcagaatgtttttcagaaaaaaaatttgttaattattggatgcattccgaacatctaatgattgaagatagtaaaatgagtaagtcagagggaaacacttacacattaaatacattagaaaaacatggatttagtccaagttcattgagatatttattaacagcagggcactacagaacaaaaatcactttctcattagattccaaaactaaagcagataaagtaataaaaagaattagaagttttgctgacagattaaaagagttaggagcagataaactaaaattaaataatttaaaaagtccaaatgaactagagttattcaagcaacatatgaatgatgatttaaacacaccaaatgcctatgatactttttttaattatatgagattgataaataaaaaaatagatcaaaaaagg

SEQ ID NO: 299364 - DNA, 773 bp, Unknown
  Bacterial polypeptide expressing nucleotide sequence isolated from the Sargasso Sea
tcatgaagattgtgaatatttagtatgtgaaaagccttcacaagaacccaaagctactgaaaatatttctcagatgattgaaatgattaataaattgatgaaaaatggatttgcttatttaaacgagcatcacgtttattttgaagtaaaaaaatttaaagattatggaaaattatctaataagaagttagaagatttgattgctggatcaagagttgaagtatctgaaaataaaaaaaatcctgaagattttgttttatggaaaccttcaaaagataacgaaccttattgggaatctccatggggtaaaggtaggcctggatggcatttagaatgttctgttatgtcaaaaaaatatctaggtgataaatttgatattcatggtggtggtagagatttaatttttcctcatcatgaaaatgaaatagcgcaatctaggtgtgctaatgagaatgaagtatttgcaaactactgggttcataatgggtttataactatgtcaaacgaaaaaatggcaaagtctcaaggcaatatattaaaaattaataaattaaaaaatgaaattaatggtcaagtattaagactagccttaataagcactcattataaacaagctttagattggaatgataaattaattagcgaatctcaaaatacaatcaacaaatggtacgaaagctacatcaatttaaaaaaaaaagttttagtacccgaggaatatctaaatcctttatatgatgatttgaataccccgggctatatagctaattagc

SEQ ID NO: 299365 - DNA, 585 bp, Unknown
  Bacterial polypeptide expressing nucleotide sequence isolated from the Sargasso Sea
aaaaaactagatgatttaattgctggcgccagagttgagatttcaaaaaataaaaaaaatcctgctgattttgtattatggaaaccgtctgaagaaaatgaaccttcttgggaatctccatggggcaaaggaagaccaggatggcatttagaatgctctgtaatgtctaaaaaattcttaggtgataaatttgatattcatggaggtggtagagatttaatatttccacatcatgaaaacgaaattgcgcaatcacgatgtgcaaatgaaaatgaagtttttgcaaattactgggttcacaatggatttataacgatctcgagtgaaaaaatgtcaaagtcacaaggcaacattctaaagatcgatagtttaagaaataaggtaaatggacaagtgttaagattagctttagttagcactcattataaacaacctttagattggaacgacaaactcttatcagaatgtgaaaaaacaattaataaatggtatgaaagttacacagatatcgaaaaacaatctctaattccagatgaatatcttgctcctttgtatgatgatttaaacacccctggatatattgca

SEQ ID NO: 299366 - DNA, 316 bp, Unknown
  Bacterial polypeptide expressing nucleotide sequence isolated from the Sargasso Sea
aatggacttaatgctttacgatacatttaccaattcaaaaaagaagtttgaaccaattgatccaaataatgtgcgaatgtatgtttgtggtccaactgtttacgattatgcacatgtaggcaatgctcgcccagtgattgtgtttgatattttatttcgattactccaaaaaatttatggtagtgaaaatgtaacttatgtaagaaatatcactgacgttgatgataaaattatatacgcagcaaataatcaaaatgaagatattggaatacttacagaaaagacaattaattattttcatgacgatgcgaaatat

SEQ ID NO: 299367 - DNA, 757 bp, Unknown
  Bacterial polypeptide expressing nucleotide sequence isolated from the Sargasso Sea
ccttggggcaaaggtagaccaggttggcatttagagtgctcagctatgtcaaaaaaattcttaggtaatgaatttgatattcatggtggaggtatagatctaatttttcctcatcatgaaaatgaaatagcccaatctagatgtgccaatgatacaaaagtttttgcaaattattgggtacacaacgcatttattactatgtctaatgaaaaaatggccaagtcacaaggtaacattcttaagataaaagattttagaaataagattagtggccaaataatcagattagcactaatgagcgcacactataaacaaccattagattggaacaaaaaactattaagtgattgtgaaagtactttagataagtggtataaagtatattcatctaatcttaaatctgtcaaagtttcagacgaaattttaaaaccactttatgaagacttgaatacccctggatatatcgcgaaccttcacaagttatatgaaaaggctaataaaggtgaaaacatagacctatttgtttcagcatgtaaatttattggcttaatgaatgaaactagccagcaatggagtgaatttaaaaagaaaagagtttctattactgagtcagaaattgaaaatatgcttagtttaagagataaagctagagaaaataagaattataaagaagcagataaaattagagatgagctctcagacaaaggtgttttaatagaggacaaagatggtaaaacactctggaaatttaaatgag

SEQ ID NO: 299368 - DNA, 751 bp, Unknown
  Bacterial polypeptide expressing nucleotide sequence isolated from the Sargasso Sea
catgaatttgctccggctgcataataccctgacccgcaagaaagaagatttcatcccaattgatccagatcatgtgcgggtatatgcatgtggaccaactgtttatggccgcatccatgttggcaatgcgcgtcccgttgtggtgtttgatgtgttggtgcggctattgcgcctgcgctatgccaaggtcacttatgttcgcaatatcaccgatgttgatgacaaaattaacatacgggctgcagaacgcggtatttcgattgatgatctatgtgcagaaaccatcgagacatttcatcaagatacggcgcggttggggtcggttgatccggacattgaaccacgcgcaacgcaccatattgatgaaatgcaggaaatgatcatgatacttatcgataagggacatgcctatgaagcctctggccatgtgctgtttcaggtttcgaccatggatacatacggggcgttatcaaaacggtcgatggatgatatgattgccggcgcccgtgttgaagttgcgccctataagcgtgaggcagctgactttattttatggaaaccgagcaatgatgatcagccgggatggaatagcccctgggggcggggacgtccgggctggcatatcgaatgttcggcaatggcaaaaacttatcttggcgaggtttttgatattcatgctggtggccttgatctgattttcccgcatcatgaaaacgagattgcgcaaagctgttgtgctcacggtagcgcg

SEQ ID NO: 299369 - DNA, 961 bp, Unknown
  Bacterial polypeptide expressing nucleotide sequence isolated from the Sargasso Sea
gccgaccgttacaacttcgcacatatcggcaatgcacgcccggcagtcgtgttcgatgttctctatcgcatcttgaaaaggcggtttaagaaggtcgtctatgcccgaaacttcacggatgttgatgacaaaattaacaccgccgcgaaggaatcgggccttccgattgcgacgatcacggaacgttatattgaagcctatcaatccgacatggccgcactcggcgttctgacaccagaccttgagccgcgcgtgacggaacacgtaccggatatcatcaaaatggtggaacagttaatcgcgcggggccatgcctatgccaccgaaaggcatgttctcttcgatgttcgctcatttcccgcctatggcgcgctatccggccgggaccgcgacgaaatgatcgcgggagctagggtcgaggttgcaccctacaagcgagacccagcggacttcgtcctctggaagccctcgacaccagacctaccgggctgggagagcccttggggtcgcggccgtcccggttggcacatcgagtgctcggcaatgatcgagcagcatttgggcgtatccattgatattcatggcggcggccaggatttgatcttcccgcaccacgagaacgagatcgcccaaggcacctgcgcccatgacggagagctctattgccgttattgggtgcacaatggctttgtcactgttgaaggacggaagatgtcgaaatcgctcggcaacgtgcttctagtccgtgatctccttaatgatgcaccaggagaagcgatccgttttgcacttttgagcgcgcattatcgccaaccgctcgactggagccgcaaaggactgatgcaagcgaagcgggggctggatcgcctttacggcgtgctcgatgatctgagtgatacgcacgacacgccgtatgcgcctggtctactggatgcctttaagatcgccctttcggacgatt

SEQ ID NO: 299370 - DNA, 753 bp, Unknown
  Bacterial polypeptide expressing nucleotide sequence isolated from the Sargasso Sea
gatgattaataaattaaatatttcaaatacactttcaggaaaaaagcaaacatttgttccaatagataaaaacaaagttggaatgtatgtttgtggtccaactgtttatgaatttcctcatataggtaatgcaagacctttagttgtatttgatgttttatatagaattttaattaaaatttatggaaaaaacaaagttagttatgtaagaaatataactgatatagatgataaaataatcgactcttcaaaaaagaaaaaaatatctatagaaaaacttacatcaaaagtaactgaagtttttcatgatgattgtaaatatttaaattgtcttaaaccaaattttgaaccaaaagcgacagaacacataaaggcaatgatttcaatgactgagaatttattaaaaaataaacatgcttacgaaaacgatcatcacgtttatttttctgtgacttcatttaaaaattacggaaagttatctaaaaaaaaccctgaagaattagttgctggagcaagggtagaagtttcaaaattaaaaaaaaacccacttgattttgttttgtggaaaccatcatcaccagaagatccaggatgggactctccatggggaagaggaagacccggttggcatcttgaatgttcagttatgagtgaaaaatttcttggaaaaaattttgatattcatggaggtggattagatcttgtttttcctcatcatgaaaatgaaattgcgcagtcatgttgtggcataaa

SEQ ID NO: 299371 - DNA, 883 bp, Unknown
  Bacterial polypeptide expressing nucleotide sequence isolated from the Sargasso Sea
aattttcggacttttctttttgaagatctattgaaacgatttctgatattaaaaggctatgaagtctatcacgttatgaatataacggatgtcgatgataaaactataaaacgtgccaatacggaaggaattacgattaatgaattaactttaagatacacagaagaatttatgaacgatattaaatcactcaaaattctacctgctgacaaatatcctcgagcaactgatcatattgctgaaatgatacaaatgattcaaactcttgaagaaagtgggtatgcttatgagacgaaagatcattcggtatattttcgtttagattcatataaatcctatggtcagcttacaaaaattaatttaactaaacagcgtaccaccaagagaattattaatgatgaatattctaaagataatccccaagattttgccttatggaaagcctgggacgatgaagatggaaaagttttttgggaatcgccttgggggcgcggtcgtcccgggtggcacattgaatgttcagcgatgtcaattaaatacttaggaaatcattttgatattcattgtggtggagtggacaacatttttccccaccatgagaatgaattagcccaatcagtttcttcgtcaaaaggactatttgtgaactactggatgcattcagagtatttacatattcaaggtgataaaatgagtaaaacactagggaattattataaaatatcggatttaatatccgatggttttacggcggaagaaatacggtttactttactaagtgcacactatcgatcaaagttgaatttttcgttgaaccaaaaccaagaagctagaacagccattaagagaattacagatattcaacagcgattattgaattaaa

SEQ ID NO: 299372 - DNA, 838 bp, Unknown
  Bacterial polypeptide expressing nucleotide sequence isolated from the Sargasso Sea
tatgaaaaacttaaatttatataatactctagaaagaaaattatctatttttagcccaattgataataaaaatgtcagaatgtatgcatgtggtccaactgtttatgattttatacatattggcaatgctcgacctttagtagtttttgacgttttggttaggttacttaggataatttttccaaaagtaacttatgttagaaacatcacagatattgatgataaaataaataaaagagcatttgaaaaaggtattgatatttcagaattaacaaaagaaacaattaaaaattttcataaagattgtaaatcattagggaatttaaatccagattttgaaccaaaagctactgatcatgtaaatgaaatgatagaaatgataaaaactttaatttcagaaggttttgcatatgtttcttctggaaatgtacttttttctgttgaaacatataaaaaatatggctgtttgtctggaagatctcttgaagatatgattgctggttcacgagttgatgttgcagagtataagcagaaacctggagattttactctatggaaaccgtctaataaaggtctgccaggttggaatagcccatggggcatcggtcgcccaggttggcatattgaatgttctgcaatgagtaaaaaatatttgggtgaggtatttgatatacatgctggtggtcttgatttaatttttcctcatcatgaaaatgaaattgctcaatcatgttgtgctaataactcagatgttatggcaaattattggttgcataatggttatgtaacttctgatggtaaaaaaatgtcaaaatcccttggaaatttcactacaatt

SEQ ID NO: 299373 - DNA, 758 bp, Unknown
  Bacterial polypeptide expressing nucleotide sequence isolated from the Sargasso Sea
ccatggggaaaaggaaggccaggatggcatctagagtgttcagcaatgtcaaagaaatttttaggagatgagtttgatgttcatggtggtggtatagatttattatttcctcatcatgaaaatgaaatagctcaatcaagatgcgcaaatgatacaaaaatatttgcaaaattttggatgcataatgcgttcatcactatgtctaatgaaaagatggctaagtctcagggaaatattttaaaaataaaagattttagaaataagataagcggtcaagttttgagattagctttactaagtgctcattataaacaaccattagattggaatgataaacttctggatgactgtcaaaacacgataaataaatggtacaattcatatttagatattgaaaataattctaaagtttctgatgaaattcttcagccgctttacgatgacttaaacactcctggatatattgctaatttacataaactatatgacaaagcccaaaaaggtaatgatgaagataaatctttatttgtttctgcttgtcaatttgtaggaatattaaatgaaagtaaagaaaattggcttaaatttaaaattaacaaagctttaatttctgaaaaagaaattttacaaaaaattcaggaaagaaataaggctcgagagaacaaaaattacgaagatgctgataaaattaggaatgagcttttagacaaaggtgttttaatagaagataaagatggtaaaacaacttggaaatttaa

SEQ ID NO: 299374 - DNA, 880 bp, Unknown
  Bacterial polypeptide expressing nucleotide sequence isolated from the Sargasso Sea
ttaacaaacaaaaaagagcaattcgttccaaaaaataacgaaaatattggaatgtatgtttgtggacccacagtttatgatgatcctcatatcgggaatgctagaccattggtcatttttgatattctttttaaattactaaagaataaatttccgaaagtaacctatgtaagaaatattactgatattgatgataagataataaaatcttcagaagaacaaaatatctccactaaagagttaaccgaaaaagttacttcaagcttttttgatgattgtaagtttttgaattgtgaaaatcctacacatcaaccgaaagctactgaacatatcgacttaatgatcgatatgataaatcaattaataaaaaaaggttttgcttatgaaaataataaacatgtttattttgaggtaaaaaaattttcagactatggaaaattatctaataaaaaattagaggatttaattgctgggtcaagaatagaggtgagtgataacaaaaaaaattctgaggattttgtgctttggaaaccttctattaaagatgaaccatcgtggaactctccatggggaaaaggaagaccaggatggcatttagaatgctctgcgatgtcaaaaaaatttttaggaaatgaatttgatattcatgggggtggaatagatctaatatttcctcatcacgaaaatgaaattgctcaatctagatgtgctaatgactcaaaaatttttgcaaaatattgggttcataatgcattcataacaatgtctaatgaaaaaatggctaagtcacaaggaaacattttaagaataaaagattttagaaataagatgagtggacaagttttgaggttagctcttatgagtgcacattataggcagc

SEQ ID NO: 299375 - DNA, 865 bp, Unknown
  Bacterial polypeptide expressing nucleotide sequence isolated from the Sargasso Sea
agagcaacaaatcatatatgtaatatctgctccttcataacaatcctcgaggacaaaggttatgcatactctagagatggagatgtttattattctgtttttaaaaataaaaattatggaaggctaagtaatcaaaatatacaagaacaaaatatcaatcagcaaggaagaatggctaatgaggaaaataataaaaaactaaatccgcaagattttgcactatggaaaaaagccaaagatgatgaaccattttttgattcgccatggggtaaaggtagaccaggatggcatattgaatgttcggcgatggttaaagatgaattaggagatactattgatatccatttaggtggttctgatttgatttttcctcatcatgagaatgaaatcgcccaatcagaagcagccaatggcaaaaagctagcaaactattggttacacaatgggatggtcaatgtaaatggacaaaagatgagtaaatcccttaaaaattttaaaactatcagagaactaattaagtcaggtataagccctatgactttgcgatattttgttatgactgtgaattatagaaaaccactcgattttactgaagaagctttaaggagtgcttcagaagcttggaaaaacattaatgtagccctctcttttaaggaccttacaaaaggtgcttttagatctattgaaaaaaatgaatctctcgaagaagaatataaaaagaaaataagttttgaattatctcaaaaaaagcttaaattttctgaggctcttggaaatgaccttaatacagcgagtgctattgcaattatttacgatttagcaaaaccgttaaaaaactttttaaaccaatttcaaagggttgaaa

SEQ ID NO: 299376 - DNA, 837 bp, Unknown
  Bacterial polypeptide expressing nucleotide sequence isolated from the Sargasso Sea
ggatgactatggcaagctggcgaagcggtcgatgaaggaaatgatggccggggcgcgggttgaagtggccccctacaagaaagacccgatggattttgtcctgtggaagccatcggacgatgcaacgccgggctgggaaagtccctggggcaaaggccgtccgggctggcacatcgaatgttcagccatgtcgtccaagcatctgggcgatacgttcgacattcatggcggtggcattgatctggtgttcccgcaccacgaaaacgaagtggcccagtcgacctgcgcccacggtaagggaacctttgcccgttactggatgcataacgggttcctgcaagtgaacgggcagaaaatgtccaagtcgctggggaacttcaagacgatccgtgaaattcttgacgtcatgccgggcgaggtcgcccggttgcagatgttgacgacccattaccgtcagccgatcgactggaccgatgcggcgacggcagaggcgaaaaagatactggatcgctggtaccgtttgacggaaaccgtcggtgaggtcagcgccgcggatgtgtccgatgcacttgtcgaggcattggcggatgacctgaatacaccgaaggcgatggcggtcatgcatgaactggctgccggggcgaaaaccggcgataatgacgcggcgcgggcattgaaagcctgtggacgaattatgggggtgctgcttcagaaggcagacacctatttcgcgtggatgccagcgggttctgaggacagcaccggaaaagatatccaccccgcagagattgaaactctgatcgaggatcgggctgctgccaaggctaacaaggattt

SEQ ID NO: 299377 - DNA, 828 bp, Unknown
  Bacterial polypeptide expressing nucleotide sequence isolated from the Sargasso Sea
gagcatataaatgaaatgatcgaactaataaaactattaattcaaaataaatttgcatatgaaaaagaagggcatgttttatttcatgttcctttatttgagaaatatggatctttatctggtcggaataaagaagaacagattatgggaagtagaattgaagttgctccatataaaaaagatccgactgattttgttttatggaaacctagtccttctccaaaacctgggtgggaatctccatggggatttggtaggcctggatggcatttagaatgctctgcaatgtctgaaaaaactttaggactaccatttgatatacattcaggtggtgctgacttaatttttcctcatcatgaaaatgaaattgcccaaacttgtgctgctcataacaaaatggatgatttaaaatcttttgcaaaatattggtttcacaatggtttcgtaaatgttgaaggagaaaaaatgtcaaaatcactaggcaatattcgtttggttaatgatttagttaaagaatttaacggagaggtattaaggctaacacttatatctgctcattacaggcagcctttaaactggacaagagaaattattacacaaaatagaataatgttagatcgtttttatcgcaatttgaaacaacttgaaaatattgatgcttacgatcatgattatcaaatagaagaaaaagttattgctggtttgtttgatgatttaaatacccctaaagtaattgctgaattaaatattttaagtaatcagatcagtaatgctaataaaaaaatgaaaggtaagaaaaaatataatttattggaagtggggaaaata

SEQ ID NO: 299378 - DNA, 277 bp, Unknown
  Bacterial polypeptide expressing nucleotide sequence isolated from the Sargasso Sea
atggatcctcataatttatatatatacaattcacttacaagctctaaagagaaatttaaacctttaagaaaaaattcagtcggaatgtatgtctgtggtcctacagtctacagcaatgttcacctaggcaattgtagaacatttatttccttcgatattatattcagatatctgagatatcttggatacaacgttaggtacgttaggaatattactgacgttggacatcttgaagacactggagaagacaaaatctccaaaaaggctaaggtgaaaa

SEQ ID NO: 299379 - DNA, 463 bp, Unknown
  Bacterial polypeptide expressing nucleotide sequence isolated from the Sargasso Sea
aatgtcactgaatttatacgacacattctcaaactcaaaaaaaaagtttgaaccaattgatccaaaaaatatcagaatgtatgtttgtggtcctacagtatacgactatccacacgtaggaaacgcaagacctgttatagtttttgatattttatttcgaatccttcaaaacttatatggtactgagcatgtaacatacgtgagaaatataactgacgttgatgataagattataaatgcctctcaagaaaataatgaagatatcaatgaattaacttcaagaaccattaattattttcactctgatgcgaaatatataggagcaatggaaccctcttttgagcccagagcaacagatcacatagctgaaatgatcaatatcattgagactttaattgaaaaaaattatgcttatgttgctgagcataacgttctgttttcatctaataaatttctaaatacg

SEQ ID NO: 299380 - DNA, 703 bp, Unknown
  Bacterial polypeptide expressing nucleotide sequence isolated from the Sargasso Sea
gatggatttagtttttcctcatcatgaaaatgaaattgctcagacttgttctttaaatacaaatcatgatccgaaaagctttgctcaattttggtttcataatggttttgtaaatgttgaaggagagaaaatgtcaaaatcaattggtaacatacgattggttcatgacttaaagagtcaatacagtggtgaagtattaagactaaccctattatcagcccattacagacaaccattaaattggactaaagaaataattaatcagaatagcaaaatgttggatcgtttttatcgctctctaaaagaacttcaagatgtagaaattacatcagaaaagttatcagatgaagtcatgaaaagtttcttggatgatttaaatacaccaaaagtgttagctgagcttaatactttatcaaataaattatctttagctaataaagaggaaaagattaatattaaaaataacctcatcgctgctggtaaaattctaggaattttaggggaagatcctgatgtatggcttggatataatcaatcggcaaacccagagaaagaagagatagaagggttgataaatcaacgtaatgaagctagacgcgataaagattttaaattagcggatgaaattagagataaactaaaaataaaaggtattgagatagaagatactaaaaacggaactatttggcgaaaagattcatga

SEQ ID NO: 299381 - DNA, 921 bp, Unknown
  Bacterial polypeptide expressing nucleotide sequence isolated from the Sargasso Sea
tattatatttcaaatttcaaagatgatttaaaatctctatcattttttccatctgacaggcttccgcgagcaactgatcatgtagggcagatgattgaaatgattaaagcacttattgataaaggctatgcgtacgtaactgatgatggttcagtatttttttcaattgacgcatatgaagattatggtgcactaagtaatattgatatgaatcaagctgttagaggcgatagagtggctactgatgaatacaatttagataatcctagcgattttgcactttggaaatcatataaaaaagaagatggtaatgttaaatggagctcgccttggggtcttggtcgaccagggtggcacatagaatgctctgcaatgtcaattgaataccttggccctcattttgatattcattgcggcggagtagataataagttcccacaccatgaaaatgaaattgctcaatctatatgtgctacaaataaaccttttgttaatttttggatgcattcggagtttttaactgttgatggaggaaaaatgagtaaatcattaggaaactattattgtctaaatgatttgataaaagagggtttaacagctgaagaatttagatatatagtactcagtcctcattatagatctaaagtaaatttttctttagataaaaagcatgaagcaaaaaaagccatccaaagaattatgggattaaaagaaagacttgaaaaatttgacgaatcagaatcagttgaattgcctcgaggcgcagataattttatatctgcattagaaaacgatttagactctccagctgcgcttgccatattttttgactgggttcgggaaactaattcaaaattggataataatgagctattaaaatccgaatattcaaaaaaggtaaaaattttattaattatttta

SEQ ID NO: 299382 - DNA, 893 bp, Unknown
  Bacterial polypeptide expressing nucleotide sequence isolated from the Sargasso Sea
gattagtcctgatgccgaacctcgggctacagagaatattgactcgattgtttctctaataacaacacttatagacaagggtcatgcatatgtgactgaatcagatgtttacttttctactgaatcttttgaagaatatggaaagcttagcaaaagaaaattagaagatatgttatctggagccagaattgatattgatctagataagaaaaatcctactgattttgtcttatggaagaaggatactgaaggattgaaatgggactcaccttggggaccaggaagaccaggttggcatatagagtgctcagcaatgagcatggatgccctgggggaaacttttgatattcatggcggtggatcagatctcaagtttcctcatcatgaaaatgaaatagctcaatcagaatgtgtcactggcaaagagtttgccaaagtatggatgcacactggatctttaaggattgatgagcagaaaatgtctaaatctcttaagaacttcataactataaaggaggctctgaatgatagctcttcagaagtacttcgtttttttttaatttctagtcattaccgcagtccattaaattattctgatgaaggtttgaaggaagcgaaaaattctctggatcgcctttataactctttacaagacctttcttacgaaacggatgagcatattccttctgaatattcagagaagtttcatgatgcaatgcaggacgactttaattctccgtcagccatatctgttttgtttgagatggtaaagcaaataaacattcttaagaaaaaagatcagttaactcatgctgatgctttggcctcagaactcatttcgttatcaaatattctaggaatcctctcagaaaatcctgaagaatacttcacaa

SEQ ID NO: 299383 - DNA, 697 bp, Unknown
  Bacterial polypeptide expressing nucleotide sequence isolated from the Sargasso Sea
tggcggtagggacttaatttttcctcatcacgaaaacgaaatagctcatagttgctgttcttctgcaaacattgaagatcctacatcttatgctaaatattggatgcataatggttttgtaacgattgatggtgaaaaaatgtctaaatcgctaggcaatataatacttgtaaatgagttaacagaatcctatcatggtgaagtaattagattggctctattatcatcacattataggcagggcttagattggaacgaaaaaataattcatcaagcaagcattcttctagataaattatatgaaattaaaattttgttaaatggtgaaaatatagaacattcatctgaaacaaatttagagccaatcgcttacttagctgatgatctaaatacacctggactaattgctgaactgcataaactagttaaagattttaatacctcaaattccaacaaatcagagattaaaattcatctaaatttaatttcacaagctttaggaattttacaagatgattcttacaaaaaaatatctgaggaattagaatcaaaaatacatgcattaatattaaaaagaaaagtagcaaaagataataaggattatgaattagcagataaaattcgaaatgaactattggatttaggtgttgaaatcaaagacactagtagcggtactgattggaatttgaaatcatga

SEQ ID NO: 299384 - DNA, 459 bp, Unknown
  Bacterial polypeptide expressing nucleotide sequence isolated from the Sargasso Sea
gatgaataaaaatttaaatttttttaatactctatcaaacaaaaaagaaaaatttgttccaataaataataataaaattggcatgtatgtttgtggtccaacagtttatgattttccacatattgggaacgcaagaccattagtagttttcgatgttttgtttagacttttgcaaagtttttatggaaaaaataaagttacttacgtaagaaatattactgatattgatgataaaattatagaatcttcaaaaaaaaataaaaaaagtattagtgaacttacagaaactataactaaaagttttcatcaagagtgtaggtatttaaattgtcttaatccaacatttgagccaaaggctacagatcatattaaagagatgataaacatggtttcaaatttacttaaaaataaacatgcatatgaaaataataagcatgtttatttttcagtttcgtcatt

SEQ ID NO: 299385 - DNA, 811 bp, Unknown
  Bacterial polypeptide expressing nucleotide sequence isolated from the Sargasso Sea
aaaaaaaaagaattgtttaaaccaataaattctaaaaatataactatgtatgcatgtggcccgactgtatatgacaatcctcatgttggaaatgcaagatctttagttgtttttgatcttttatttaggaccctcaaaaaaatttatggtgataacaatgttacatatgtaaggaatataacagacatagatgataaaattatagatactgccaaagtaaaaaatttaccaattaataaaataactgaagaagttacaaatcaatttcacgatgcgtgtaaaaatctaaattgtttaaaaccgacagttgaacccaaagctactgaacatgttgatggcatgataaaaatgactacctctctgatagaaaaaggttttgcttatataaatgaagggcatgtttatttttcaatatcatcttttaaaagttatggaaaactttctaacaaaaatttagaagacctaaaatcaggatcaagagtagaagtatcaactaataaaaaaaatcctttagactttgtgctttggaaaccatcagatgagaaagatcctggatgggactcaccgtggggaagagggcgacctggatggcatcttgaatgttcagttatgagtgaaaaatatttagggaaagaatttgatatacatggtggaggtttagatttagtttttcctcatcatgagaatgaaatagcccaaacatgttcaaataattctaatgataagatggctaattactgggttcataatggctttttaactatgaacaaagaaaaaatgtcaaagtctttaggaaatatagttagcatta

SEQ ID NO: 299386 - DNA, 622 bp, Unknown
  Bacterial polypeptide expressing nucleotide sequence isolated from the Sargasso Sea
tatggaaataaagttctacgatacaaaatctcgcagaaaaagaaaatttcagccgaggcttcggaataatgttaagttctatgtgtgtggacctacggtttacgacagggctcacattgggaatgctaggcctgcggttgtttttgatattctctttaggttcttaaagcatgagtttgggcacaaaaacgttacttatgtaagaaactttactgatatcgatgacaagataaatgaagcagctaaagcttcaaaaaaatcaatccgagaaatcacaaatgaaaccattcaatggtataaagatgacatggcggcattaaatgttttggagccgacctttagtcctcgagctaccgaatacgttccggctatgattaaacaaattaaatcgctggtcgataacaaaaacgcttatcttgatgcacatggccatgtaatgttcgatgtcgcgtcttttgcgaactatggcaagctttcaaggcggaatttggatgagatgaaggctggttcgaggggtgctataaacgatagccaacggaatccaatggactttggtttatggaaaccgtcagatgataaatttacaggatgggaaaagtccttgggggtagaggacgcccgg

SEQ ID NO: 299387 - DNA, 740 bp, Unknown
  Bacterial polypeptide expressing nucleotide sequence isolated from the Sargasso Sea
gatgctttacgacacatttaccaattcaaaaaagaagtttgaaccaattgatccaaataatgtgcgaatgtacgtttgtgggccaactgtttacgattatgcgcatgtaggcaatgctcgaccagttatagtgtttgatattttatttcgattactccaaaagatttatggtagtgaaaatgtaacttatgtaagaaatatcactgacgttgatgataaaattatacacgcagcaaatgatcaaaatgaagacattggaatacttacagaaaagacaattaattactttcatgacgatgcgaaatatattggtgctttaaaacctacatttgagccaagagcaaccgaacatatacctgagatgatcaagttgattgaaaaactcatatcaaaagagtttgcatatatagcggatggtaatgttcttttttcttcaaataaatttaaagaatatggaaaactctctggcaagaatttagatgaaatggttgctggttcgcgtgtaggtgtagaaagttataaaaaagaagagtctgattttgtattatggaaaccttcaaaagaagatgagccaagttggaaaagtccatggggcgatgggagacctggctggcacattgagtgttctgcaatgagtgaaaaacttttaggggaaaattttgatattcatggaggaggccaagatttaatatttccacatcatgagaatgaaattgctcaaagtgagtgtgcaaataata

SEQ ID NO: 299388 - DNA, 691 bp, Unknown
  Bacterial polypeptide expressing nucleotide sequence isolated from the Sargasso Sea
tctgaattacttaggagaaactattgatattcacgctggaggtattgatttaatattcccccaccacgaaaatgaaatagctcaatcaacatgttgtcatgataaaaaaatgtcaaacttttggctccataatggttttatcaacttcaagggagaaaaaatgtctaaatctttaggtaatacaacaattgttaatgatttgttagctaaacatgacccaactgttttaaaatattctcttttaactacccattatcggcaaccaatagatttttcaaatgatctattaagctatagtcaaaacattataaataagtgggaaaactatatacaagaggttaaaactacagaattagactctgaatttgtcagtgcacttttagatgatttaaataccccaaaagcactaatgagattgcagcaaattatagctaatttgaaaaaagatactaataatgaggttttattggctcattttaataatggcttaagtctattgggcttaaatcctagttttctaaaaaaagatttagaccttgataaagaatatattgaaaatatgatatctcgccgacaaatagctaaaagcaataaagactttgaacttgctgataaaattagagatgagttatttaaacaaggaattgttttagaagacacaaaaaacgaaacgacatggaagaaaaactag

SEQ ID NO: 299389 - DNA, 148 bp, Unknown
  Bacterial polypeptide expressing nucleotide sequence isolated from the Sargasso Sea
atacaaaaaaaatcctgaagattttgttctttggaaaccatcaaagacaaatgaaccctcttgggatagcccttggggggatggaagaccaggatggcatatagagtgttcagctatgatttctgaattacttaggagaaactattga

SEQ ID NO: 299390 - DNA, 769 bp, Unknown
  Bacterial polypeptide expressing nucleotide sequence isolated from the Sargasso Sea
atgatagaaatgatagaaacattaatttcaaatggttttgcttatgtttcatcagggaatgtcttgttcgctgtagaaaaatataaaaattatggttctttgtcaggaaggtcaattgatgagatgatatccggatcaagggtggaagttgctgaatataaggaaaatcctggagattttatattatggaaaccatcttccaaaaatcttcctggatggaatagtccatggggtaggggacgtccaggttggcatatagaatgttcagcaatgagtaaaaagtatttagggacacaatttgatattcatgctggtggattagatttaatttttcctcaccatgaaaatgaaatcgcacagtcttgttgtgccaataaatccgatataatggctaattactggttacataatggttacgttacttctaatggtgagaaaatgtcaaaatcaaaaggtaactttgctactataaatgatttgctattaaattttaggggcgaatcaattagatatgcgttaatgcaagctcagtacagagctcctttaagttttagtaagaaatctttagatgaagctactaaatcattatctagactctatagagctgttgaaggctttcaaataactgatgatcaagataataaaatagtcgataatctttgtgatgatttaaattcgcctaaagctcttgccagattacattttctcgctgatgaggctaataaaggaagtagagaatgtgctcaaaaagttaaaaaactcttctaat

SEQ ID NO: 299391 - DNA, 903 bp, Unknown
  Bacterial polypeptide expressing nucleotide sequence isolated from the Sargasso Sea
ataaattcaaaaaaaatttctttatatgcatgtggtccaactgtttatgaaaatccacatgtaggtaatgctcgcacgctagtagtcttcgatgttttatttagagtattaaaagttctttatagctccaatgttacttatgtaagaaatattactgatgtggatgataaaataattgaagcatctaataaatataaaaaagatattaatgaaatcacaaatcaagttactaaaatttttcatcaaaattgtgagagtttgaattgtttgagaccaacagttgagccaaaggctaccgaacacatcaaagaaatgattttaatgacatcttctttgattaaaaaaggtcatgcttacgaaaataaggatcatgtttatttttcagtaaattcatttaaagattatggtaaactatctaataaaaatcttgacgagttaaaagcgggcacaagaataaaaatttcagatttaaaaaaaaatccaatggactttgttttatggaaaccttcaaaagaaatggaaccaggttgggagtctccctgggggagaggtagaccaggttggcatctagaatgttcagttatgagtgaaaaatatctaggtaaaacttttgatatacatggaggaggtcttgatttaatttttcctcatcatgaaaatgagattgcacaatcatgttgtaacaatgaaactaaaaattttgccaattattgggttcacaatggatttgtaacaatcaataaagaaaaaatgtcaaaatctttgggcaacatagttactattagtgatgcagttaaaagatactctggtcaagtagttcgattagcacttctgagtgctcattacagtcaaccacttgattggaatgatgatctattagaaaatcaaaagagcgtactagac

SEQ ID NO: 299392 - DNA, 770 bp, Unknown
  Bacterial polypeptide expressing nucleotide sequence isolated from the Sargasso Sea
gatgtcattacagttacaaaacacattaagtggtaaaaaagaattttttaaaccagttaatccagatcatgtaagaatatatgcttgcggtccaactgtttacaattttgcgcacataggtaatgcgcgtatggcagttgtaaatgatttattagtccgtgtattaaaaacacaatttaaacaagtgacctatgtatctaatatcactgatattgatgacaagattatagaagcttctaaagaaacaggtgaggatattagtgttatcacaaataaatatacagagatttacaataatgacatgagtgcacttggcgttaatcttcctgatattcaaccaagggcaactgatcatattaaagaaatgatcgaattaataaaaaaattaattgatgaaaataaagcttatcaaaaagagggtcatgttttatttcatgtgccaagttttgataattatggaattctttcaaaaagaaatagagatgaacaaatagctggaagccgtgttgaagtagcgccgttcaaaaaagatccagcagattttattttatggaaaccatctccctcacccttacctggttgggattcaccttggggatttggaagaccaggatggcatttagagtgctccgttatgtcagaaaaatcattaggccttccttttgatatccatagcggtggtattgacttggtgtttccgcatcatgaaaatgaaatagcacaaacttgttccatatctgaaaataaagatcctaaagattttgcaactt

SEQ ID NO: 299393 - DNA, 819 bp, Unknown
  Bacterial polypeptide expressing nucleotide sequence isolated from the Sargasso Sea
aggacatgtgctgttcaacgtgccgagttatgcggaatatggtcaattgtcgcagagggaccgggatgaaatgatcgccggcgcccgggttgaagtagcgccctacaagaaagatccctcggatttcgtgctttggaaaccgtcgacaccggacctgcccggatgggacagtccttggggtgtcggacgccccggctggcatctggaatgttcgtgcatgatcgagaaacatctggggcgctccatcgatatccacggcggcggggtcgatctggtgtttccgcaccatgaaaatgagatcgctcaatctacctgcgcccacggaggcgataccttcgtgaagtactggcttcacaacggttttgtcaatgtcgaccaggaaaagatgtcgaaatccatcggcaacgtgcttctagttcacgacctgcttaaagacgcccctggcgaggcgatccgtctggccttgctgaatgcccattaccgccaacctctggactggactgatgatgggctggcgcaggcaaaacgtatgctcgaccgtctctacggcgcgttgcggggactggccgacctcgacccggcgggggacacagggcccgatcctgaatttctggcagccctgaacgacgatctgaataccccaaaggcactggccgccctgttcgatctgtcacgtcaggcaaattcagcaactgacccggaagaaaaatcccggctgaagggagtactgcttgcctcgtcaaacctgatgggcatcctgcaacaggataccgaagcttggttcgctggaggtgatattgaccaagacggtctgtcggc

SEQ ID NO: 299394 - DNA, 278 bp, Unknown
  Bacterial polypeptide expressing nucleotide sequence isolated from the Sargasso Sea
tatgagtaatgatatttttttaacaaataatctcacaaacaaaaaagaaaaatttgttccaatagataaacaaaatataagaatgtatgtttgtggaccaacagtttatgatgatcctcatattggaaatgcaagaccaatagttgtttttgatatcctttataaaatttttaaaaaaaaatattcaaaagttacttatgttagaaatataacagatgtagatgataaaattattaaatcttcaaaagaaaataatatttcaatttcagagcttacaa

SEQ ID NO: 299395 - DNA, 201 bp, Unknown
  Bacterial polypeptide expressing nucleotide sequence isolated from the Sargasso Sea
cctgcggataacgaatactctgtcccgccaaaaagaggacttcgttccagttgatccaaagcatattcgtttctatgtctgtgggccaacagtgtatgactatgcgcatatcggcaatgcgcggcctgttgtcgtttttgacgtcttgtaccgtttgctgaaaactctttacccacgcgtaacctatgttcgtaatatcac

SEQ ID NO: 299396 - DNA, 871 bp, Unknown
  Bacterial polypeptide expressing nucleotide sequence isolated from the Sargasso Sea
aaatttagaggatttaattgctgggtctagagtagaaattagcgaaaataaaaaaaattcagaagactttgttttatggaaaccatcaaataatgatgaacctgcttgggattcaccttggggcaaagggagaccaggttggcatttagagtgttcagctatgtcaaaaaaattcctaggtaatgaatttgatattcatggtggaggtatagacctaatttttccccatcatgaaaatgaaatagctcaatctaggtgtgcaaataatacaaaagtttttgcaaattactgggtccacaacgcatttatcactatatctaatgaaaaaatggctaaatcacaaggcaacatctttaagataaaagattttagaaacaagattagtggccaaataattagattagctttaatgagtgcacactataaacaaccattagattggaacgacaaattgttaagtgattgtgaaagtactttagataagtggtataaagtatattcatctaatcttaaatctgtcaaagtttcagacgaaattttaaaaccactttatgaggatttgaatacgcctggatatatcactaaccttcacaagttatatgaaaaagctaataaaggtgaaaatatagatttatttgtttcagcatgtaaattcattggtttgatgaatgaaactagtgaggaatggaatgaatttaaaaagaaaagagtatctataactgagactgaaattgaaaatttgcttagtttaagagataaagccagagaaaataagaattataaagaagctgatagaattagagatgagctcttagacaaaggtgttttaatagaagacaaagatggtaaaacactctggaaatttaaatga

SEQ ID NO: 299397 - DNA, 944 bp, Unknown
  Bacterial polypeptide expressing nucleotide sequence isolated from the Sargasso Sea
tgatatcgaacctaaagcaactgaccatatgaaggagatcgttacaatgatctcaaatttaataaaaaaaggtcacgcttacttaggaaaaaatggagatgtttactttgatgttagttcgttcgatgcatatggaaaattatcaggaaaaaatactgatgaactaagggcaggagaacgcattgaggtacaaaaagaaaagaatgatcctttagattttgtattatggaaatcagcgaaacctgatgaacctaaatggccgtctccatggggtgagggacgaccaggttggcatatagaatgttccgcaatgtccacccattgtcttggtagtcactttgatatccatggcggaggccaggatctacaatttcctcatcacgaaaatgaaatagcacaatctgtgtgctctacaaacgataaatttgcaaacatatggatgcataatggattcgtcagagttaatgaagagaaaatgtcaaagtcgcttaataatttttttacgattagagaagttttgaaaaaatacaatgctgaagttattcgtttcttcattttatcaagccactatcgaagtcaattgaattattcaagtgataatcttgatgaagctaagagtgcactcacaagattgtatacagctttaaaaggatcaaatcatgaatcagctgttgataaaaaatacttagctgactttaactcgcatatggatgatgatttcaatactccaaaagcaatttctttgcttcatgagataacaagaaaaataaatcgtcttggggataaagaaacagagaaatcaaaaatattaaaatcgactctaaaacagcttgcttcaacattggggttgttaaattcaaatccgcaagattttctacaaggcagagaagataataaaattgatgacgtagatactgattatataaacaaactaattgatgaac

SEQ ID NO: 299398 - DNA, 751 bp, Unknown
  Bacterial polypeptide expressing nucleotide sequence isolated from the Sargasso Sea
atgacggatatatttttaacaaataatttaacaaataaaaaagagcaattcattccaaaagatagaaaaaaaataggaatgtatgtttgtggacctactgtatatgatgatccacatattggtaatgcaagacctttagttatttttgatattttatttagattacttaaaaataatttttcaaaagtaacttacgttagaaatataactgatattgatgataaaattatcaaatcgtctcaagaacaaaaaatttccacaaaagaacttactgaaaaagtgacttcaagttttttaaaagattgtgaatttttaaattgtgaaaatccaactcatcaacctaaagctacggagcatattgatctcatgattgagatgataactgaactaattgaaaaaggttttgcttatgaaaatcaaaatcatgtctattttgaagtaaaaaaatttgctgattacggaaaattatcaaataaaagtttagatgaattgattgctggatcaagaatagaaattagtaaaaataaaaaaaattctgaggattttgttttatggaaaccatcaataaatgatgaaccttattgggactcaccttgggggaaaggtagacctggatggcacctagaatgttcagcaatgtcaaaaaaatttttaggtaacgagtttgatatccatggtggcggtatagatttaatctttcctcatcacgaaaatgaaatagcacaatctagatgcgcaaatgaaacaaaag

SEQ ID NO: 299399 - DNA, 745 bp, Unknown
  Bacterial polypeptide expressing nucleotide sequence isolated from the Sargasso Sea
acctatcagtgagataaccaaaaaatatgagaaaatatataatgagaatctaaatgagcttggtattgaccctccagattttcaacctagagcgactgagcacatcccagagatgatagatcagatcaaggctcttatcaaaaatggtcatgcatacaaggcagaaggtcatgtattatttagtgtaaatacctttcttggttatgggtcgctttctgggagagataaggaagagcagattgcaggaagcagggtagaggtagcaccttataaaaaagacccaatagattttattctttggaagccaagtatagaagatcagccaggctgggattctccgtgggggtttggccgtccaggatggcatcttgagtgctctgcaatgtcggagaagacgttaggagtaccatttgatattcataccggagggcaggatcttcttttccctcatcatgagaatgagctggcccaatgctgtggagttcataacaatcttgataacataagctcctatgcccggtattggatacataatggtatgattaggtttgatggagataaaatgtcgaagtcacttgggaatatacaattcatcaatgatctgcttaatgatcacaatggagagactctaagattggtgcttatgtcaacgcactatcgacagcctcttaactggtcagcaaaaaccattgaccagtcaaagaaaacactcgatagattataccgaacaataaaaagtctaaat

SEQ ID NO: 299400 - DNA, 621 bp, Unknown
  Bacterial polypeptide expressing nucleotide sequence isolated from the Sargasso Sea
aatgaagatttctgacacacttacaaatgaaaaaaaagaattagagttttcagataaagtacgaatttatctttgcggagtaacagtttatgatcaatcacacataggacatgctagaacaataattgtatttgatacattaagaagatttcttgaagcaaatggcatcaaagtagagcttattcaaaattttacagatgtagacgataaaataattaatcgtgcaaaagaacaaggcgaatctgcaagtggaatatcaagcaagtacattcaaacatactttgaagattccgatagattaaacatcaaaagagcaacaaattatccaaaagcaaccgaacacattgacgatatgataaatctaattcaggatttagtagacaaagaatctgcctatgtttctaaaaatggagtatactttagagtttcaaaattttcagaatatggaaaactatcaaaaaagaaaacagaagatcttgaaagtggggcaagaataggagtagacgaagcaaaagaaagcccgttagattttgcattatggaaattttctgaaggacaaccaaattgggaaagtccatggggcaagggcagacctggctggcatatagaatgttctgcaat

SEQ ID NO: 299401 - DNA, 708 bp, Unknown
  Bacterial polypeptide expressing nucleotide sequence isolated from the Sargasso Sea
aatgaataaagatatttttttatcaaatagccttggtggaaaaaaagagaaatttgttccaatggatcaagaaaaagtgggcatgtatgtttgtggacctactgtttatgatgatcctcacattggaaatgctagacctttagttgtttttgatctgttatttaaagttctaaaatgtaaatacggaaataactcagtaatttatgttagaaatataacagacatagatgataaaattattcaatcatcgaaagaaaaaaatatttcaataactgaattgacatcaaaaattactaaaaaatttcatgatgattgtgaatatttaaattgtgaaataccaacacatgaacccaaggcaacagataatattgaagaaatgataaacatgataggagaattaatcaaaaataaatttgcttatgaaagtcagggtcacgtttattttaaagtaaaaaattttaaagattatggaaaactttctaataaaaatcttgatgacttaatagctggatcgagagtagaattatccgataaaaaagaaaatcaagaagattttgttttatggaaaccatcaaacgatgatgagccatcatgggactcaccttggggcaaaggtagacctggttggcatttagaatgctctgttatgtcaaaaaaatatctaggtgatacttttgatattcatggaggtggaggggatttatattt

SEQ ID NO: 299402 - DNA, 902 bp, Unknown
  Bacterial polypeptide expressing nucleotide sequence isolated from the Sargasso Sea
actgggaaaaaaagaggaattagtgcccttagacggcgaacaggtaagaatgtatatctgtggaatgactgtttatgatgatactcatataggccatgctagaactttcttatgttttgatttaatagttaggtatctaagaaagtctggttataaagtaaattacattagaaatataacagacgttgatgacaaaattattgctagagctaaagagttaaatattgatgcttcagacttaactgataaatatattacatcaatgcaagaagattttagaaatctaggcatgatagatccagatatagaacctagagcaacaaacaatatagattcaataatttctttaatacagatattaatggataaaggtcatgcttacactggcaaggcagatgtttatttttctacagactcttacaaagaatacggaaatctttctaatagaaatactgaagacttgattgctggtgcaagaatagatgttgacgaagagaaacaaaatccagcggactttgtcctttggaaaaaagctgaagaaggactaacttgggattcgccttggggaagaggaagacctggatggcatatagaatgctctgcaatgagtatggatgctttaggtaaaacctttgatattcatggcggtggaatagatctcaaatttccccatcatgaaaatgaaattgctcaatctgtatgtgctacaggagaagattttgcaaaatgttggatgcataccggccctttaaggatagataaagagaaaatgtctaaatctttagataattttataaccataaaagaagctataaataaatttccgccagaggtgattaggttcttcttaatttcaaatcattacagaagcccaattaattactccgaagaaggggtgctag

SEQ ID NO: 299403 - DNA, 646 bp, Unknown
  Bacterial polypeptide expressing nucleotide sequence isolated from the Sargasso Sea
aatggatatttttttaacaaataatttaacaaataaaaaagaactgttcgttcctaaagataataaaaatattggaatgtatgtttgtggacctacagtttatgatgatccccatattggtaacgctagaccattagttgtttttgatattttatttaagttacttaagaataaatttgagaaagtctcatatgtaagaaatataactgatatagatgataaaattatcaaatcatctcaagaacaaaaaatatctacaaaagaacttactgataaagtgaccaaaagttttttagaagattgtaaatatttgaattgtgaaaatcctactcatcaaccaaaagcaacagaacatattgatttgatgattgaaatgactactgagttaattaaaaagggttttgcttacgaaaataataaacatgtttattttgaggtaaaaaaattttcagattatggaaaactttcaaataaaaaattagaagatttaatagctggatcaagagtagaaattagtaaaaataaaaagaattctgaagattttgtattatggaagccttcaaataaagatgaaccttcttgggattccccttggggaaatggaagacctggttggcatttagaatgttccgcgatgtcaaaaaaa

SEQ ID NO: 299404 - DNA, 859 bp, Unknown
  Bacterial polypeptide expressing nucleotide sequence isolated from the Sargasso Sea
aatgaataaagatatttttttaacaaataatctaaccaacaaaaaagaaaagtttgtaccaataaataaaaataatattggtgtgtatgtttgtggtccaacagtatatgacgatcctcatataggaaatgctagaccgttagtagtttttgatattctttttaaaatacttaaaagtaaattttcatccgttacttatgtaagaaatattactgatgtagatgataaaataattaaatcatcaaatgaaaaaaatatttctattacggatttaacaaaaaaagtaattaaaagctttcatgaagattgtaaatatttgaattgtgaaaatccatcacaagaacctaaagcaacagaacatattgatttaatgatagaaatgatttctcaattaattaaaaaaggttttgcctatgagaataacaaacatgtttattttgaagttaaaaaatttaatgattatggaaaattatccaataagaaaatagaagaattagttgcaggttctcgagttgaagtaagtgataataaaaaaaattctgaagattttgttttgtggaaaccatctttagaaaatgaaccatcgtgggactcaccttggggtttaggaagacctggatggcatttagaatgctcggcaatgtctaagaaatttttaggtaatgaatttgatatccatggaggaggaatagatttaatttttccacatcatgaaaatgaaatagctcaatcaagatgtgcaaataacactaaaatttttgctaattattggcttcataatgcttttattacgatctcgaatgaaaaaatggcaaaatcacaaggaaatattttaaaaataaaagatttaaaaataaag

SEQ ID NO: 299405 - DNA, 826 bp, Unknown
  Bacterial polypeptide expressing nucleotide sequence isolated from the Sargasso Sea
ataaaaaataaattcgcttatgaaagtcaaggtcatatttattttaaagtaaaaaattttaaagactatggaaaactttctaataaaaatcttgatgatttaatagctggatcaagaatagaattatcagataaaaaagaaaaccaagaggattttgttttatggaaaccatcaaatgacgacgaaccatcatgggactcgccgtggggcaagggtagaccaggttggcatttagaatgttctgttatgtcaaaaaaatatttaggtaatacttttgatattcatggaggtggaagggacctaatatttcctcatcacgaaaacgaaattgctcagtcagtgtgtgcaaataaaacagaaaaatttgctaacttttgggttcacaataattttataaccatgtcaaaagagaaaatggctaagtcacaaggtaatattttaaaaattagtgattttaaaaaaaaatataatggtcaagttttaagattagctttaattagtacgcattatagtcagccattagactggaatgaaaagcttatgagtgaatgtcagagaactttagacaaatggtacaattgttatgtatcagtgaataaaaaaatattaatacaagatgatgatttaaatcctttatatgacgacttaaataccccgggttttattgctatacttcataagctttatgataaagctaaagaaggcaatcaagaggataaagaaatattcactactgcatgtaaatttattggtcttttagatcaatcaaaagaagaatgggatggttttaaaaaacaaaatttaaaactatcccaaaacgatattt

SEQ ID NO: 299406 - DNA, 851 bp, Unknown
  Bacterial polypeptide expressing nucleotide sequence isolated from the Sargasso Sea
aggatttaatttcaaagattttgcatatgaaaaagaggaccatgtactttttcatgttcctaattatgataattatggaaaactttcaaaaagaaatagagatgaacagattgcaggcagtagaatagagatagcaccttttaaaaaagatcctgctgattttgttttatggaaaccaagtgataaatcacaaccaggttgggattctccttggggggtaggtcgcccaggatggcatacagaatgctcagcaatgtccaaaaaaacattaggccttccttttgatattcatggtggcggtagggacttaatttttcctcatcacgaaaacgaaatagctcaaagttgctgttcttctgcaaacattgaagatcctacatcttatgctaaatattggatgcataatggttttgtaacgattgatggtgaaaaaatgtctaaatcgctaggcaatataatacttgtaaatgagttaacagaatcctatcatggtgaagtaattagattggctctattatcatcacattataggcagggcttagattggaacgaaaaaataattcatcaagcaagcattcttctagataaattatatgaaattaaaattttgttaaatggtgaaaatatagaacattcatctgaaacaaatttagagccaatcgcttacttagctgatgatctaaatacacctggactaattgctgaactgcataaactagttaaagattttaatacctcaaattccaacaaatcagagattaaaattcatctaaatttaatttcacaagctttaggaattttacaagatgattcttacaaaaaaatatctgaggaattagaatcaaaaatac

SEQ ID NO: 299407 - DNA, 835 bp, Unknown
  Bacterial polypeptide expressing nucleotide sequence isolated from the Sargasso Sea
agcatagaagatcagccaggctgggactctccgtgggggtttggccgcccaggatggcatcttgagtgttctgcaatgtcggagaagacgttaggagtaccatttgatattcataccggagggcaggatcttcttttccctcatcatgagaatgagctggcccaatgctgcggagttcataacaatcttgataatataagctcctatgcccggtattggatacataatggtatgatcaggtttgatggagataaaatgtcgaagtcaattgggaatatacaattcatcaatgatctgcttaatgatcacaatggagagactctaaggttggtgcttatgtcaactcactatcgacagcctcttaactggacagcgaaaaccattgaccagtcaaagaaaacactcgatagattataccgaacaataaaaagtctaaatatttcattagatgatactaatgtaaaaccagctcaggaggttattgatgcactttgcgatgatctaaataccccggaagccttagggcagtttaaccttttaatgaaagatctagagaatgctgaaggaagccaaaaagaagaaaaactagccataataatttctactgctagaatgcttggtattctccaaattgatcccgatagttggcttggatatcaaaaagtaaaaactggaatggatgtagataaaatagagcagatgattgaagatagaaataattgcaggtctgaaaaggactttcaaagggcggacgagattcgtgatgagttaagatcaatgggaatagagattgaagatagtgctgaaggaactatttggaaaagcgagagctaat

SEQ ID NO: 299408 - DNA, 808 bp, Unknown
  Bacterial polypeptide expressing nucleotide sequence isolated from the Sargasso Sea
agattttgttctttggaaaccaacagaaatgaataatattggttggaatagcccttggggttatggacgacctggctggcatattgaatgttctgcaatgtgtaaagaacttctgggtgaaagttttgatattcatggtggaggaattgatcttttatttccacatcatgaaaatgaattggctcaaagtgtttgtgccaataatacaaaactattggctaattactgggtccataatggttttgttaacattgaaggacaaaaaatgtcaaaatctttaggtaattatttaacggttgaggatttaaggaaaaaaggtattactagtgctgtgatacgctttgttttattatcaacgcattacagacagccattggattggacaaatcgaaagctttatgaagcacaaactatattaactaagtggttaagagtttttgataaaaaaaatgtgctaattcatggacagcctacaaaaaaaattttgaaagccttatgtgatgatttgaattcacctctagttttaactgaaatgcacaacttattaaaaattggggatttagatggtttcataaattccatggtttttttaggctttacttctaatacatttaaagagcaaataactacaaaaattaatgttgatgatgataacattcataaattgataaatgatttaatttttgcaagacaaactgccagagataataaagattacagaaaatctgatgaaataagaattaggcttgaaaaagccggagtaagtattaatgatcttggcaataagactaaatggacattacaacca

SEQ ID NO: 299409 - DNA, 554 bp, Unknown
  Bacterial polypeptide expressing nucleotide sequence isolated from the Sargasso Sea
aatggatatttttttaacaaataatttaactaataaaaaagagcaattcattcctagaaatgaaaaaaatataggaatgtatgtttgtggaccaactgtttatgatgatccacatattggtaacgctagaccattggtaatatttgatattctctttaagttactaaaaaataaattcaagacagtctcttatgtaagaaatataactgacatagatgataagattattaaatcatctcaagatcaaaaaatatctacatcagaattgacagaaaaagtgacaaaaagttttttacaagattgtaaatatttaaattgtgaagatcctactcatcagcctaaagctacagagaatatagatttaatgattaaaatgataaatgatttgataaaaaaagggtatgcatatgagaataataatcatgtctattttgaagttaaaaaattttctgattatggaaaattatcaaataagaaattagaagatttaatagccgggtctagagtagaaattagtgataataaaaaaaattctgaagactttgtattatgga

SEQ ID NO: 299410 - DNA, 612 bp, Unknown
  Bacterial polypeptide expressing nucleotide sequence isolated from the Sargasso Sea
aatgcatttaacattctacaatactaaaacccgaaggaaagagaggtttataccaataaataaagaaaatgtttctatgtatgtttgtggacccacagtgtacgatcgtgcccatattgggaacgcaaggccagctgtagtttttgaccttctatttagattttttaaacatatctatggttctgaatgcgttacctatgttagaaactttactgatatcgatgataagataaacgacaaatcaaaaattactggaaggtcaatcaaacagatcaccgatgagactattggatggtatattgcagatatggaatatttgaatgtcttggaaccatctttcagccctagggctactgattttatcgggccgatgattgaacttatctcaaagctgatttctaaaggtaacgcctatatcgatggcaagggacacgtttacttcaaggtaaagtcatattcaagctatggaatcttatccaaaagaaacctagaagagttggaaatgggggcgagagtagaaatttcagagaataaaagggatcctatggactttgtgctttggaaaccctcagacgaacagacccccggttgggaaagtccgtggggaagggg

SEQ ID NO: 299411 - DNA, 930 bp, Unknown
  Bacterial polypeptide expressing nucleotide sequence isolated from the Sargasso Sea
aaaaaagaagtatttaagccaaataatataaaaaagatttccttatatgcttgtggcccgactgtatatgagagtccgcatgtaggtaatgcaagaacccttgtagtgtttgatgttttatttagagttttaaaggttctctatgattcaaatgtaacgtacgtaagaaatattactgatgtagatgacaagataatagaagcttctcaaaataataaagaggaaataaacgaaataactaatagagtgattaaaatttttcatgaaaattgcaagagtttaaactgtttaaaaccaacgatagagccaaaagccacagaacatgtaaaagaaatgattgaaatgacatcttcattaataaaaaagggatttgcttacgaaaataaaaaccatgttttttttgctgtaagtaaatttaaagattatggaaaattgtcaaacaaaaatttagatgaattaaaggcaggtagtagaatagaaatttctgatctaaaaaaaaatccaatggactttgttttatggaagccttcaaatgaaaaagaccctggttgggagtcgccttggggaagaggtagaccgggctggcatcttgaatgttcagtaatgagtgaaaaataccttggtaaaaatttagatattcatggcggcggtcttgatttaatttttcctcatcatgaaaatgagatagctcaatcttgttgtaacaataatacgaaaaacttcgcaaattattgggttcataacggatttgtaaccattaataaagaaaagatgtcaaagtctttaggcaatataatttctataactgatgcaactaaaaaatattccggccaggtcgttaggttagcattattaagtgctcattacagtcaaccactagattggaataataaactttttagaaatcaacgagcaaccattgaaaaatgg

SEQ ID NO: 299412 - DNA, 862 bp, Unknown
  Bacterial polypeptide expressing nucleotide sequence isolated from the Sargasso Sea
cttttaaaaaacaatcatgcttatgagaaagacaagcatgtatatttttcaataagttcatttaaaaattatggcaagttatctaaaaaaaatcctgatgaattagttgctggggcaagagtagaagtttcaaagtcaaaaaaacaccctctcgattttgttctttggaaaccatcagcagcagaagacccaggttgggactccccatggggaagaggaagacctggatggcatcttgaatgctctgtaatgagtgaaaaattccttggaaaaaattttgatattcacggtggaggattggatcttgtttttcctcatcacgaaaatgagattgcacaatcatgttgtgctaataaagctgataaattcgcaaactattggttacataatggttatgttacttttaacaaagaaaaaatgtcaaaatctttgggaaacattgttactattgaaaaaatgagaggacaaattaacggacaggtcattagacttgctttgttgagtacacattacaaacaacctttggattggaacgagaagttgataaatgagagccaaagtacgcttgataagtggtacactcagtttgaagatacaaaagaagatcatttgagtgatgatttgttacaaccgcttttgcaagatataaatacacctggatacatatcaaaacttcattcactttatgacaaagcatctaagggggacaaagagtcaaaaaagaatttccttgctggatgtaagcttataggtttgttagaggatgattttaataggtggaaacaatttaaaaaaacaaagtcaaaaattgatgaagcgatcatttcaagcaaaattaaagatagagaaaatgccagaagaa

SEQ ID NO: 299413 - DNA, 784 bp, Unknown
  Bacterial polypeptide expressing nucleotide sequence isolated from the Sargasso Sea
attgatcaaggcgtgtcattgcagagctttactgacaagtatactcaagccttttatgaagatgttgataggcttagaattcgtaaggctaagcattacccgagagctacagattttgtgcctcaaatgattgaaatgatattgaagctagagaaaaaaggctatacatatacaaccgaagatggatctgttttttttaaaatttctaactttgaagcttatggtaagcttgcaaacttagatccagagcagctccaaagtggcgcccgagtagaggctgatgaatatggtaaagaagaggggcgggactttgctctttggaaaggctataaagatgaagatggagatgttttttgggattctccttgggggagggggcggccaggctggcatattgagtgctctgcaatgtcgatgaatttactaggagattgttttgatattcattgcgggggcgttgataatatttttccccatcatgaaaatgagattgctcaaagttgcgccgcttctgatgctcagtttgtgaattattggcttcacaatgagcatcttttagttgatggtgaaaagatgagtaagtctgcaggaaatttttataccttgaggagcttgcttgaaaaggggtttagccctgaagcgataaggtacacgcttctttcaactcactacagatcgaaattaaattttactgttgaaaaagtcaaaattgctcaaaagacgataaatagactgagggagttaaaaagaaggttagagaaagtatcggcaggggtggaaggcg

SEQ ID NO: 299414 - DNA, 404 bp, Unknown
  Bacterial polypeptide expressing nucleotide sequence isolated from the Sargasso Sea
aatgaacaaagatatttttttaacaaacagttatagtggtcataaagaaaaatttgtgcctatagacgcgaataatattaaaatgtatgtctgcggtccaactgtttacgacgatccacatataggaaacgcaaggcctttggttgtgtttgatattctttttaaagtattaaagtgtaaatatggcaatgataaagttacatatgtaagaaacattacagatatagatgataaaataatccaatctgcaaaagataaaaaaattacaatcaaagacttaactacgaaaataaataaaaatttccaagaagattgtgattatattaattgtgaaaaacctagttttcaacctaaagcaacagaaaacattaacgagatgattcatatgataaataatttagttg

SEQ ID NO: 299415 - DNA, 870 bp, Unknown
  Bacterial polypeptide expressing nucleotide sequence isolated from the Sargasso Sea
tttgtaagactatttagaaataaatatccaaatgttacatatgtatcaaacattactgatattgatgacaagataattgaagctgcaaatgaatcaaatatccctattaacgaactgacaaagaaatatacagatatctataatgcagatatgtctaatttgaatgtctttcctccagacattcagccaaaagcaacagagtatgttgtggacatggttaattttattgataaattaatccagaatgataaagcttatgaaaaagatggtcatgtatttttcaatgttccttcctatgggggctatggaaaattatcgaatagagagatagatcaacaacttgctggtagtagagtgcaagtatccgatatcaaaaaaaatcaacaggactttgttttgtggaagccatcaagcgaaagtcagcctggatgggaatctccatggggtattgggagaccgggatggcatacagaatgttgtgtgatgtctgaagtaaatctaaaaataccttttgatattcatggtggtggacaagacttactctttcctcatcatgaaaatgaaattgctcaatcttgtgcaagcgttaattctgacaatcctgaagattatgctaagtattggatacataatggttttgtaactatagatggcgaaaaaatgtcaaaatctcttaataatattattcttctgaatgatcttttaaaagaacatgatggagaaacaataagactagcactgttatcctctcattatcgaaaatcacttgattggaatgaaaatgtaattaagcagtctaaagtattgttggataaagtttatgattttcttgttacctatgacgatgatccagaaggtgaaattgatgaa

SEQ ID NO: 299416 - DNA, 783 bp, Unknown
  Bacterial polypeptide expressing nucleotide sequence isolated from the Sargasso Sea
aatgcttaaactatacaattcctacagtaaattaatagaagaagtcagcttggataaaaatgatgtaaagatttatctatgtggaccaacagtgcaatcttctcctcatttaggacacggacgctcagcagttgtatttgattttctaataagatatatgaaatatttagaatacaaagtcacttatgttagaaatattacggatatagacgataagattattttaaagtctaacgaagaaggcatctcttatattgaacttggcaacagggtttcagctgaatttaagaaagcttatagtgaactcaattgcattacacctgattttgagccaaaagcaactgaatttatttcagaaattataaaatatatagaaaagttgataaaaaataaatttgcttatgtaagcgaatcaggaatttattacgatactttaaagttcaacgattatctgaaattatcaggcagaacaagagaagacgttattacaggaacaaggattgagcttgaagaagataagcaatcgccagaagattttgcactttggaagttttcaaaagaaggagagccatattgggaatcaccatggggaaatggaaggccaggatggcacattgaatgctcttcaatgattgaatctatacttggtaaaactattgatattcattgtggtggtaatgatttaatttttcctcatcatgaaaacgaaattgcacaatctaaaggggcatatcctactgaggaatttgtaaggtattggttacacaatggaatgttaaattt

SEQ ID NO: 299417 - DNA, 583 bp, Unknown
  Bacterial polypeptide expressing nucleotide sequence isolated from the Sargasso Sea
tatgagtttagatatttttttaacaaataatcttactaataaaaaagaaaaatttattcccaaagataaaaataatgtgagaatgtatgtttgcggtccaactgtttatgatgatcctcatattggtaatgctagaccagtagttgtatttgatattctttttaaaattttaaaaaataaatatccaaatgtaacctatgtaagaaatattacagatgtagatgataaaataataaaatcctcaaaggaaaataatattttaatttcagagcttactaaaaaaattactcaaagttttaatgaagattgcatttatctaaattgtgaaaaaccaaaccatgagccaaaagcaactgagcatatttctgaaatgatagaaatgatctctgaattaattaaaaaaggatttgcgtacgaaaataagaggcatgtttatttcgaggtaaaaaaatttgaagattatggtcaattatcaaataaaaatttagatgaattggttgcaggatcaagaattgaagtaagtgataataaaaaaaatcctgaagattttgttctatggaaaccatcagagtcagatgagcca

SEQ ID NO: 299418 - DNA, 442 bp, Unknown
  Bacterial polypeptide expressing nucleotide sequence isolated from the Sargasso Sea
atgatcaaactttttaatactttaagcaaaagagttgaggtttttaagcctattgatgatgtagtaaaaatttattgttgtggagtaactgtttatgatttatgtcatcttggtcatgccagaagttatatagcttgggatgtattgagaagatttttaatttacagtgaattcaaagtaaagtatgttcaaaattttactgatattgatgacaagatcttaaaaagagcgaaagaagaaagcagttcaatgaaggaggtatctgaaaagaatattattgaatttcataaagatatggattctttagggataatgcgtccggatagtatgccaagagcaacgaatcatatatgcaatatctgctccttcataacaatcctcgaggacaaaggttatgcatactctagggatggagatgtttattattctgttttaaaaataa

SEQ ID NO: 299419 - DNA, 797 bp, Unknown
  Bacterial polypeptide expressing nucleotide sequence isolated from the Sargasso Sea
gaaaccatcagcagtagaagatccaggctgggattcgccgtggggaagaggaagaccagggtggcacttagaatgctcagtaatgagtgaaaaatttcttggaaaaacttttgatattcatggaggaggattggatcttatttttccacatcatgaaaatgagattgcacagtcatgttgtgcaaataaaacagataaatttgcaaactattggctacataatggctatgttacttttaataaagaaaaaatgtcaaaatctttaggaaatattattactattgaaaaaatgagaaaaacaataaacggtcaggttattaggcttgctctcttaagttcgcattataaacaaccattagattggaatgaaaatttaattaaagaaagtcagaatactcttgataagtggtatacacagtttgaaaaaaataaggaagatgttttaaaccaagatttattagaaccactgttggaggatataaacactccaggttatatagcaaaacttcatttgctttttgataaagcttcaaagggtgataattcttcaaaaaaactttttcttgctggatgcaaacttatagggttactagaggaagatttagaaacatggaataaatttaaaaaagcaagatcaaaagttgatgaaaaaactatccaaagtaaaattaaagatagagatttggcacgaaaaaaaggtgattataaattagcagacaacataagaaaagatctcgaaagtaaaggggtaataattgaagacaaagacaaaaaaacaatttggaaatataaatgag

SEQ ID NO: 299420 - DNA, 670 bp, Unknown
  Bacterial polypeptide expressing nucleotide sequence isolated from the Sargasso Sea
atgaagatttcagatacgttaacaaatcaaaaaaaagaattagaattttctgataaagtaagaatctatctttgtggcgtaacagtatatgatcaatcacacatagggcatgccagaacgataatagtttttgatacattgagaagattccttgaagcaaatggcactcatgttgaattaattcaaaattttactgatgtcgatgataaaataattaatcgtgcaaaagaacagggcgaatcagcaagtggattatcaactaaatatattcaaacgtattttgaagattctgataggttaaacattagaagagcaacaaattacccaaaagcaacggaacatatcgatgatatgataaatctaattcaaaatttagtggataaagaatctgcatatgtgtctaaaaatggagtatatttccgcgtttcagaattttcagaatatggaaaattatcaaaaaagaaaacagaagatctggaaagtggtgccagaatagaagttgatgaatcaaaagagagtcccttagattttgccctgtggaagttttcagatggacaaccaaattgggaaagtccatggggtaaaggtagaccaggatggcatatcgaatgctctgcaatgagtatcaagtatcttggtaaaaattttgagatacacggaggtggaagag

SEQ ID NO: 299421 - DNA, 859 bp, Unknown
  Bacterial polypeptide expressing nucleotide sequence isolated from the Sargasso Sea
aggtgcaagagtttgaggtttccggaaaataaaaaaaatcctgctgactttgttttatggaaaccttcagcagaaaatgaaccatcgtgggattctccatggggaaaaggtagacctggttggcatcttgaatgttcagtaatgtcaaaaaaatttttaggcgataaatttgatattcatggaggtggaatggatttaatttttcctcatcatgaaaatgaaattgcgcagtctagatgtgctaatgaaaatgaaacatttgccaactattgggttcacaatggatttataacaatcgctagcgaaaagatgtcaaaatcacaaggcaacattttaaaaattggtgattttaaaaataaagtaagtggacaagtgttaagattagctttaatcagtgcacactacaaacagcctttagattggaatgaaaagcttttatctgagtgcgaaaaaacaattaataaatggtatgaaagttatactgatattaaaaaacaagtattaattcctgaagattatctttctccattatatgatgatttaaatacacctggctatatcgctaatcttcataaactttttgacaaatctcaaaaaggctcaattaaggataaagaaatatttgtttcagcatgtaattttattggtcttttaaatgaaaataaaaactcatgggataaatttaagcaaagtaaatctatgatttcagaagaggaaattaaacaaaaaattactgaaagaaataatgccagaaaaaataaagactataaagctgcggataaaattagagatgaattattagataaaggagttttaattgaagacaaagatgataaaaccctctggaaatttaaatgag

SEQ ID NO: 299422 - DNA, 739 bp, Unknown
  Bacterial polypeptide expressing nucleotide sequence isolated from the Sargasso Sea
ctatggaaaaaagccaaagatgatgaaccattttttgattcgccatggggtaaaggtaggccaggatggcatattgaatgttcggcgatggttaaagatgaattaggagatactattgatatccatttaggtggttctgatttgatttttccacatcatgagaatgaaatcgcccaatcagaagcagccaatggcaaaaagctagcgaactattggttacataatgggatggtaaatgtaaatggacaaaagatgagtaaatcccttaaaaattttaaaactattagagagctaattaagtcaggtataagccctatgactttgcgatattttgtaatgactgtgaattataggaaaccacttgattttactgaagaagctttaaggagtgcttcagaagcttggaaaaacattaatttagccctttcttttttggaccttacaaaagatgcttttaaatttattgataagaatgaatctatcgaagtcgaatataaagagaaaataagctttgaattatctaaaaaaaagcttaatttttctgaggctcttggaaatgaccttaatacagcaggtgctatcgcaattatttacgatttagcaaaaccattaaaaaactttttaaaccaatttcaaagggtcgaaggttttaaaatagacctaaatgaaaaattctttctacttgagaattttaaaactcttgaaaagttaactgaagtacttggtcttaaaaaagagg

SEQ ID NO: 299423 - DNA, 724 bp, Unknown
  Bacterial polypeptide expressing nucleotide sequence isolated from the Sargasso Sea
atgatcaaattatttaatactttaagcaaaaacattgaagtctttaaaccaatagatgaagtagtaaagatatactgttgtggtgtaactgtttatgatttatgtcatcttgggcatgcaagaagttatatagcttgggatatcctgagaaggttcttaatttatagtgattacaaagttaagtatgtgcagaattttacagatatcgacgataagattttaaaaagagcaaaagaagaaaatagctctatgaatgaggtctcagaaaaaaatattactgaattccataaggacatggatgccctaggaattatgaggccggatagcatgccaaaagctacaaatcatatttgcaatatttgttcatttataaaagttcttgaagataaaggttttgcatatgccagaggtggagacgtttattattctgtttttaaaaataaaaattatggaaaactgagtaatcaaaatatcctagagcaaaatataaatcaacagggcaggattactacagatgaaagtaataaaaaagaaaatccccaagattttgctctatggaaaaaagcaaaagagaatgaaccatcttttgattcgccttgggggaaaggtagaccgggatggcatattgaatgttctgcaatggtaaaagatgaattaggagaaacaattgatatccatttaggaggttctgatcttatttttcctcaccagaaaagagatgcac

SEQ ID NO: 299424 - DNA, 740 bp, Unknown
  Bacterial polypeptide expressing nucleotide sequence isolated from the Sargasso Sea
ttggcatttagaatgttcagtaatgtcaaaaaagtatttaggtaatacttttgatattcatggtggtggaagagatttaatttttccacatcacgaaaatgaaatagcccaatctatttgtgcaaacaaaacaaaaaaatttgctaattattgggttcacaatggttttattactatgtcgaaagagaaaatggcaaaatcacaaggtaatattttaaaaattagtgattttaaaaataaatataatggacaagttttaagactagcattaatgagtgcacattacacacaaccattagattggaatgataaacttatgaatgaatgccaaaaaacaattaacaagtggtatgattgttatgtatcggttaataaaaaaatcttaattaaagatgacgatcttcagccgttatatgatgacttaaacacacctggttatctagccaatttgcataaactttacgataaagcaaaagatggcaataaaacagacaaagaagtatttactacagcatgtaatttcattggtcttttaaaagaacccaaggataattggattaactttaaaaaagaaatgctttcattatcagaaaaagaaatcttaattaaaattaaagaaagaaataaagcaagagaagataaaaattataaattagcagataaaattagagatgatttgttggataaaggtattttaattgaagacaaagatggtaaaacaatctggaaaattaaatgag

SEQ ID NO: 299425 - DNA, 608 bp, Unknown
  Bacterial polypeptide expressing nucleotide sequence isolated from the Sargasso Sea
aatgaacaaagatatttttttaacaaatagctatggcggtaaaaaagataaatttaagccgatagacgaaaataatattaaaatgtatgtttgtggcccaacagtctatgatgatccacatataggtaacgcaagaccattagttgtatttgatattctttataaagttttaaaatgtaaatatggtaaaaatagagttacttatgtcaggaatataactgatattgatgataaaataatccagtcttcaaaagacaaaaaaatttcaatagctgaattaacaaataaaataaatacaaattttcaagaagattgtaattacctaaattgtgaaacaccaaattttcaacctaaagcaacagaaaatataaatgaaatggttgaaatgatcagtagtttaatcaaaaaaggttttgcttatgagagcaagaaacatatttattttgaagtaaaaaaatttaatgattatggaaaattatcaaataaaaaaattgaagatttaatatctggatctagagtagatgtatcaagtaataagaaaaatccagaagattttgttttatggaaaccatctagtgaagatgagcctagtttgggcatctcctggg

SEQ ID NO: 299426 - DNA, 964 bp, Unknown
  Bacterial polypeptide expressing nucleotide sequence isolated from the Sargasso Sea
aaagaaaattttaaacctgtagatgaaagccatgtaagagtctatgcatgtggaccaacagtttataattttgcccatattggtaatgcgagaatggcagttgtgaatgatcttctaataaatgttttgcgaacacaatataaaaaagtaacctatgtttctaacattacagatattgatgataaaattatagaagcagctcatgatctcaatgagcctattgaaaacttaactaaaaaatatacaaaaatttataacgaagatatgagttatcttaatgtgcaacttcctgatgttcagccgcgagctactgatcacattaaagaaatgatagatcttatttcaaaattaataaagagcggtaacgcatacgaaaaaaacggtcatgtgttattttatgttccaagcttttcaaaatatggcattctatctaaaagaaacagagatgaacaaattgctggaagtagagttgaagtggcgccttttaaaaaagatccagctgattttattttgtggaaaccatcacctgatccaatgccaggctgggaatcaccttggggatttggtcgacccggttggcacctagaatgttcagctatgtctgaaaaaacactaggacttccttttgacattcatagtggtggaatggatttagtttttccccatcatgagaatgaaattgcccaaacttgttcattacataacaatcatgaccctgatagttttgcacacttttggtttcataatggatttgtaaatgttgagggagagaaaatgtcaaaatcaattggcaatattcgattagttcatgatttaaaaaatcagtacaatggggaggtattaagattaactcttttatcagctcattacagacagccactaaactggactaaagaaataatagatcaaaatagtaaaatgttggatcgtctttatcgctgtctaaaagaccttcaagatatag

SEQ ID NO: 299427 - DNA, 766 bp, Unknown
  Bacterial polypeptide expressing nucleotide sequence isolated from the Sargasso Sea
aacatatgtttctaatattacagatatagacgataaaattattgcagcatcagaagaaaaaaatattcctataaaagaactaacaacaaaatttacaaatatttataatgaagatatgtctgtgctcggagtaagtctacctgatattcaaccaaaagccaccgatcacataaatgaaatgatagaattaataaaattattaatccaaaataattttgcttatgaaaaaaaaggtcatgtattatttgatgtgcctaaatttaaacattacggatctttatctggacgtaacagagatgaacaaattgtaggaagcagagttgaggtcgctccttacaaaaaagatccaactgattttgtattatggaaacctagtccttctccaaagcctggttgggaatctccttggggttttggcaggcctggctggcatttagaatgttctgcaatgtctgaaaaaacattgggacttccttttgacatacatagtggaggtgctgatttaatttttcctcaccatgaaaatgaaattgcccagacatgtgcagctcataataatactcatgacttaaaatcttttgcaaaatactggttccacaatggatttgtgaatgtagaaggagaaaaaatgtccaaatcaattggcaatattcatcttgttaatgaattgaataaagaattcaaaggagaagtattaagacttactcttatttctgcgcattacagacagacactaaactggactaaaaatattataaaacaaaat

SEQ ID NO: 299428 - DNA, 977 bp, Unknown
  Bacterial polypeptide expressing nucleotide sequence isolated from the Sargasso Sea
tttaagaagcatcgattacgaggtccaatatataagaaacatcactgatgtagacgataagattattgcgagggcaaaagagttaaatataactccatcagaattaacagaagagtgtatagactcaatggaaaaggattttcactcattaggaatgattaggcccgatgcagaaccgagggctacggagaatattgactctattatttccctgattacaaaacttatagataaaggtcatgcttatgtaggtgaatctgatgtctacttttcaactgagtcttttaatgaatatggaaagcttagtaaaagaaaattaaaagacatgctgtctggggccagaattgatattgatctagataagaaaaatcctgctgactttgttttatggaagaaggatactgagggattgaaatgggactcgccttggggaccgggacgaccgggttggcacatagaatgctcagcaatgagcatggatgctttgggagaaacctttgatatccatggtggaggttcagatcttaagtttcctcatcatgaaaatgaaatagctcaatcggaatgtgtaactggcaaagagttcgcaaaagtatggatgcacaccggctccttaaggattgatgatcagaaaatgtcgaaatctctcaaaaacttcataacaataaaggaagccatcaatgagaatgcaccggaagttctccgttttttcttaatttctagtcactatcgtagtccattaaattactctgatgaggcattgaaggaagcaaagaattctcttgatcgtctatacaactcattacaagacctttcttatgaaaccgataagcatcttccttcggaatattcagagaaatttcatgaagcaatgaaggatgactttaactctccgtcagctatatctgtcttgtttgaaatagtaaaaacaataaacattctaaagaaagaggataagttaactcaagccagcatct

SEQ ID NO: 299429 - DNA, 889 bp, Unknown
  Bacterial polypeptide expressing nucleotide sequence isolated from the Sargasso Sea
ggaagaacagatagcgggtagcagagtagaagtagcaccttttaaaaaagacccagcagattttattttatggaaaccaagtgatgatacacaacccgggtgggattctccatgggggattggaagaccaggatggcatacagagtgctcagctatgtctgaaaaaacacttggattgccatttgatatacatggaggaggaagagacttaatctttcctcatcatgaaaatgaaattgcacaaagctgctgctcttcagcaagtatcgatgatccaacttcttatgctagatattggatgcacaatggatttgttacgattgatggagaaaaaatgtctaaatctctagggaatattattttagtaaaagacttaattgaagatcaccatggagaggttattaggctagcacttttatcatctcactacagacaaggacttgattggaatgaaaaaataatccatcaatctaaaaaactattagataaactttatgccattcttaaagatttagaaaatactaatcaagatgattcaattcaatcaaacaaagatgtaattggaccattgatggacgatttaaatacacccggcttaattgcagaattaaataaaatagttaaagaatttagcacgataaaagatgatgaaaagccagccgctaaatcaaaattaatctttattggatcgatacttggaatccttggagataaaaattttaatcatgtttctgatgagtttaaaaataaaatagaagaactaattcaaaaaagaacagaagctaagcaggataaaagttttgataaagcagataaaataagacaagaactactagacctaggggttgaaataaaggatagcagcgacggaactagttggaacccttaa

SEQ ID NO: 299430 - DNA, 745 bp, Unknown
  Bacterial polypeptide expressing nucleotide sequence isolated from the Sargasso Sea
atgggcaaattaaaacttcacaatactcttggtaataaagttgaagagtttattccaatcgataaaaataatataagaatatatgcttgtggtccaactgtttacaactatgcacatattggcaatgcgcgcatggcagttgttaacgatttattggttcgttttcttagaacaatatatccaaaagtaacatatgtttctaatattacagatatagacgataaaattattgcagcatcagaagaaaaaaatattcctataaaagaactgacaacaaaatttgcaaatatttataatgaagatatgtctgtgctcggagtaagtctacctgacattcaaccaaaagccaccgatcatattaatgaaatgatagaattaataaatttattaatccaaaataattttgcttatgaaaaagaaggtcatgtattatttgatgtacctaaatttaaacattacggatctttatctggacgtaacagagatgaacaaattgtaggaagtagagttgaggtcgctccttacaaaaaagatccaactgattttgtattatggaaacctagtcctgctccaaagcctggctgggaatctccttggggttttggcaggcctggttggcatttagaatgttctgcaatgtctgaaaaaacattaggacttccttttgatatacatagtggaggtgcagatttaatttttcctcaccatgaaaatgaaattgccctagacatgtgcagctcataat

SEQ ID NO: 299431 - DNA, 1177 bp, Unknown
  Bacterial polypeptide expressing nucleotide sequence isolated from the Sargasso Sea
atgaataaagatattctcttatctaactctttaagtaacaaaaaagaaatatttgtacctattgatgacaaaaaaattagaatgtatgtttgtggtccaacagtttatgatgacccacatattggaaacgcgagacctttagtaatttttgatattttatttaaagtgctaaaatgtaagtatggtaacaaaaacgtaacctatgtcagaaacatcacagatattgatgataaaataatagaagcatcaaaaaataaaaaaatatcaattaaagatctttctcaggatattacaaagagatttcataaggattgtgaatacttaaattgtgataaaccaacttttgagcctagagcgacagataatattgctttaatgataaatatggttgaaaatttaattgagaaaaaatttgcatatgaaagtaatagacacgtttattttgaagttagtaattttaaagattatggaaaattgtcaaataaaaagcaagaggaattaattgcagggtcaagagttgaggagtctgagaataaaaaaaaacaagaagactttgttctatggaaaccttcaaaaaaagacgaacctggttgggagtctccttggggaagaggacgtccgggttggcatttagaatgttcagtaatgtccaaaaaatatcttggtgataagtttgatattcatggaggaggaagagatttaatatttccgcatcacgaaaatgaaattgcccaatcgcgttgtgctaatgaaactgatgttttttcaaattattgggtacataatggatttattaccttatcaaacgaaaaaatggcaaaatcacagggcaatattttaaagataagcgactttaaaaagaatgttaatggccaagctctaagactagctttaattagcgcacagtatagacagcctctagattggaacgataaacttttagatgaaagtcaaaagacgatagataaatggtacaaaagttatgttggattagataagcctaaacaaatttccgatgatgatcttttacctttgtatgatgatttaaatacacctaagtatattgctaatcttcataaattatttgaaaaatctcaatcagggaatcttgaggataaaaagatatttgtctcagcttgtaattttattggtttaataactgaaactaaagataaat

SEQ ID NO: 299432 - DNA, 968 bp, Unknown
  Bacterial polypeptide expressing nucleotide sequence isolated from the Sargasso Sea
tatgcaaatttttttaacaaataatttaagtaataaaaaagaacattttgttcctaaagaaaaaaaaaatgttggaatgtatgtttgtggacctacagtttatgatgatccccacataggaaatgcaagacccttaataatttttgatattttatttaaattattaaaaaatgaatttcccttggtaacatatgtaagaaatataactgatattgatgacaaaataattaagtcctcacaagagcaaaaaatttcaacaaaagaacttacagaaaaagtaacctcaagttttttaaaagattgtgagtttttgaattgtgaaaatcccactcaccagccaaaagcaactgagcatattgatttgatgatagagatgataaacggtttaattaaaaagggattcgcatacgaaaataaaaatcatgtttattttgaggttaaaaaattttcagattatggaaaattatcaaataaaaatttggaagatttagttgctggatctagagtagaaattagtgaaaataaaaagaattcagaagactttgttttatggaaaccatcaaataataatgaacccgcttgggactcaccttggggcaaaggcagaccaggttggcatttagagtgttcagcaatgtcaaaaaaattcttaggcaaagaatttgatattcacggtggaggtatagacctaatttttccccatcatgaaaatgaaatagcccaatctagatgtgccaatgatacaaaagtttttgcaaattattgggttcacaacgcatttattactatgtctaatgaaaaaatggctaagtcacaaggtaacattcttaagataaaagattttagaaataagattagtggccaaataatcagattagctttaattagtgcacattataaacaaccattagattggaacgacaaattattaagtgattgtgaaagtactttagataaatggtataaag

SEQ ID NO: 299433 - DNA, 1009 bp, Unknown
  Bacterial polypeptide expressing nucleotide sequence isolated from the Sargasso Sea
ttgataaactcggtgtcaaaaaataatgcatatgtattagatgatggagaagttcttttttcagtaaattcatttgataattatggttctctgtcacgtcaaaatttaaattcaatgaatgttggtaatagagttgaaatagacaaaagaaaaaaaaatcctttagattttgttctttggaaaccagctgataaaaataatattggttggaatagcccttggggttatggtcggcctggatggcatattgaatgctctgcgatgtgcaaagaattacttggtggaagttttgatattcatggtggtggtattgatctattatttcctcatcatgaaaatgaattagctcaaagtgtttgtgccaacgacacaaagcaattagcaaattattgggtacataatggatttgttaacattgaaggacaaaaaatgtctaaatctttaggtaattatttaactgtcgaggatttaaggaaaaaagatatttatggagctgtgatacgatttgttttattatccacgcattatagacagccattagattggacaaatcgtaaggtttctgaagcacaaaatatcttaacaaagtggttaagtttgtttgataaaaaagatgtcccaattcatggaaaacccacaaagaaaattttggaagcactatgtgatgatttaaattcaccactagttttaactgaaatgcataacttattaaaaattgaggatttagatggtttcataaattccatggtttttttaggctttactcctaatgagttaaataagaaaagtaatacaaaaaatgaatttgacaataatattattcatgaattgataaatgatttaatccttgcaagacaaactgctagagataataaagattacagaaagtctgatgaaataaggattaggcttgaaaaagcaggagtaagtattaatgatcttggaaaaaatacaaaatggacacttaaaccattttttaatcccaaaaaacttttagaggaaaactgat

SEQ ID NO: 299434 - DNA, 1277 bp, Unknown
  Bacterial polypeptide expressing nucleotide sequence isolated from the Sargasso Sea
gtatgtatgcggcccaacagtttatgactttccacatataggtaacgcaagacccttagttgtgttcgatgttttgtatagagttttgtctaaaatttttggaaaaaataacattacatatgtcagaaatataactgacatagatgacaaaattattgaaagttcaaaaaataaaaaaatatctttagacgaactaacatcatcaattacaaaaagttttcacgatgattgtcagtatttaaattgtttaaaaccaagttttgaaccaaaagctactgaacacattaaaggaatgattaacatgaccgaaaatcttttaaaaaataatcatgcttatgagaaagataaacacgtatatttttcaataaattcatttaaaaattacggcaagttatcaaaaaaaaatcctgatgaattagttgcgggagcaagagttgaggtttcaaaatcaaaaaaacatcctcttgacttcgttctttggaaaccatccgcaacggatgatccgggttgggattctccatggggaagaggaagacccggatggcacttagaatgttcagtaatgagtgaaaaattccttgggaaaaattttgatattcacggcggtggattagatcttgtttttccacaccatgaaaatgaaatcgcacaatcatgttgcgctaataaagttgaaaaatttgcaaactattggttacacaatggctatgttacctttaataaagaaaagatgtcaaaatctttaggaaatattgtaacaattaaagaaatgagggggacaatttcaggacaagttatcagacttgccttgctgagtagtcactacaaacaacctttggactggaatgaaaaattaattaatgaaagccaaagtacccttgataaatggtatactcaatttgaaaagactaacaaagaagagcttaatgaagatttattacagccccttttagaagatataaatacacctggatacatatcaaaactacattcactttatgacaaagcttctaagggagataaatcttcaaaaaaaatttttcttgccggatgtaaactcataggtttgttagaagaagatctagaaatttggaaaaaattcaaaaaaacaaaatcaaaaattgatgaaaaaactattaaaataaaaattaaaaacagggagaacgccagaaaaaaaggtgattacaaatcagcagataatataaggaaggaactggaaaataatggtgttatcattgaagataaaggtgatacaacaacatggaaatacaaatgaa

SEQ ID NO: 299435 - DNA, 1087 bp, Unknown
  Bacterial polypeptide expressing nucleotide sequence isolated from the Sargasso Sea
tcagttgcatatgaagaagatatgaaaaacctgggtattattgaaccaacattcatacctaaagttactgaaaatattccttctattattagtatgattaaaaaattagagaaattaaaccatgcttatgtctcaaataatcacgtattgtttgatgtagagtcttttccaaaatacggagaattatcaaagcttaatcaaaaagacttaatagcaggtgctagaatagaagtagcaccgtacaagaaaaacccgtcagactttgttttatggaagccatctgataatgacactcctggatgggacagcccttggggcagaggaagacctggatggcatatagagtgctcagcaatgattaaaaagtttcttggtaattcgatagatattcatggaggaggtcaagatcttgtctttcctcatcatgaaaatgaaaatgctcagagtaaatgtgctaataatagtattcttgctaactactgggtgcataatggttttgttacattcaacaaaaagaaaatgtcaaaatctttaaataatattatcatattaaatgatttaataaaaaaatttcggggagagtcaatcaggtttgctttaatttctgctcattacagacaaccactagattggaacgaatcaacaatgattaattcagaaaattctctaaataatttatattccacccttttagaaaatattgatataaaagcaaaaaaatcaaaacaaacaaatgttgaaaaagctttattaaatgaccttaatacacctgaagcaatagcgagtctctatggcacagtaaaagaccttcaacaagcaaaaaaaaatagtctaaaatctgaaatcaaaggaatattgttacgagagtcctatttccttggaatccttcagaaagacccttttgaatggttaaaaaaacccgataataatactcttagtgataatgagattaaaaagcttattgaagaaaggtctttagcaagaaaaaataaaaactttaaagaagctgatagaataagaaataatcttttacatcatggcatttcaataaaagatgaaaaagatgagacaatttgggaaaaataat

SEQ ID NO: 299436 - DNA, 701 bp, Unknown
  Bacterial polypeptide expressing nucleotide sequence isolated from the Sargasso Sea
tatgagtttagatatttttttaacaaataatcttactaatagaaaagaaaaatttattcctcaagataaaaacaatgtaagaatgtatgtttgtggtccaacggtttatgacgatccacatattggcaatgctagaccagtagttatatttgatattcttttcaaagttttgaaaaatgaatatccaaaagtaacatatgtaagaaatatcactgatgtcgacgataaaataataaaatcatcacaggaaaataatatttcaattttagatcttacaaaaaaaatcactcaaagctttaacgaagattgtatttatctaaattgtgaaaatccaaatcaccaacctaaagcgactgagcatatttctgagatgatagaaatgatttctgaattaattaaaaaaggatttgcatacgaaaataagaagcatgtttattttgaagtcaaaaaatttaaagattatggacagttatcaaataaaaaattagatgaattggttgctggatcaagaattgaagtaagtgataataaaaaaaatcctgaagattttgttctgtggaaaccatcacaactagaagaaccatcttgggattcaccttggggaaaaggaagaccaggttggcatttagaatgctcagctatgtcaaaaaaatatttaggaaaagaatttgatattcatggaggaggtattgatttgttat

SEQ ID NO: 299437 - DNA, 1381 bp, Unknown
  Bacterial polypeptide expressing nucleotide sequence isolated from the Sargasso Sea
aatggccattaaattattcaatactttatcaaagcagaaggaaacttttataccacaagatcctaaaaaagttacgatgtatgtttgcggaccaacagtgtatagtcatcctcatattggtaacgctagggctgcactaattcctgatatcctttaccgattactacttttatattatcctggtgatgttgtgtacattaggaatataactgatgtagatgataaaattctcaaagctgcgaatgaacaaggcgtaaaaccgacggaaatatccgagaaatttactgatgtttatttaaataacatggcccagttaaatattcttcatccaacacatcaacccaaagttactgagtttatggatagcattatctcaatgattcataaaattattgattcagggcatggttatgttgaaaacaatcatgtactttttaatacagaaaaagataataattatggatgtctatcaagaaaaaaactggatgaaatgatagatggcgctagggtagaggttgcagaatataaaaagtctcctcgagattttgttttatggaaaccatccgataacgatagttttggctgggatagtccctggggatatggaagacccggatggcatatcgaatgtacttctatgataaaaaaaattattggagatcattgcactttagatatacatggtggtggtaatgacttgatattccctcatcatgaaaatgagatagcacaaggatcatgcatttcaactagcaaatattgcaactattggtttcacaatggtattgtgcttgttaataaaaagaaaatgtcgaaatcattagggaatgtcattctattagatgatttgcttaaagagcataactcgtctgtgattcgtttagctttactatctgcacattatagacaaccgcttaattggacagaacaaactattatcaatgcgaaaaatctgtataaaaaattagtatcagcagttgatgctagtgatattctgacatcatctgatttactgacatctgctgagcttcatgggccttttccacaatgtgctgaaattcaagatatactctctgacgatttaaatacacctgaagtaattaattatctctctagattagcaaagacagctcgaaataatactgatgatgcgttgaaactagcacaatcgatgaaatttattggattagatttggtaaaaccctcttacaaaacatctctagacgataaatacataattaatctcataaagcaaagagacgaatatagaattaaaaaagactttggaagtgccgacgaagtaagagacaaacttttagacatgggtatagaattgagagattcagatggcaaaacaacttggaagtatactgaggattaa

SEQ ID NO: 299438 - DNA, 745 bp, Unknown
  Bacterial polypeptide expressing nucleotide sequence isolated from the Sargasso Sea
acctggttggcatttagagtgttctgtaatgtcaaaaaaatatttaggtgacaattttgatattcacggaggcggtagagatttaatttttcctcatcatgaaaatgaaatcgctcaatcaagatgtgctaacgaaagtaaatcattttcgaattattgggtccacaacggatttattacaatttcaaatgaaaaaatggctaagtcacaaggaaatatattaaagatcaaagatttctatcaaaaatacaatggtcaggttttaagattagcgttaatgtctactcattataagcaagcaatggattggaatgaggacttgttaattcagtcagaaaagattctagacaaatggtatgaatttaaaaaaaacacaaaaggtaaagttttaataccagaagaagatttaagcccactatatgatgatcttaatacacctggatatattgctaatattcataaactttatgaaaaagcatttaaaggatctgataaagataaagaaatttttacaaccgcatgtaattttgttggactcctgacagaaacaaaatcacagtggcttgaattcaaaaaggacagattaaaaatttcagagtcagacatacttcaaaaaataaaagagagaaatttagctagagataataaaaattacgaattagctgataaaattcgaaatgatcttttagataaaggtattttaattgaggataaagatgataaaacaacttggaaaataaaatga

SEQ ID NO: 299439 - DNA, 1384 bp, Unknown
  Bacterial polypeptide expressing nucleotide sequence isolated from the Sargasso Sea
aatggcattacaaatacaaaacacattaagtggaagaaaagaaatttttaaacctgttgatccttcgcatgttagaatttatgcatgtggtccaactgtttataattttgctcatattggtaatgctcgaatggcagttgttaatgatttattagttcgtgttttaaaaacacaatttaaaaaagttacttatgtttcaaacataactgatattgatgataaaattatagaagcttcgaaagaaacaggtgaagacattaatgtcattacttccaaatatactgagatttataataacgacatgggagccttaggagtaaatcttccagatattcaaccaagggcaactgatcatataaaagaaatgattgagttaatccaaaaattaattgatgaaaataaagcctatgaaaaagatggtcatgtattgtttcatgtgccaagttttgaaaaatatggagttttatctaaaagaaatagagacgaacaaatagctgggagccgggttgaagttgctccttttaaaaaagatccggctgattttgtattatggaaaccatcaccatcgccacttcctggttggaaatcaccttgggggtttggtagaccgggttggcatctagagtgttctgtgatgtctgaaaaatcactaggtttgccatttgatattcacagtggaggtattgatttagtatttcctcatcatgaaaatgaaattgcacaaacttgttctatatcaacaaataaagatcctaaagattttgctgcttactggtttcacaatggttttgttaatgttgagggtgaaaaaatgtcaaaatccattggcaacattcgattagttcatgaacttaataaaaaatataaaggtgaagttttacgtttaacattactatcagcacattataaacaaccactaaactggacggaagaaatcattgaacaaaatagtaagatgcttgatcgtttatatagagttcttttggaattatctgacataaatatagatcctgatttgccttctaattctataatggagacctttttagacgacttaaatactccaaaagtaattgctaaacttaatgaagaagctaatagtgtctcatcagcttctgatagtaaaagggttgatattaaaaaaaatcttttatcaactggaaaaattttagggatattagaaaatgagccagaaaattggcttggatataatcaaaatagtggtgataatagtgaagaaattgaaaggttgataaatgagcgtaatgaagctagacgcagtaaaaattttagtttggcagatactataagagatacattgagagaaaaaggtatagaaatagaggatactgataagggaacaatttggcgaaaatctagatga

SEQ ID NO: 299440 - DNA, 1387 bp, Unknown
  Bacterial polypeptide expressing nucleotide sequence isolated from the Sargasso Sea
atgatattaaaactttacaattcaactacatcacaaaaagaagattttaaatcaatatcaccaaatatagtatcgatgtattgttgtggtccaaccgtatatgatgctcctcatttaggcaattttagaacttttgttttttacgatctggtaaaacgcgtattaattcaaaatggatttgaagtaaatcaagtaattaatattacagatattgatgataagataattgataaagtaaatagtggagcaataggatataaagaactaactgctaaatttaatgacatgtttttacaacattcgttgtctttaaatatccaagaagctaatcaatatccaaaaacatccgatcatgttgaagcaatgattggttttattaaggcattgattgataaagaatatgcttacaatgtggatgggaatatattttttgatacagaaaagtatagcaaatacggaaaatttgtaaatatagagaatatagatagattagaatctgaagatgatggtctaggtaagaagaatcaaaaagattttgcattatggaagacttggaaagaagaagatggcgatattacatgggaatcagaatggggaaagggaaggccagcttggcatactgaatgtgccgtattggctacacaatcacttggaaagacaattgatattcattgtggtggtgttgatttaaaatttcctcatcatgaaaatgaatctgcacaagtagaagcgcttttagatagcgttttttcaaattattggcttcattcagaacatttgatactagaagaagaaaaaatgagcaaatcattaggaaacattttaaatattggtgatttattaaatcaatattctgcagaaacaataagattatttttattgtcatcacattatagatcaaaaatatacttttctgatgaaaagctaagcgattcttctaaaatgattgataaaattaatcgttttgttaaatctgttgggttggatactttaaatcataatggcgacacaaatccttcaggtgattatttaagatttgtagaatctttaaatgatgatttgaatacaccagaagcattaggaatattttttgattttattaataaaaaaaataagaaaattcatgaagattcattatctgaagaagatatagaagaatcaaaaaaatttattttaggttttaattcaatttttcaaattatacatccatctgttttaatcgatgaagaagttcctggagaagtgcagaatttagcctttctcagagaagaaatgagagataaaaagaattggaaagaagcagatagattaagagaagaaatcgaaaaaatgggttggttaattgaagactcagaatcctctcagaaactcgtcagaaagaaataat

SEQ ID NO: 299441 - DNA, 1363 bp, Unknown
  Bacterial polypeptide expressing nucleotide sequence isolated from the Sargasso Sea
atgagcaaagatatatttttaactaattcttttggaaacaaaaaagagaaatttattccaattaattcaaaaaggattggaatgtatgtatgtggaccaacggtatatgacgatccacatattggtaacgcaagacctttagtagtttttgatattttatttaaaattctcaaatctaaatttaataatagtgaagttaaatatgtaagaaatattactgatgtggatgacaagataataacctcatcaaaagaaaaaaaaatatcaatttcagaactaacacaatcaattacagccaatttccataaagattgtgaatatttattttgccaaaaaccaactgaagaaccaaaagcaacagaaaatatcaatttaatgatcgaaatgatttctgatttaatttctaagaaatttgcttatgaaaataacaatcatgtatattttgaggtaaaaaaattttctgattatggaaaattatcaaataagaatttagatgatttaattgctggctcaagggtagaagtctcagagaataaaaaaaacgctgcagattttgttttatggaaaccatctaaaaatgatgaaccttcatggccgtcaccatggggtaaaggtaggcctggttggcatttagaatgctctgttatgtcgaaaaaatatttagaaaaagaatttgatattcatggtggcggaagagacttaatattccctcaccatgaaaatgaaattgctcagtctagatgtgctaatgaaactaaaactttcgcaaaatactggctacataacggatttataacaatgtctaacgaaaagatggcaaaatcacagggtaatattttaaaaattaaagactttaaaaataagatcagtggacaagttttaagattagctttaattaatactcactatagacagcctctagactggagtgatgaattgattaatagctgtcaaaatactttagataaatggtacactgtttataccaaaactaatcaattaaattcaataccagaagatattttagaacctttgttagatgatattaatactccaggttacatagccaaattacacgagctttattctttagctgtaaaaggaaaggagactgataaaattttatttaatcaagcatgtaatttcatcggactattattagaagataataataaatggaactcatacaagaaaaaaaatataaaaatttcagaaaaagaaatattaagtaaaattaaagagagaaataatgcaagaaaaaataaagaatttgatttagctgataaaatcagaaatgaattgtctgaaaatggtattttaattgaggacaaagatgatacaacaatttggaaatacaaatgag

SEQ ID NO: 299442 - DNA, 1363 bp, Unknown
  Bacterial polypeptide expressing nucleotide sequence isolated from the Sargasso Sea
aatgaataaagatatttttttgacaaatagcctaggaaacaaaaaggaaaaatttgttcctattaacaaaaataaaataggaatgtacgtatgtggaccaactgtttacgacgatccacacataggtaatgctagacctttagtagtttttgatattttatataaagttttaaaatgtaattacggaagcaaatcagtctcttatgtgcgaaatataaccgatgttgacgataaaattattcaatcatctcttgaaaaaaaaatatctattgaagatctaacaaaagaagtaacaacaaactatcatagcgattgtgtttatttaaaatgtgaaaaaccaaatgaagaaccaaaggctactgaaaatatttcacttatggtgaaaatgactgaagagctgatcaaaaaaaactttgcttacataaataataatcatgtttattttgaagttaaaaaatttaaagattatggaaaactttcaaataaaaacttggatgaattaatagccggttccagagttgaaatatcagaaaataagaaaaatcctgaggatttcgttttatggaaaccatctaaagaaaatgaaccatcttgggattctccgtggggcaaaggtaggcccgggtggcatttagaatgttctgtgatggcaaaaaaatatcttggaacgaaatttgatatccatggtggaggaagagatttaatatttcctcaccatgaaaatgaaattgctcaatcgagatgtgctaatgatactgatgtgtttgcaaattattggttacacaatggattcatcacaatttcaaatgagaaaatggcaaaatcacaaggcaatattttaaaaattaaagatcttaaaaaaaatatcaatggtcaagttttaagactagccttgataagtgctcattacaaacagcctttagattggaatgataagttactcaaagaatgtcaaaaaactttaaacaagtggtacgactgttatgttgaggtaaaaaagaaaattttaatcccagaaaaatttctagaacctctttacgacgatttaaatacacctggctacatatcaaatattcataaactgtatgataaggcacaaaatggaaccatagaagataaagaaatttttaataccgcatgtaattttattgggttgctgacagatacaaaagatcaatggttaaaatttaaaaaggaacaatcaaatataactgaagatgaaatattatctaaaattaaagaacgtgataaagcaagaaaaaataaagattataaactttcagacaaaattagaaatgagttattaaacaaaggtgttttaatagaagataaagatggtaaaaccacatggaaattaaaatga

SEQ ID NO: 299443 - DNA, 727 bp, Unknown
  Bacterial polypeptide expressing nucleotide sequence isolated from the Sargasso Sea
aatggataaagatatttttttaacaaacagtcttggcagcaaaaaagaaaagtttagtccaattaacccaaagaaaattggaatgtatgtttgtggacctactgtttatgataatccacatataggcaatgcaagacctctgattgtatttgatattttatttaaagttttaaaatgtaaatatggaaataattctgtaacttacgtaagaaatattacagatattgatgacaaaataattcaatcttctttagaaaaaaaaatatccattagtgatctaacatatgaaattaccaaaacttttcatgatgactgtgaatatttacattgtgaagttccttctcatgaaccaaaagctactgaaaatatttctttaatgattgaaatgattagtaagttagtaaaaaataataaagcttacgaaagcaaccagcatgtttattttgatataaataaatttaaagattatggaaaattatcaaataagaatctagatgaactaatttctggtgcacgtgttgagatatctaaaaataaaaaaaaccctgctgattttgtgttatggaaaccatcttctgtaaatgaaccttcttgggaatctccatggggaagaggtagaccgggctggcatcttgaatgttcagttatgtctaaaaaatatttgggtgacaaatttgatattcacggtggtggaatagatttaatatttccacatcatgaaaatgaa

SEQ ID NO: 299444 - DNA, 1363 bp, Unknown
  Bacterial polypeptide expressing nucleotide sequence isolated from the Sargasso Sea
atggataaagatatttttttaacaaatagcctcggtaatcaaaaagataagttcaaaccaattaatgaaaaagaaattggaatgtatgtttgtggacctactgtatatgataatcctcatataggaaatgcaagacctttaattgtatttgatattttatttaaagttttaaaatgtaaatatggaaataattctgtaacttatgtaagaaatattacagatattgatgacaaaataattaaatcttccttagaaaaaaaaatatctataaatgatctaacgaagggaattactaaaatttttcatgatgattgtaaatttttaaattgtgaagttccttctcatgaaccgaaagctactgaaaatatttctttaatgatcgaaatgattagtaagttaataaagaataataatgcttatgaaagcaatcatcatgtttactttgatgtaaataaatttaaagattatggaaaattatcaaataaaaatttagatgaattgatttctggtgcaagagttgagatatcagaaaataaaaaaaaccctgctgattttgtattatggaagccatcttctgaaaatgaaccttcatgggaatctccgtggggaagaggtagacctggatggcatcttgaatgttcagttatgtccaaaaaatttttgggagataagtttgatattcatggtggtggaatagatttaatttttcctcatcacgaaaacgaaattgcacaatctagatgtgctaatgaaaatgaaatatttgctaattattgggttcacaatgggtttataacaatttcaaatgaaaaaatgtcaaaatctcagggtaacgttttaacaattaatgatttaaaaaataaaattaatggtcaagtaataagactagctttaattagtgctcattataaacaaccgctagattggaatgaaaaacttttatctgaaagtgaaaagactattaacaaatggtatgaaagttatattgatttaaaaaaacaagtattaattccagaggattatctttcacctttatatgacgatttaaacacgcctggttatatagctaatcttcataaattgtttgaaaagtctcaaaaaggatcatcaaaggataaagaaatatttatgtcggcttgtaattttattggtttattaaatgaagataaagatacatgggaaaaatttaaacaaaataaatcaaaaatttctcaagaagaaattgaaagaaaaataaatgaaagaaatattgctaggaaaaacaaagattataaagcggcagacaacatcagaaatgaattgttagacaaaggagttttaattgaagacaaagatgataaaaccctgtggaaattaaaatgag

SEQ ID NO: 299445 - DNA, 949 bp, Unknown
  Bacterial polypeptide expressing nucleotide sequence isolated from the Sargasso Sea
aatgaataaagatatttttttatcaaatagccttggaggaaaaaaagagaaatttgttccaatagataaaaaaaaattaggcatgtatgtttgtgggcccaccgtttatgacgatcctcacattggaaatgccagacctttagttgtttttgatttattgtttaaagttcttaaatgtaaatacggaaataagtcagtaacttatgttagaaatataacagacatagatgataaaattattcaatcatcgaaggaaaaaaatatttcaataactgaattgacatcaagaattactaaaaaatttcatgatgattgtgaatatttaaattgtgaaataccaacacatgaacccaaggcaacagataatattgaagaaatgataaacatgataggagaattaatcaaaactcaatttgcttatgaaagtcatggtcacgtttattttaaagtaaaaaattttaaagactatggaaaactttctaataaaaatcttgatgatttaatagctgggtcaagagtagaattatccgataaaaaagaaaatcaagaggattttgttttatggaaaccatcaaaagatgatgagccatcatgggagtcaccttggggcaaaggtagacccggttggcatttagaatgctctgttatgtcaaaaaaatatttaggtaatacttttgatattcatggaggtggaagggacctaatatttcctcatcacgaaaacgaaattgctcagtcagtgtgtgcaaataaaacagaaaaatttgcaaactattgggttcacaataattttataactatgtcaaaagagaaaatggctaagtcacaaggtaatattttaaaaataagtgattttaaaaaaaaatataacggtcaagttttaagattagctttaattagtacgcattatagtcagccattagactggaatgaaaaacttatggatgaa

SEQ ID NO: 299446 - DNA, 982 bp, Unknown
  Bacterial polypeptide expressing nucleotide sequence isolated from the Sargasso Sea
aatgatagaaatgtcttcctctttaatttctaaaggttttgcttacgaaaataaaggtcacgtttatttttcagtaaattcatttaaaaattatggaaaattatcaaacaaaaatttagaggaattaaaagctggaagcagaatagaagtttcagatcttaaaaaaaaaccaattgattttgttttatggaagccctctagtaacgaggatccaggatgggattcaccgtggggaagagggagacctggctggcatttagaatgttcagttatgagtgaaaaatacctaggaaaaaattttgatattcatggcggaggtttagatttaatttttcctcatcatgaaaatgaaattgctcagtcctgtagcaacaattctagtgatagttttgcaaattattgggtccataatggatttgttacatttaataaagaaaagatgtctaaatctttaggtaatatagttacaatttctcaagccgtgaaaaaatattcaggggaagttgtaagattagctttattaagcgctcattatagtcagcctttagattggaatgatgaacttttgcaaaatcagaagaatacaattgataaatggtacaatctttatgaagaaacaaaagatcaagatattttagatatttcagaaacattattagatgatttaaatacaccaggttttattgctaaaatacatgaattatataataacgctaacaatggagataaaaaaagcaaatcattatttaataatgcgtgtagattaataggtttatttaatacaagtaaagaaaaatgggaaaatataaagaagtctaatattaaagtttcagaggattatatactaaagaaaattactgaaagaactaaagcaaaaaaagataaaaattttactttagcagatcaaataagaaaagatttattggataaaggcattttgatagaagatcaaaaagataaaacagtttggaaattaaaatga

SEQ ID NO: 299447 - DNA, 1003 bp, Unknown
  Bacterial polypeptide expressing nucleotide sequence isolated from the Sargasso Sea
tatgaagatctttaacagcctctcaggaaaaaaagaaacccttgtaccaattgaggataacaacattcgtatgtatgtctgtggaatgaccgtttacgatgatacacatataggacatgcccgaacttttgtttcattcgatttgattgttagatacttaagagatcttggttacgaagttcaatatattagaaatataactgacgttgatgacaagataataagcagagcaaaagagttaggatgggatccatctgacttagttaaaaaatatataagctctatggatgaagacttctctgctttggggatgattaaaccggatcaagaaccaagagctacagataatattgattctattatccgtcttatcgagattctcattgataaaggtcatgcttatgaaggtgaatcagacgtttatttttctacagagtcttttgagtcgtatggaaagctttctaaaagaaaggttgaagatatgctcgcaggggcaaggatagatgtagatctagacaaaaaaaatcctgcggattttgtcttgtggaagaaagatacggaaggccttaaatgggattctccttggggtcctggtcgacctggctggcatatagaatgctctgcaatgagcatggatgctcttggagagacctttgatattcatggtggaggttcagatctgaagtttccacatcacgaaaacgaaatagctcaatctgaatgtgtaactggaaaggagtttgcaaaagtttggatgcataccggatctttgaggattgataaagaaaagatgtctaagtctttaagaaacttcataactataaaagacgccctaaagcataacacctctgaagtattaagatttttcctgatttctagtcattacagaagccctttaaattattctgaagaaggactatcggaatccaagacttcacttgacagactttataatgcacttaaagatttaactcttgatgaaaacttggtctcaaaagagtaa

SEQ ID NO: 299448 - DNA, 788 bp, Unknown
  Bacterial polypeptide expressing nucleotide sequence isolated from the Sargasso Sea
gatgtcattacagttacaaaacacattaagtggtaaaaaagaattttttaaaccagttaatccaaatcatgtaagaatatatgcttgcggtccaactgtttacaattttgcgcacataggtaatgcgcgtatggcagttgtaaatgatttattagtccgtgtattaaaaacacaatttaaacaagtaacctatgtatctaatatcactgatattgatgacaagataatagaagcttctaaagaaacaggtgaggacattagtgttatcacaaataaatatacagagatttacaataatgacatgagtgcacttggcgttaatcttcccgatattcaaccaagggcaactgatcatattaaagaaatgatcgagttgataaaaaaattaattgatgaaaataaagcttatgaaaaagagggtcatgttttatttcatgtgccaagttttgataattatggaattctttcaaaaagaaatagagatgaacaaatagctggaagccgtgttgaagtagcgccgttcaaaaaagatccagcagattttattttatggaaaccatctccctcacctttacctggttgggattcaccttggggatttggaagaccaggatggcatttagagtgctcagttatgtcagaaaaatcattaggtcttccttttgatatccatagcggtggtattgacctggtgtttccgcatcatgaaaatgaaatagcacaaacttgttctatatctgaaaataaagatcctaaagattttgcaacttattggtttcataatggat

SEQ ID NO: 299449 - DNA, 1084 bp, Unknown
  Bacterial polypeptide expressing nucleotide sequence isolated from the Sargasso Sea
atgaataaacaattaaatatatttaatactctttcaggaaaaaaagaaaaatttatacctattaatacaggtaaggttgggatgtatgtgtgtggacctaccgtttacgattttccacatattggaaacgcacgaccacttgttgtttttgatgttctgtttagattgctaaaaaaactaaatggtaatgataaagttacttatgtgagaaatattactgatattgatgataaaattattgaagcctcaaaaaataaaaaaattccaatagataagcttacaaatgatattacaaaaaactttcatgaagattgtaaatatttaaattgtttaaaacctaattttgaaccgagagctaccgaacatattaaaggcatgattagtatgacagaaaatttattgaataataaacatgcctatgaaaaagataaacatgtatatttttcagtaaactcttttaaaaattatggaaagttatctaataagaaacctggtgagcttgatgcaggttcaagagtagagatttcaaaattaaaaaacaatccattagattttgttctttggaaaccatcttctacagatgatcctggctgggattctccatggggcaggggtagaccaggatggcatctcgaatgttcagttatgagtgaaaaatatttaggaaaaaattttgacattcatggaggcgggttagatcttgtatttcctcatcatgaaaatgaaatagctcagtcttgttgtgcaaacaaaacagataaatttgcaaactattggttacacaatggttatgttacttataataaagagaagatgtccaaatcattaggtaatatagtcactatgcaaaaaatgaaaaataaaattaatggtcaagttatacgtttggcattattgagctctcattacaaacaaccattagattggaacgaaaagttagttaatgaaagtcagagtaccctagataaatggtatagcttatacgaaccagttaaagaaagtaatttagatgaaaatttagtaggtccactcctagaggatttaaatacaccggggtttatttcaaaactacatttattataga

SEQ ID NO: 299450 - DNA, 889 bp, Unknown
  Bacterial polypeptide expressing nucleotide sequence isolated from the Sargasso Sea
aatggctgtgtccctgcggctcaccaacaccctcacccgccgcactgagccgttcactccgctgacgcctggcaaggccagcatctactgctgcggcgtgacggtctacgacctgtgccacctgggccatgcccgcagctacatcaactgggatgttctgcgtcgatttctgatctggcgggggcttgaggtgacctttgttcagaacttcaccgatatcgacgacaagatcctcaaacgggctgcggagcaaaacagctcgatgacggaagtgagcgagcgcaacatcgatgccttccatcaggacatggacgcccttggcatcctgcggcccgaccgcatgcctcgtgccacccagtgcctcgatggcatccgcgcactgatcggcgaactggaagcgaagggtgcggcctacagcgctgacggggatgtgtatttcgcggtgatgaagcacgccggctacggcaaactcagcggccgcgatctcagtgagcagcaggacaacgccgccggccgggttgccgatgcagaagaggcgcgcaagcagcacccctttgatttcgccctctggaaaggggccaaacccggagagcccagcttcccctccccctggggagaaggacgccccggctggcacatcgagtgctcagccatggtgcgagcggaattgggggacacgatcgacatccacctgggtggagccgacctggtctttccgcaccacgaaaacgaaatcgcccagtccgaggccgccacgggccaggagcttgcccgcgtctggatgcacaacggcatggtgaacgtcggcggccagaagatgagcaagtcgctcggcaacttcaccaccattcgtgctctgttggagagcggtgtgtctcccatgaccctg

SEQ ID NO: 299451 - DNA, 784 bp, Unknown
  Bacterial polypeptide expressing nucleotide sequence isolated from the Sargasso Sea
ggatgggacagtccatggggcaagggaaggcctggatggcatatagagtgttctgcaatgagtgaaaaattattaggtaaaacatttgatattcatggtggtgggcaagatttaattttcccacatcacgaaaatgaaatagctcaaagtgagtgtgcgaacggagaaaaatttgcaaattattgggttcataatggctttgtcacagtcgaaggaaataaaatggcaaaatctgatggaaattttgtaacggtaaatgaacttaaagaaaaatatcaaggagaggttattagatttaccatgatacttactcattatcgtcagccattgaattggacaaatgataatctgcaagagagtaaaaaaacactagataagtggtaccaatatttttctgaagttgattttaagcctgacttaagcacgaagattgatgaaaatgtaatgaacgcactaaatgatgacatgaatacgcctcaggcaatagctgaattgcataaattattcaaaaattgtaaaagtaccaatccagattcattaaataaatttttaatttcggctcaatttcttggattgatgaatgatgaaccttctcaatggttatcatggggtaaagataatataagtgtagatcaaaataagattgagtcattgattgctcaaagaaacactgcaagagtaaataaagatttttctgaagctgatagaattagagatgagttggaaaatctaggaatagtactagaagataaaggtacagaaaccacatggaaaactaaataaa

SEQ ID NO: 299452 - DNA, 1375 bp, Unknown
  Bacterial polypeptide expressing nucleotide sequence isolated from the Sargasso Sea
aatgagcttaaaattatataattcactttctagtaaaaaagaagtcttcaaatcaatttctgataaaaaagttaaaacttatggttgcggtccaacagtttataacgatcctcacataggaaattttagaacctttgtattttatgatttattaaacagagttcttcagttaaacggttatgagactgaaactgcagtgaatataactgatattgatgacaagattattgatagagttaatcaggaaaatacttcattaaaggaaataacttcaaaatatgaattatcatttctggaattgtcaaagtcattaaaaattttacctaacaatcataatccaagagcaacagagtatgtagaagaaatgatcgaattcattcaagctttgataaatcgagatttagcctatgaaatgaacggaaatattttttttgatatagaagcttatccaaaatatggaaaatttgtaaacattagcgatgaccttgaaacggaagataatgaattatcaaaaaaaaatcgtaatgattttacattatggaaggcaaaaaaggactcagatggtgatattttctggaacagtgagtggggtaaaggaaggcctggatggcataccgaatgcgctgtaatgatcaaaaccctttttgatggtcgtattgacatacattgtggaggaatagatcttaaatttcctcaccacgaaaatgagagtgctcaaattgaagcaattcaaaaacataatctttctaattactggcttcacgcagaacatttgaatatggacgatgtaaagatgagcaagtctttaggcaactttattgatgtaagcactttgatagaaaaaaatggttcggatgtagttagattgtttctactttctgctcattacagaactaaggtatctttcagtcaaaaaaaattagatgaatgcaaaaaaatgatcgaaaaaattaaaagatttgcaaaaaacttcaaaattgataacaaaaatattgaactaaaattttcaagtgaacatgaattattttttgatgctcttaatgatgatttaaatactccaggagcgattggagttttctttagttttatatcagaaatgaataaaaaaattgcagaaaatacaataaatgatgcagataaagaaaaatcattagtttttttaaaattatttaattcaatttttgatattttagattttaacaatttacatgatcaaaatattccaaaagagttacaagatttacttgtttctcgtcaagaagcaaggaaaaatctagattggaaattgtctgattcaattagagataaaattgagtctttaggctggcaggttgaagatacttccagcggacaaaatctctctaaaaagaaataa

SEQ ID NO: 299453 - DNA, 1333 bp, Unknown
  Bacterial polypeptide expressing nucleotide sequence isolated from the Sargasso Sea
atgttaaaaatttacaacactcttaccaaaaagaaagaatcatttgtaccaattgatgaaaataacgttaggtattattcatgtgggccaacggtctataacaatattcacattggaaatgctcgtgcttttgtctgtgctgatttgctagctaaggttttaaaaggaatatataaaaaagtgacatttgtatctaatattactgatatagatgacaagattattgaagcctcggtaaaagaaaaaatttctattaaagaattatctaaaagatattttgaacagtataaaaaagacacaaaatttttagggatagatgatcccgataatcaaccctttgctactgacttcataaaagaaatgatcgattttataaaggtcttaatagacaaagatgccgcatatgttgcaaatggaaatgtattatttcgagtaaagagcttcaaaaattatggaattttatcggaaagaatcattcaagaacaagattcaggttctcgagtcgatgtagaaacttataaagaagatccaaatgactttacactttggaagccctcaactgatgatgagccaggatgggattccccttggggtttaggacgccctggatggcatcttgagtgttcggttatgtcagaaatagtattaggtgtaccatttgatatacatggtggaggcaacgatttgaaattccctcatcatgataatgaaatagctcaaacatgtgcatatcacagcaacgaatcagcagaatcatttgcaaaatattggtttcataacggttttttaaatttagataatgaaaaaatgtcaaaatcactaggcaatgttgtttatatagatgatttaaaaaagaattttaaagggaatgagataagattagcattattatctacacactataggcagcccattccatggagcctggagttattggagcaatcaaaaaatatttatcaaaaactcaatcgtgaatttaaaaaatataatttaaaagaattgaagttttataaggattcaaaagtcggcaaagctttgcttgatgatttaaatacccctttggctattagagaaatgcaaagattagtaagctctaatgatagtgatttagaagaaaatatttctacctttaaatatatatttgaaggttctgatcaagatttatctatcgataaaaaattatccaatgaaattgaaaaattgattgaggagagaaataatgcaaggaataacaacgattatgaaaaagcagacaaaataagagataaacttagcgaaatgaatgtaaaaataaacgatgttaacggaaagacagaatgggaaatattgtagt

SEQ ID NO: 299454 - DNA, 1387 bp, Unknown
  Bacterial polypeptide expressing nucleotide sequence isolated from the Sargasso Sea
atggagccaatagtgcagtatttaaaaatatttaatacattaaatagtaaaaaagaaacatttaaagctattgattctaatcatgtaaaaatatatgcatgcggaccaactgtttataattatgctcatataggcaatgcgagaatggcagttgtttttgatacttttgtaaggacgctaaaggctgtttatccaaaagtaacttatgtatctaatattacagatattgacgataagataattgaagcagcaaaagaacaagaagttgaaatatctcaaataacagacaagtacacaaaaatttataatgaagatatggcaagacttaatgttttaccgccagatattcagcctaaagctacggaatttatccctgaaatgattaacttaattgaagatttgattagtaaagattttgcatatgaaaaagaaggacatgtcttatttcatgtacctttgtatttaaattatggaaaattatcaaatagaaatagggaagaacagatagcgggtagcagagtagaagtagcaccttttaaaaaagacccagcagattttattttatggaaaccaagcgatgatacacaacccgggtgggattctccatgggggattggtagaccaggatggcatacagaatgttcagctatgtctgaaaaaacacttgggttgccatttgatatacatggaggaggaagagacttaatctttcctcatcatgaaaatgaaattgcgcaaagctgctgctcttcggcaagtatcgatgatccaacttcttatgctagatattggatgcacaatggatttgttacgattgatggagaaaaaatgtctaaatctctaggtaatattattttagtaaaagacttaattgaagatcaccatggagaggttattaggctagcacttttatcatctcactacagacaaggacttgattggaatgaaaaaataatccatcaatctaaaaaactattagataaactttatgccattcttaaagatctagaaaatattaatcaagttgattcaattcaatcaaacaaagatgtaattggaccattaatggacgatttaaatacacctggcttaattgctgaattaaataaggtagttaaagaatttagcacgataaaagataatgaaaagccagctgttaaatcaaaattaatttttattggatcgatacttggaatccttggagataaaaattttaatcatgtttctgatgaatttaaaaataaaatagaagaactaattcaaaaaagaacagaagctaagcaggataaaaattttgataaagcagataaaataagacaagaactactagacctaggggttgaaataaaagatagtagcgacggaactagttggaaccttaaatagt

SEQ ID NO: 299455 - DNA, 1166 bp, Unknown
  Bacterial polypeptide expressing nucleotide sequence isolated from the Sargasso Sea
catgcagaacttactattaagtaatacattatctaaaaaaaaagagatattcgttcccatagataaaaataacattcgtatgtatgtctgtggacctactgtttatgattttcctcatattggtaatgcaagaccattaattgtattcgatatattatttagagttttaaaaacaatttatggaaaagataatgttacctatgtaagaaacataaccgatatagatgacaaaattataaaggcatccaatgaaaaaaatattgattttaaaaaactaactgatgaagttacattctcttttaatgaggattgcaagtatcttggatgcttgaagcctacatttgaacctaaagcaacagatcatatagaagaaatgattgaaatgataaactcattactaaataaaaattatgcttatgaaaaagcaggccatgttttttttgatataaataaatttagttcttacggggcactttcaaaaaaaacaatcaaggatcttgatccaggttctagggtagaaatatctaaaattaaaaaaaatccaggtgattttgttttatggaaaccaagtaaaaataatgaacccagttgggattctaaatttggaaaaggaagacctggttggcatattgaatgttctgcgatgtcaaaaaaatatttgagtagcagctttgacatacatgggggaggattagatttaatatttcctcatcatgaaaatgaaattgcccaatcattttgtgctaatgacaaattattagcaaaattttgggttcataatggttatgtaactatgaataaaaaaaaaatggcaaagtctgaaaataactttgttactattaacgaattaaaaaaaaaatataacggtcaaactgttagattggcaatgctaagtacacattatacccagccatttgattggaatgagaaaattttaaaggatgcaaaaacaattttagataaatggtatgaattttacattgacgaaaatattcatattagtgacagcaacaaaaagtttttattagatgacctgaatatccctaaaatgattgctaatattcatagactttataagaaagccaaagagggagaagaagatgcagccaaacaattaactgcttcatgtaagtttcttggattatttagtgaaaataaagaaacat

SEQ ID NO: 299456 - DNA, 994 bp, Unknown
  Bacterial polypeptide expressing nucleotide sequence isolated from the Sargasso Sea
atggctaaagatatatttttaactaatagtctaggtggtaagaaagaaaaatttactcccaaaaatgaaaaatccataggcatgtatgtttgtggtcctactgtttatgatgatccacatattggtaatgccagaccattagttgtttttgatattctgtataaaattttaaaaaatagatatggatcaacatctgtaaaatatatcagaaatataacagacatagatgacaaaataatcaaagcatctaatgatcaaaatatttctataaacgacttaacttcaaaaattactgaaaattttcataaggattgtaattacttaaaatgtgaaacaccaaacagcgaaccaaaggcaacagaaaatataaaacaaatgattgaaatgatcacagaactagagaaaaaagggtttgcatattcaaaagataagcatgtttattttgaagttaaaaaatttagtgattatggaaaactatctaataaaaagttagatgaattaatagctggttcacgagtagaggtttcagaaattaaaaagaatcctgaagattttgtattatggaaaccatcaacagataaagagccttcttgggactctccttggggcaaaggtagaccaggttggcacttagaatgttcggttatgtctaaaagatatttgggtgaagaatttgatattcatgggggtggtagagacttgatttttcctcatcatgaaaacgagattgctcaatcaagatgtgtaaatgaaacaaattcatttgctaattattgggttcataacggatttataactctttctaatgaaaaaatggcaaaatctcaggggaacataataaaaataaaagattttaaaaataaatataatggtcaagttttaagattggcgttaattagtgctcactatagacaagggttagattggaatgaaaaactaatttcagaatgtgaaaagactttaagcaaatgggtattcagcccctattctgatg

SEQ ID NO: 299457 - DNA, 700 bp, Unknown
  Bacterial polypeptide expressing nucleotide sequence isolated from the Sargasso Sea
aatgaataaagatatttttttaacaaatagctatggtggaaaaaaagaaaagtttcagccaatagataaaaataaagttaaaatgtatgtttgtggtcctacagtttatgatgatccacatataggtaatgcaaggccattagttgtatttgatattctttttaaagttttaaaatgtaaatatggtaaagataatgttacgtatgtcaggaatattacagatattgatgataaaataattcaatctgcaaaagataaaaaaattacaatctctgaactaaccaataagataaatataaatttccaacaagattgtaattatcttaattgtgaggaacctaactttcaacctaaagcaacagaaaatataaatgaaatgatcgatatgatcagtagtttaattgagaaaggttttgcttatgagagcaagaagcatatttattttgaggttaaaaaatttaaggattatggaaaattatcaaataaaaaaatagaagatttaatatctgggtccagagtagaagtatcaagtaataagaaaaatgctgaggactttgtattatggaaaccctcaaatgaagatgagcccagctggccatcaccgtggggaaatggaagaccaggctggcatttagagtgttcagtaatgtccaaaaaatatcttggtgataagtttgatattcacgggggaggcagagat

SEQ ID NO: 299458 - DNA, 613 bp, Unknown
  Bacterial polypeptide expressing nucleotide sequence isolated from the Sargasso Sea
catgctacatctttacaacacccgaacccgtgaaaaagcgaagtttgtaccgcttcaagaagggaaagtgggtttgtatgtttgtggtattaccgtttatgacctaagtcatatgggtcatgcccgtacttacctgagtttcgatgtcttagtacgctacatgcgccaccttggtttagatgtgaagtacgtgcgcaatatcaccgatatcgacgataagattattgctcgcgccaatgaaaatggcgaaagctttgaggcgctaactgcacgcactattgccatgatgcacgaagactttgcggcgattaacttactagagccagacgtcgagccgacagtaagtggacatatggatgagatcattgaaattatccagcgactaatggacaaaggttacgcctatcaagctaaaagcggcgatgtactattcgacgtaagcaagtacgaagattatggcaagttaagcaaacaagacttagatcagcttaaagcgggtgctcgtgttgaagtggcggcaggaaaagacgacccgctagacttcgtactgtggaaaaccaccaagcctggtgagccggcatggcaatcgccatggggcgagggacgtccggga

SEQ ID NO: 299459 - DNA, 688 bp, Unknown
  Bacterial polypeptide expressing nucleotide sequence isolated from the Sargasso Sea
catgtggtgggcaagattaattttccctcatcacgaaaatgaaatcgctcaaagtgagtgtgcaaacgaagaaaaatttgcaaattactgggttcataatggctttgttacggttgaaggaagtaaaatggcaaaatctgatggaaattttgtaacagtgaatgagcttaaagagaaataccaaggagaggttattagattaaccatgatactcactcattatcgtcagccattgaattggacaaatgataatctacaagaaagcaaaaaaacacttgataagtggtaccaatatttttctgaagttgattttaagcctgacttaagtgtgaagattgatgaaaatgtaatgaacgcactaaatgatgacatgaatacgcctcaggcaatagctgaattgcataaattattcaaaaattgtaaaagtaatgatcacgattcattaaatcaatttttaatttcggctcaatttcttggattgatgaatgatgaaccttctcaatggttatcatggggtaaagaaaatataagtgtagatcaaaataagattgagtcattaattactcaaagaaacactgcaagagcaaataaagattttgctgaagctgatagaattagagatgagttggaaaatttaggaatagtactagaagataaaggtacagaaaccacatggaaaactaagtaa

SEQ ID NO: 299460 - DNA, 838 bp, Unknown
  Bacterial polypeptide expressing nucleotide sequence isolated from the Sargasso Sea
gatgacaattaagttttataactccttgactaatcagaaggaagattttgttcccatccaagagggcgaggttgggatgtatgtttgtggaatgactgtttatgatcactgtcatttaggtcatgcaagggcgatgatggcatttgacattctcgcgcgctatcttcgatatcaggattataaggtaaattttattcgtaacattactgatatcgatgacaagattattgaaagggccaatgaaaataaagaaaaaattgaagatttgactgccagaacaatagcaagtatgcaggaagattttgatcaacttggattggtgttaccaaacaaccaaccgcgagctactgatcatattgaaggaatgataaaaatgattactgagctaattgaaagaggtcatgcttatcattcagaaagtggcgatgttttttttgcagttcgtacatttcctgagtatggcaaattatccaataaaaatattgaagacctaaatcctggttcaagaattgaagaggatgaatcaaaaagagatcctctagactttgtcctttggaagagcgctaagtcaaatgaaccatcatgggaatctccatggggctctggaagaccaggctggcatatagaatgctctgtaatgtcgttagaaaatctgggcgagcattttgatattcatggtggaggcccagatttattatttccgcatcatgagaacgagattgcccaatctgagtgcgcatcaaattgtaagcttgccaactactggatgcattcaggtctgctaaaaattaatggtgaaaagatgtctaagtctttaggtaattttgccatgttaaaa

SEQ ID NO: 299461 - DNA, 1070 bp, Unknown
  Bacterial polypeptide expressing nucleotide sequence isolated from the Sargasso Sea
cggcatggtgcgcccggatgtcgagccgcgcgccacccagcacatcggcgagatcatcgagctggtacaatccctgctggataaagagcacgcctacgtggcggacaacggcgatgtgatgttcatcgtcgactcctacgccgactacggcaagctctccggccaggatctggaacaactgcaggccggtgcccgcgtcgacgtggtcgatgccaagcgcaacccgctcgacttcgtgctgtggaagatgtccaagccgggcgagccgacctgggacagcccctggggcccgggccgtcctggctggcacatcgagtgctccgccatgaactccaagcaccttggcaaccacttcgacatccacggcggcggctccgatctgcagttcccgcatcacgagaacgagatcgcccagtcctgctgcgcccacggtggcgactacgtcaacacctggatgcacagcggcatggtgatggtggataaagagaagatgtccaagtcccttggcaacttcttcaccatccgcgacgtcttggctcactatgacgccgaaaccgtccgttacttcctgatgtctggtcactaccgcagccagctcaactactcggaagataacttgaagcaagcccgcgccgcgctggagcggatgtacaccgccctgcgcgatctgccggcggccgctgcggccggtggcgatgagcaggtggcccgcttcaaggaggcgatggacgacgacttcaacaccccggaagcctactccgccctgttcgacctggtgcgcgagatcaaccgccagaagggtgaagacatggccgttgctgccgcgctgggcgcccgcctgcgtgagctgggtgccgtgctcggcatcctgcagcaggatccggacgctttcctcaagggtgatgaagcggacgaagaggtcgccgaaatcgagcaactgattgcccagcgcaatcaggcccgtgccgacaagaactgggccgcggcggatgccgcccgcaaccgtctcaccgagatgggtatcgtgctggaagacagcgccggcaagaccagctggcgccgtgcctaag

SEQ ID NO: 299462 - DNA, 1396 bp, Unknown
  Bacterial polypeptide expressing nucleotide sequence isolated from the Sargasso Sea
atgggaattttaaaaattcataatacacttggaaatgagttagaagaattcattccaataaaccacaaacatgtaagagtatatgcatgtggtccaacggtttataattatgcacatattggtaatgctagaatggctgttgtcaacgatttgctcatacgctttctaagaactatttatccaaaagtaacttatgtctctaatattacagacatagatgataaaattatagctgcatcacaagaaaccaaaactcctattaaagaattaactcaaaaatatactaaaatttacaatgaagatatggcaatgcttggtgtaaatttgccagatatacaacctagagctactgatcatataaatgaaatgatcgatcttacctctaagttaattgaaaataattttgcttatgaaaaagatggtcacgttttatttcatgtcccagcatttaaaaaatacggtacactctctagtagaaaccgtgatgaacaaatcgtaggaagtagagttgaagttgctccatataaaaaggatcctactgattttgttttgtggaaaccaagctctgagtctatgcctggatgggaatctccttggggctttggaaggcctggttggcatctagagtgttcagcaatgtctgaaaaaactctgggattaccttttgatatacatagtggtggggctgatttgatttttccacatcatgaaaatgaaattgcgcaaacatgttgtgcacataataatatagaagatataaaaagtttttctaaatattggtttcataatggtttcgttaatgttgaaggtgaaaaaatgtcaaaatcaattggcaatattaaactcgttaatgaattagtaaaagaatataaaggagaggttttaagattaaccttgctttcagcacattacagacaacctttaaattggaatagggatataattaaacaaaatagtacgatgcttgatcgattgtatagatctttaaaagacctagaaaaaacagatgcttacaaagataataataaaatagatgaaagtataattaggggcttatatgatgatttaaatacgcctaaagtaattgcggaattaaatattttaaataacaaaattagtaacgcagatgaaaaaacaaaagggaaaattaaatataacttattagaaattggtaaaatttttggcatcttgcaagaaaatcctaataaatggcttggttatggaaaagcaggaaatattgaagaaactgatatagaaaggttgataaaaaagcgcaatgaagctagaggcaacaaaaattttgatatggcagatcaaattcgtgatgaattaaaaaataaaggaattgaaatagaagatactgcaaatggtacaatttggagaaatgttgaatagt

SEQ ID NO: 299463 - DNA, 784 bp, Unknown
  Bacterial polypeptide expressing nucleotide sequence isolated from the Sargasso Sea
tatgaaaataaaattatataattctttatcaaataaaaaagaagacttttcgcctcttgtaaaagatgaagtgaaaatgtatgtatgtgggcctactgtttataatgatccacacataggtaatgcacgtcccgcagtggtatttgatattttatatagattgctacttaatcaatataagaatgtagtttatgtaagaaatattacagacatagacgacaaaattattgatgcagccaataaacgaaaggtcactatagaggaaatatcagatcaatacactgaatcatatcatgatgatatgaagtatcttaataacctatcaccaactaaagagccaaaagccactgattatattgatgaaatggttttaataattcagaaattaatatcaaaaggttttgcttatgaaaaagagaaacatgttttattcaatgtaaaaaaatatgatctctatggaaaattgtctggtagaaatcttgaagatatgattgctggtgcacgagtagaggttgcgccttacaaagaaaacgaacatgattttgttttatggaaaccctcagatcttgattcaccaggatgggaaagcccatggggaactggaagaccaggctggcatattgagtgtgtggcaatgataaataaaattttaggacctgtaatagatattcatggtggaggacaggacttaatatttccgcatcatgaaaatgagattgcacaaagttgctgtgctaacgacaacgagacctttgtaaggttctggatgcataacggttattaa

SEQ ID NO: 299464 - DNA, 1399 bp, Unknown
  Bacterial polypeptide expressing nucleotide sequence isolated from the Sargasso Sea
aatgccacttcaattttataataccataaaacgtaaaaaggataaatttgatcctatctctaaagaaatggtaaaaatttatacttgtggacctacggtatatgatatagcgcatataggaaactttcgaacttttcttttcgaagatttattaaaaagatatttgatttttaaaggtttcaatgtttatcatgtaatgaacattactgatgtagatgacaaaacgataaaacgcgcaaaaaagaacaaaaaaaattttaataaattaacatcaaaatacgcagatctttttatgaaagatcttgaattccttaatattttaccagcagatgtgtaccctaaagcgacagatcatatagatgaaatgatttctatgataagtaagcttgaaaaaaatgggattgcatatagatctaaggatagttctgtttattttcgattatctaaagataaagattatggaagacttgcgaaacttaatctttctgatttaaaaaccaccgataggatcactagcgatgaatattctaaggatgatcctcaggacttttctttgtggaaatcttgggatgcagatgatggtgatatatattgggactcaccttggggtcgtggacgtccaggatggcatattgagtgctcagcaatgtcaataaaatatttaggagaacatttcgatattcattgtggtggggttgataatatttttcctcatcacgagaacgaactagctcaatctttatcagctacagataaatcatttgttaattattggatgcactctgagcatctacaagtaaaagataaaaaaatgagtaaacaagagggtaattttttcacaattactgatttaatttcagaagggtttttagcagaagagattcgttttgttatgctaagcgctcactatagaacaaaattaacattttcaattgatcaatgtcttgaatctagaacggctattcaacgtatttcagctttgtataatagattaaaaaaaatccctaatcgaggttcatctaaattaaagcttccctctgaaagaaaagattttatagcagccatggataatgatttagatgcgccaaaagcgctagctatattatttacatggataagattaatgaataaaaaacttgatcataatggtgacaagaatatgaatattcaagaaataaatggatcaattgagtttttaaaccaagtagatagtatttttggaattttacttaaagaagattttattcctaaagaagtgcaaagtttgatagaagatagagaaaaatatcgtaaaataggagattgggctttagcagatcaagtacgtgacaaaatttatgacttagggtggattatagaagatggttctgatggtactcatgtgaaaccaaagaaataa

SEQ ID NO: 299465 - DNA, 937 bp, Unknown
  Bacterial polypeptide expressing nucleotide sequence isolated from the Sargasso Sea
aatgtcactgaatttatacgacacattctcaaactcaaaaaaaaagtttgaaccaattgatccaaaaaatatcagaatgtatgtttgtggtcccacagtatacgactatccacacgtaggaaatgcaagacctgttatagtttttgatattttattccgaattcttcaaaacgtatacggtacagagcatgtaacatatgtgagaaatataacagatgttgatgataagattataaatgcttcccaagaaaataatgaagacatcaatgaattaacttcaagaaccattaattattttcacactgatgcgaaatatataggagcaatggagccctcttttgagcccagagcaacagatcacatagatgaaatgatcaatattattgagactttaattgaaaaaaattatgcctatgttgctgataataacgttcttttctcatctactaaattttctaaatacggatcattatcaggtaaaaaccttgaagaaatgattgctggatcaagagtcgatgttgaaagttataagcaagaagcctcagattttatactatggaagccttctaaagataacgaacctggatgggacagtccatggggcaagggaaggcctggatggcatatagagtgttcagcaatgagtgaaaaattattaggtaaaacatttgatattcatggtggtgggcaagatttaattttcccacatcacgaaaatgaaatcgctcaaagtgagtgtgcaaacggagaaaaatttgcaaattactgggttcataatggctttgttacggttgaaggaagtaaaatggcaaaatctgatggaaattttgtaacagtgaatgagcttaaagagaaataccaaggagaggttattaggttaaccatgatactcactcattatcgtcagccattgaattggacaaatgataatctacaa

SEQ ID NO: 299466 - DNA, 463 bp, Unknown
  Bacterial polypeptide expressing nucleotide sequence isolated from the Sargasso Sea
ttgccgctcaagctatacaatacgctgacgcgtacaaaatctagttttgaaccattagataaaaataaaatacgcatgtatgtatgcggccctaccgtttatgattacgcccacatcggtaatgcccgaccagtaattgtatttgacttactgtcgcgaattttatgccacctatttggaaaagagcacgtgctctatgtacgaaacatcaccgatgtagatgacaagattatagcagcccaccaacagtctggtgaagaaataaattcgatcacatcccgcaccataaaagcatttcacaaggacatgagggcgctcggcaacttggatcctgatgaggaacctctcgccactgaccatattccagaaatgcagacattaatcaaaatcctccttaccaaaggccatgcctacgaaaataatggccacgtgttatttgatgttaaatctatgcccgattagg

SEQ ID NO: 299467 - DNA, 1336 bp, Unknown
  Bacterial polypeptide expressing nucleotide sequence isolated from the Sargasso Sea
tatgtttttatataattcattaactagaaaaaaagaaaaactatcaaaagataaaatcaaaatgtatgtttgcggagttacagtttatgaccgtccgcatttaggacatgctttatctacagttacatttgatgttctacatagattcttagaatacagtggctatgatgttaaaagagttcaaaactttacagatgttgatgacaaaattattaataaatccaaagaattaaatatttcagctcaagaagttgctgaaaaatatatagatagttttttcgaagatatggatgcattaggtgtaagaagagctgatgtccatcctagagctactgaagatatgaaagaaatcatcgaacttatatcttcacttattgataataaagcagcttacagttctaatggtagtgtttattttgatgtttcatactcatcagattatggtaaactttctcgaagaaatgtcgacgaagaaattgacggaactagaattgaaaatgatccagataaaaaaaatgttgaagattttgctttatggaaaaaagctccacctgatgaaccgcattgggaaagtccatggggaataggtagaccaggatggcatatagaatgttctgcaatggcaaaaaaacatttaggtgaaactatagatattcatggaggaggactagatttgattttccctcatcatgaaaatgaaattgttcaaagtgaatctgccactggactaaagccattctctaagatatgggtacataacggactattaaaaagagctggagatgaaaaaatgagtaaatctctaggaaattcttttgatgtaagggatgctttggaaaactattctggaaatgcaataagactttggattttacaaagtcattacaggcaaccaagtacattagacgatgattcattatcaattgctcagaaatcgtatcagagaattgaaagggctttatctcttgaaggaaaaaatggttttgatactaataaatatctagatgattttgaagaatcaatgaatgatgacttaggtactccttcagctgtagctacaatttttgatttagttcatgaaataaatgttcgaaatagtaaaagccaaggaattgcagaaggggtaaatcttctgaagaacctattaaatatactgggatttgatactgagaataataaattagaagataaagacattatagatttattagaaaaaaggaataattttagaattgaaaaaaaatatgatcaagctgataagattagagatcaacttttagacttaggtattgaaattcttgattctaaagatggttcaacttatagaaagatttag

SEQ ID NO: 299468 - DNA, 1333 bp, Unknown
  Bacterial polypeptide expressing nucleotide sequence isolated from the Sargasso Sea
aatgcttaaaatttataatagtctttctaagaaaaaggaagatttcgttcccaacgatcctgatcatattaaattctatgcttgcgggccgaccgtatataacaaaatacatataggcaatgctagagccttcatatcggctgatcttttagcaaaagttttaaaaggcatgtatagcaaagttacttatgtatgtaatatcactgacatagatgacaaaataatagacgctgctaaagaagagaatttatccatcaaagatatttcgactaaatattttaatcaatatcaagaagatacagcactcttaggtatttctaaacctgatgttcagccctttgctactgattatatcgatgacatgatagcttacattgaaaagcttattgcttctgacaatgcctatgaaaaggatggtaatgtgctttttagagtttcatcatttccaaattacggttgtctttcagatagaaagctagacgaacatgaatctggttcaagagttaaagttgaagattttaaagagagtccaaatgattttacattatggaaaccttcacttgatgatgatcctggatgggattctccctggggtagaggtaggcctggctggcatctagaatgctctgttatgtctgaatcaaccttagatattccatttgatattcattcaggtggcaatgatctaaagtttcctcatcatgataatgagattgcacaaacctgtgcttatcatggcaatgaagatccaacatcatttgctaaatattgggttcataatggtttcttaaatcttgaagatgaaaagatgtctaaatctttaggcaatgtcatatatatagatcaattactaaaaaaatataaaggcaatgaggttagacttgcccttctttccactcactatagacaacctataccatggagcgaagacctacttgatcaatcacataatatatacgttaagttacaaaatgctttcaagaaatatggaaaaattgaagaaaaatttcatgctaattcaaagattgctgagatattaatggatgacttaaacacgccacttgctattaggacaatgcaagatttagtctcagagcctaatgaaaatatagaaaatgagatagcgacttttaaatatatttttgaagggtccaatcaagatctttctttatcagatgaacaagttaatgaaatcaatgaactggtcaaagaaagagatgatgctagaaattcaggtgattatgatagagctgataaaattcgcgataaattgagtaaaatgaatgtgtccataaaggacgttaatggaaaaacggaatgggaaatattgtaa

SEQ ID NO: 299469 - DNA, 1396 bp, Unknown
  Bacterial polypeptide expressing nucleotide sequence isolated from the Sargasso Sea
atgactcagcttaggttatataactcacttacaaatcagaaagagaaatttataccgattgacccaagtcatgtacgcttatatacctgtggtcctaccgtatacaattatgcccatatcggtaacgcgcgtcctcccattgtttcagatattcttgttaggctcctgagacatctatataagaaggttacgtatgtctcaaatatcacagatattgatgataaaataatcaatgcgtccaaggagcaaaatagacctattagtgagataaccaaaaaatatgagaaaatatataatgagaatctaagtgagcttggtattgaccccccagattttcaacctagggcgactgagcacatcccggagatgatagatcagatcaaggctcttatcaaaaatggtcatgcatacgaggcagaaggtcatgtattatttagtgtaaatacctttcctggttatgggtcgctttctgggagagataaggaagagcagattgcaggaagcagggtagaggtagcaccttataaaaaagacccaatagattttattctttggaagccaagcatagaagatcagccaggctgggactctccctggggatttggccgtccaggatggcatcttgagtgttctgcaatgtccgagaagacgttaggagtaccatttgatattcataccggggggcaggatcttcttttccctcatcatgagaatgagctggcgcaatgctgtggagttcatattaaacttgatgacataagctcctatgcccggtattggatacataatggtatgatcaggtttgatggagataaaatgtcgaagtcacttgggaatatacaattcatcaatgatctgcttaatgatcacaatggagagacgctaaggttggtgcttatgtcaactcactatcgacagcctcttaactggtcagcgaaaaccattgaccagtcgaagaaaacactcgatagattataccgaacaataaaaagtctaaatatttcattagataatactaatgcaaaaccagctcaggaggttattgatgcactttgcgacgatctaaataccccggaagccttagggcagtttaaccttttaatgaaagatctagagaatactgaaggaagccaaaaagaagaaaaactatccataataatttctaccgctagaatacttggtatacttcaaagcgatcccgatagttggcttggatatcaaaaagtaaaaactggaatggatgtaaataagatagaggaaatgattgaaaatagaaataattgtagggctgaaaagaactttcaaagggcggacgagattcgtgatgagctaagatcgatgggaatagagattgaagatactgctgaaggaactatttggaaaagcgagagctaat

SEQ ID NO: 299470 - DNA, 937 bp, Unknown
  Bacterial polypeptide expressing nucleotide sequence isolated from the Sargasso Sea
tatgagcaacgaacaaccatttcaattgtttaatactttaagcgggaacaaagaaagattagaggcaattgatccaaaacatttaaaaatttatgcatgcggaccaaccgtatataactatgcacatattggtaatgctagaatggctgttgtctttgatactttagttagaactcttagagtaatttatccaaaggtcacatacgtttccaacattactgatatcgacgacaagataatagaagctgctatggaacaaaacgttgagataacatctatcactgaaaaatacacaaagatttataacgatgatatgttaaaactcaatgttttagctcctgatattcaaccaaaagctactgagtacataccagaaatgattgaactcatagttgagctaattaaaaaggattttgcttatgaaaaagaaggacatgtgctttttcacgtgccaacatatcaaaattatggaaagctttctaaaagaaatagggatgagcaaatcgctggaagtcgggtagaggttgcgccttttaagaaagatcctgctgacttcgtattatggaaacctagtactgatgagcagcctggttgggaatcgccttggggaattggaagacctggttggcacactgagtgctctgcaatgtctaaaaaaactttgggacttccatttgatatccacggagggggacgagatctgatctttcctcatcatgaaaatgaaattgctcaaagttgttgtacatcggccagtattgatgagcctgattcttatgcaaagtattggatgcataatggttttgtaacaattaatggtgaaaaaatggctaaatctttgggaaatataattttagtaaaggatttagctgaaaattatcacggtgaagtaataagacttgctttattgtcctcacattatagacaaggactagat

SEQ ID NO: 299471 - DNA, 1078 bp, Unknown
  Bacterial polypeptide expressing nucleotide sequence isolated from the Sargasso Sea
aatgaagatcaaactctacaattcaaacaccaagagcaaagagctatttgttcccattgaccccaaaaaggtcacaatgtatgtctgtggacccacagtatatagttatcctcatattggaaatgcgagaggtcccgtcatattcgatgttctagcaaggcttttaaggagagaatttgatctcaagtacgttaggaatataaccgacttagatgacaaaatttatcaggcagctgatgatgagggcgttcatatttctgaagttacacagcgatatacaagaatttatcaagaagacatgagtgccttaggtgttgaaaagccagatttagagccattggctacagagcatattcctgagatgattgaaatgatcgaggggttaattattaaaggacacgcatatgagaatcaaggccatgtttttttcagtgtagaaacttttgatgattatggtttcctttctaatcgaacagaagatgaacagatctcaggaacaagaataaaattctcacaaataaaaaataatcaaagggactttgtactctggaaaccatccactgggcaaactcctggttgggagagtccttggggttatggaagacctggatggcaccttgaatgttcagcaatggcgaagaaatatttaggaaggacattggatatccatggaggcggaagtgatcttttatttcctcatcatgagaatgaatgtgcgcaaagcatgtgctcacactcaggagaaccacttgcaaactattgggtccataatggaatgatcgatttcgataacgtaaagatgtcaaaatctgaaggcaatcttttgcttatacgagatcttctaaaaaaaatcaggccagaggttattcgaatggcatttttaaccacacactatcgtaaaccaattaattggaatgatgcattgatcaatgattcagagaaaaagcttgatcgtctgtatggttcgatcagacagttgggaaagatctcaccaggagagccctcagaagaagtcatgaatgcaattgcggatgatatcaatacgcccaaggcactgagtgagctttttgccatagta

SEQ ID NO: 299472 - DNA, 1399 bp, Unknown
  Bacterial polypeptide expressing nucleotide sequence isolated from the Sargasso Sea
atgcttaagttatacaattcatatagcaattcaatagaaaaaattgatttaaataaaagagaagtaaaaatttacttatgtggaccaactgtgcagtcctcacctcatttaggtcacggaagatcagcagttgtttttgattttcttgttaggtatctaaagtatttaaaatataacgtcatatttgttagaaatatcactgatatagatgataagataatcgaaaagtcttttgaagagaatatctcttataaagaacttgcaatgagagtttcaaaagaatttgaatatgcttaccaaaagctaaattgtattaaaccagataaagaacctagagcaacagaatttattaaagagattattagttatattgaaacattaataaaaaatgaatatgcatatataactaaatctggtgtctactatgatatttcaaaatttgatgaatatttattgttgtctggaagaacgaagaatgaggtaatttcaggaacaagagttgaattagaagaagacaaaaatgcaccagaagactttgctctctggaagttctcaaaagaaaatgaaccatattgggagtctccttggggaaacggtaggcctggttggcatattgaatgctcttcaatgattgaagcaattcttggtagaactatagattttcattgcggtggaaatgatttaatttttccacatcatgaaaatgaaattgcacaatcaaaaggagcgtacccaaaagaacaatttgtaaaatattggcttcataatggaatgttaaatttatctggcaaaaaaatgtccaaatctgatggaaatattaaattattaaacgaatatatagatgaattcagtggtccagttctaaggtttttctttttaaaatctcaatatagaagccctcaagaattcaatgtcaatttgttaaaagaatctgaatcaacattaaacaatttgattgactttacatatggagttgattcagaactaaagagtaaagaggtcttagacatttttgaagattctatgaatgaagatttaaatactccaaaaatgttaggaagcttatttaagttaataaatgaatcggatacattaaatgagcagaagttatcggaattaaaatcaagcattaaatttgtttttaatcttcttggctttgacttaataaaagtagataataatcaaaaaacagatgaggaattaacaaaattctttaaaaaatatgaaattaaatttgaaaatgttaaccaagcagtttctgaatttatcaacaaaagagaagacctaaggaagcaaaaagattttgaatcagcagataaaatgagggaaagtatcttaggaattggaataagtcttgaagatggaacagatagtggatggtcttggaaaaatagttgag

SEQ ID NO: 299473 - DNA, 1384 bp, Unknown
  Bacterial polypeptide expressing nucleotide sequence isolated from the Sargasso Sea
catgaaaagctcaacgtctttcaatttatataatactttgaatggaaaaaaagaagtattaaaagctattgatccaaaacatttaaagatttatgcatgtggtcccactgtttataactatgcacatattggaaatgcaagaatggcggtcgtatttgacactttggtaagaactttgagaagcatttatccaaaagttacctacgtgtctaatattactgacatagatgacaaaattattgaagcagccatcgatcaaaatgtagatatttcaacattaaccgaaaaatacacacaaatctacaatgaagatatgtctaaacttaatgttttagctcctgatgttcaaccaaaggcaactgaatatatttcagaaatgattgagctgatagaagatcttataagcaaaggatttgcttatgaaaaagaaggacacgttctttttcatgttcctacttataataattatggaaagctttcaaaaataaatagagaagaacaaattgcaggaagtagagttgaggttgcgcctttcaaaaaagatccatctgactttatattatggaaacctagcactgaaaatcaacctggatgggaatctccatggggttttggacgccctggctggcatacagagtgctctgcgatgtcaaaaaaaactttaggattaccttttgatattcatggaggtggaagagatctaatttttccacatcatgaaaatgaaattgcacaaagttgttgctcttcagcaaatattgaagatcctagctcttatgcaaaatactggatgcataatggttttgtaaccattgaaggtgaaaagatgtctaaatcattgggtaacataattcttgttagagaattaactgattcataccatggtgaggtcataagactagctttgttgtcgtctcactatagacaaggccttgattggaatgaaaaagtaattcatcaggcaaataaactccttactaaactttatgaaattaaagataaattagatgaacttgatacttctaataaaactaacaatgatttgagtgttatagaaatgttaatggatgacctaaatacaccaggattaatcgcggagttaaataaaatagttaaagattttaattcttctaataaagataaaatagttataaaagaaaaacttactttaatcggttctgtcttaggcattttacaagatagtactttcaacaatatttctgatgaattaaagataaaagtagaaaaaatgatttcagaaagagatgaagctaaaaataataaagattacgtctcagctgacatgataagacaacagttgcttgatataggaattgaaataaacgacaccagtgaaggaactaactggaaacttaaatcgtaa

SEQ ID NO: 299474 - DNA, 640 bp, Unknown
  Bacterial polypeptide expressing nucleotide sequence isolated from the Sargasso Sea
gatgtatgtttgtggcatgacagtttatgacgatactcatattggtcatgcaagaacttttatatcttttgaccttattgtcagatacttaagaagtattaactacgaagtgcactacataaggaatataactgatgtagatgacaaaattatagcgagagcagaagaacttaatatttctccaaaagaattaacagaaaaatatatagattcaatgaatgaggattttatgtcattaggtatgatcgaacctgatttagaaccaagagcaactgataatatcgactccatcatttctctaatcgaaattcttttggagaaaggacacgcttacgaaggagattcagatgtttatttctcagctgaatcttttgattcttatgggaaattatcgagaagaaacttagaggacatgttggcgggagcaagagttgaagttgatacagataagaagaatcctgctgattttgttctttggaaaaaaaatactgaggggctgaagtgggactcgccttggggtgctggcagaccaggttggcacattgaatgctcagcaatgagcatggatgcattgggtgagacttttgatattcatggaggaggatctgatctgaagtttccgcatcacgaaaatgagatg

SEQ ID NO: 299475 - DNA, 1399 bp, Unknown
  Bacterial polypeptide expressing nucleotide sequence isolated from the Sargasso Sea
atgcttaaattatataattcactaactaaaaaacaggaagaaataaagattgataaagatgatgtaaggatttatctttgtggacctactgtccagtcatctcctcatctaggacatggaagatcagctgtagtatttgatttttttataaggtaccttaagtatttaaattattctgtattgttcgcacgaaacatcacagatatagatgataaaataatcgaaaaatcacaggaaaaaaatataagttatcgtgaactcggagataatgtttggaaggagttcgtattagcccatgaaaaccttaattgtttagtacccgatattgaaccaagggctacagcttacattcctgaaattatcaaatatattgaacagctagttcataatggttttggttatgttacaagttccggggtttattatgatgtttcaaaatttgaagaatatcttaagttatcaggaagaagtatagaggatgtaaggactggtacaagagttgaaactgaagatgataaaaaaagagccgaagactttgctttatggaaattctctaaagaaaatgaaccatcttgggattctccttggggagatggtcgaccaggatggcatatagaatgttcaacaatgattagtgaaacactaggtaaaacaatcgactttcactgtggaggaatagatctaatttttccacatcatgaaaatgagattgcccaatctaaaggcgttgaaattaatgagaattttgcaaactattggctacacaatggaatgttgaacctgtcaggaaaaaaaatgtcaaaatcagatggaaatgtgaaattacttaatgaatatattgatgaatatggtggagatgttgtaagattcttttttttgagagcccactacagaagtccacaagaatttagtgagcagttgcttgaagagactaaaaaaactttgagcaatttagctgaatttacaaaagatgttgttgcagaaccaaatgatgatgatactgttgatatttttattaaatgtatgaatgatgatatgaatactccaaagtttctcggagaaatttttgaaaaaatcaaagattcaaataatttagatcaagaaaatttattaaaaattaaacaaacagtgaaatttatatttgaaattcttggatttgagctgaataactcaaaacaaaacatagtagaagaaaaattattatctaaattttttgcaaaatataatattcaatttaatgatatcgaatctgcaatgagtgagttttcacttaaaagggaagagttaagatcaaacaagaaatatggcgaggctgacaaaatgagggaagatttattagagattggaatagtcatgaatgatggtgaaaatgtcggatggtattggaaaaatagttgaa

SEQ ID NO: 299476 - DNA, 952 bp, Unknown
  Bacterial polypeptide expressing nucleotide sequence isolated from the Sargasso Sea
gatgatcaaactttttaatactttaagcaaaaaagttgaggtttttaagcctattgatgatttagtaaaaatttattgttgtggggtaactgtttatgatttatgtcatcttggtcatgccagaagttatatcgcttgggatgtattgagaagatttttaatttacagtgatttcaaagtgaagtatgttcaaaattttacagatattgatgacaagatcttaaaaagagcgaaagaagaaagcagttcaatgaaggaagtatctgaaaagaatatcattgaatttcacaaagatatggattctttagggataatgcgtccggatagcatgccaagagcaacgaatcatatatgcaatatctgttccttcataacaatccttgaggacaaaggttatgcatactctagggatggagacgtttattattctgttttcaaaaataaaaattatggaaagctaagtaatcaaaatttacaagaacaaaatatcaatcagcaaggaagaatggttaatgaggaaaatagtaaaaaacttaatccgcaagattttgcgctatggaaaaaagccaaagatgatgaaccattttttgattcgccatggggtaaaggtaggccaggatggcatattgaatgttcggcgatggttaaaaatgaattaggagatactatcgatatccatttaggtggttctgatttgatttttccacatcatgagaatgaaatcgcccaatcagaagcagccaatggcaaaaagctagcgaactattggttacacaatgggatggtcaatgtaaatggacaaaagatgagtaaatctcttaaaaattttaaaactatcagagagctaattaagtcaggtataagccctatgactttgcgatattttgttatgactgtgaattatagaaaaccacttgattttactgaagaagctttaaggagtgcttcagaa

SEQ ID NO: 299477 - DNA, 718 bp, Unknown
  Bacterial polypeptide expressing nucleotide sequence isolated from the Sargasso Sea
atgaagatttcagatacgttaacaaatcaaaaaaaagaattagaattttctgataaagtaagaatctatctttgtggcgtaacagtatatgatcaatcacacataggacatgccaggacaataatagtttttgatacattgagaagattccttgaagcaaatggcactcaagttgaattaattcaaaattttactgatgtcgatgataaaataattaatcgtgcaaaagaacagggcgaatcagcaagtggattatcaactaaatatattcaaacatattttgaagattcagataggttaaacattagaagagcaacaaattacccaaaagcaactgaacatatcgatgatatgataaatctaattcaaaatttagtggataaagaatctgcatatgtgtctaaaaatggagtatatttccgtgtttcaaaattttcagaatatggaaaattatcaaaaaagaaaacagaagatctggaaagtggtgccagaatagaagttgatgaatcaaaagagagtcctttagattttgccctgtggaaattttcagatgaacaaccaaattgggaaagtccatggggtaaaggtagaccaggatggcatatagaatgctctgcaatgagtatcaagtatcttggtaaaaattttgagatacatggaggtggaagagatttgatttttcctcatcatgaaaatgaaattgcacaatcagaatcat

SEQ ID NO: 299478 - DNA, 1384 bp, Unknown
  Bacterial polypeptide expressing nucleotide sequence isolated from the Sargasso Sea
tatgaaaagtgaagcacctttcaaaatatttaattctttaaatggccaaaaggaagaatttaatccttgtgattctgatcatataaaaatctatgcatgtggtcctacagtttataactacgcacatattggcaatgctcgtatggcggttgtgtttgatacttttgtaagaacactgagaattttttatccaaaagttacatacgtatcaaatattactgatatcgatgacaaaattatcgaggcagctcttgagcagaaagtagaaatttcttcaattacagaaaagtatacaaaaatttataacgatgatatgtctaaattaaatgttttgatgcctgacatccagccaaaagccacagagtatattccagaaatgattgaattaattgaggatttgatttcaaaagactttgcttatgtaaaagacgaccatgtacttttccatgttcctaattatgttaattatggaaaactctcaaaaagaaatagagatgaacaaattgcaggtagccgagtagaggtggcaccctttaaaaaagatcctgctgattttgttttatggaaaccaagtgacaaatcacaaccaggttgggattctccttgggggattggtcgcccaggatggcacacagaatgttcagcaatgtccaaaaaaacattaggccttccttttgatattcatggtggtggtagagatttaatttttccacatcatgaaaatgaaatagcacaaagttgctgttcatctgcaaacatcgaagacccttcgtcttatgctaaatattggatgcacaatggatttgtaactattgatggtgaaaaaatgtctaaatcgctaggtaacataatactcgttaatgagctaatagaatcctaccatggtgaagtaattagattggctttattatcatcacattacagacagggcttagattggaatgaaaaaataattcatcaagcaaatatacttttagataaattatatgaaataaaatttttgctaaacgatgagattattgaagatacaattgaaactaatttagccccaattgctcatttagccgatgatttaaatacacctggattgatagcagaattgcacaaactagtaaaagattttaataactcacattccaataaatcagagatcaaaataaatctaaatttaatttcaaaagctctaggaattttacaggatgattcttacaaacatgtatctgaggaactaaaaaaacaaataaacacacttatattaaaaagaacagaggcaaaggataataaagattatgaattagcggataaaattcgaaatgaattattggatttaggtgttgaaatcaaagacaccagtagcggtactgattggaatttaaaatcatga

SEQ ID NO: 299479 - DNA, 1315 bp, Unknown
  Bacterial polypeptide expressing nucleotide sequence isolated from the Sargasso Sea
atggatatttttttaacaaataatttaacaaataaaaaagaacaatttgttccaaatgataaaaaacatataggaatgtatgtgtgtggaccaactgtttatgatgatccacatattggtaatgcaagaccattagttatttttgatattctttataaattactaaagaaaagttattcgaacgttacatatgttagaaatattactgatatagatgataaaataattaaagcatcgcaagagcaaaaaatttctgtaaaagagttaactgaaaaaataaccaaaaactttttagatgattgtaagtttttgatttgtgaagaacctactcatcaacctaaagcaacagaacatattaaactaatgattgagatgattgatcaattgattaaaaaaggttacgcatatgaaattaacaatcatgtttattttgaattaaaaaaattttctgattatggaaaattatcaaataaaaaattagatgatttaattgctggatcaagagttgaaattagtgaaaataaaaaaaattctgaagattttgtattatggaagccatccaaggaaaatgaaccttattgggactcaccttggggtaaaggaagacctggttggcacttagaatgttcagctatgtcaaaaaagtttttaggagatcaatttgacattcatggaggtggaatagacttaatttttcctcatcatgaaaatgagattgctcaatctagatgtgtaaatgatacaaaaatatttgcaaattattgggtgcataatgcttttattacaatatcaaacgaaaaaatggcaaagtctcagggaaatattttaaagatcaaagattttaaaaataaaatgagcggtcaagtattaagattagcactaattagctctcattataaacaacctcttgactggaatgaaaaattattagatgagtgtcaaaatactttagataaatggtatcgtgtttattcatctgatatcgagtctgttgaaattaatgatgaaattttgaaacctttatatgaggatttaaatactcctggctatatagctaacctacataaactttatgaacaagccaataaaggaaagaatgtagaactatttatatctgcttgtaaatttgtcggtttattaaaagaaaatgaaaaacaatgggaaaagcataaaaaagataaagtttcaataagcgaaattgaaataaacaataaaattgaactaagaaacaaagcaaggtcaaataaaaattataaagaagctgataaaataagaaatgaactttttgataaaggtggttttaatagaggacaaa

SEQ ID NO: 299480 - DNA, 1174 bp, Unknown
  Bacterial polypeptide expressing nucleotide sequence isolated from the Sargasso Sea
atgaaattgtatttatataattcttataaaagagagaaagaaagttttgagccaattagagatggttatgtaggactatatacatgtggtccaacagtatatgattacgcacacatagggaattttaggacctttatatttgaagaccttttaaaacgatggcttattcatctagggtatgatgtaaaacatattatgaatatcacagatgtcgatgacaagacaattaaaaaagcaaatgatgaaagtgttgcattaaatataataactgatcgttatacatcgtgttttatggaggacttaaagtggttaaaaatgattcctgctgatgaatttccacgagcaactgattatatagacaagatgattagtatgattcaaactctattagataagaattttgcatataaggataatgatggttcagtttactttgatataaattctttcaaagaatacggctgccttacaaatttaaatattaagggtcaaaagcagactaaaagaataaatgatgatgaatatgagaaagattccccgcaagattttgctctttggaaaggatggaaaaaagaagatggagatatagtatggaatgcgccatggggtaaaggtcgtcctggatggcatatagaatgttccgctatgagcatagatgcattaggagatcattttgacatacactgtggcggtattgataatatgttcccacatcatgagaatgaaattgcacaatcagtatgctcaacagggaagccatttgtcaattattggctccattctgaattccttttagtagatggtggtaagatgagcaaatcattaggtaactattataccatcaaagatttaataaataagggtttctcagcagagtctatacgctaccaattattatctggtcattataggaaaaaaatatcattttcaatcaataaaaaacatgagagtgacaaggtagttgcaagagtatccgattttcatgaattactaagtcaaaaaattaaaaaaatatcattagataattcattgcctcaaatctattctgattttagtaatgcaatgaatgatgatttaaatactcctcaagctcttgcgatattttttgaatggatgaagtctgaatcaaaaaaaatcaaagataattcattaagctcagaagagatatcatctg

SEQ ID NO: 299481 - DNA, 1363 bp, Unknown
  Bacterial polypeptide expressing nucleotide sequence isolated from the Sargasso Sea
atggaaattcgattatataattcaaaaaataagaaaaaagagatatttcgtcctattaatgatgaaaatgtaacaatatatgtatgtggcccaacggtttatggagcacatcatatagggaatgctaggccggctgtagtttttgatatattagttaaattattaaggaataaatataaaaaagtaacatacgcaagaaatattactgatgtagatgataaaataattaatgccgcttttgaagaaaatgtggaaatatcagaaataaccaaaaaatctactaatcagtatcattcagatatgaaaattctaaatgtagatgaacctgatgaggagccctatgcaactcaattcatttctgaaatgattgtatttattaaagatttaataaaaaaagataatgcatatatttctcaagatcatgtgttatttgatataaattcttatgatgactatggaaaattatcaggtagagatccgaaagatttaattgcgggtgcaagggttgaaattcaagattacaaaaaaaatccattagactttgttctttggaagccttctagtgaaaatgaaattggatgggaaagtccatggggaagaggtcgaccgggttggcatttagagtgttctacaatgattttagaaatatttggtgaaactatcgatattcatggaggtggagaagatttacgatttcctcaccacgaaaatgaatgcgctcaatcattttgtaaaaacaatggaaaagatattgcaaatttttggttacataatggaatggttcaaatggctgactctaagatgtcaaaatctcttggcaatattcttttgataaaagatttaatttctgatacccccggtgaagtaataagactgtctttaatgagttcgcattatagacagccattaaagtggtcagatgaattagttagtcaatcaaaaaaaacattaaataatttttattcgtatctaaaagattatgaagatattgaaaatattgattcatttgttaatgaagatattcttaatgctttatctgatgatctaaatactcctaaggcaatatcaattcttcattcaatgtttaaaaatttgaaaaaaaatcctgataatattgagttgagaagttcatttttgaaatctgctaatttaatgggtctcttgattactaaaccaagtaattggtttttaaatgaagacaataatattgatacaaaaatgatagatgatctcattgagaaaagaaatcaagctagaatatctaaggatttttcattagcagatgatataagggataagcttttgactatgggtattgtaattgaagacaaaaacgatataactacttggaagaaaagatgat

SEQ ID NO: 299482 - DNA, 1345 bp, Unknown
  Bacterial polypeptide expressing nucleotide sequence isolated from the Sargasso Sea
aatggatatttttttaacaaataacttaaataataaaaaagaacactttgttcctaaagaaaaaaaaaatgttggaatgtatgtttgtggacctacagtttatgatgatcctcacataggaaatgcaagaccattagttatttttgatattttatttaaattattaaaaaatgaatttccctcagttatatacgtaagaaatataactgatattgatgataaaataatcaaatcttcacaagagcaaaaaatttctacgaaagagcttacagaaagagtaatttcaagtttttttaaagattgtgagtttttgaattgtgaaaatcccactcatcagccaaaagcaactgagcacattgatcttatgattgaaatgattaatagtttaattaaaaaaggatttgcatacgaaaataaaaaacatgtttattttgaagttaaaaaattttctgattatggaaaattatcaaataaaaatttagaagatttagttgctggatctagaatagaaattagtgagaataaaataaattcagaagactttgttttatggaaaccgtcgaacagtgatgaaccagcttgggattcaccttggggcaaaggcaggccaggttggcatttagagtgttcggctatgtcaaaaaaattcttaggtaatgaattcgatattcatggtgggggtatagacctaattttccctcatcacgaaaatgaaatagctcaatctagatgcgccaatgatacaaaagtttttgcaaattattgggttcataacgcatttattaccatgtccaatgaaaaaatggctaaatctcaaggcaacattcttaagataaaagattttagaaataagattagtggccaaataattagattagctttaatgagtgcacactacaaacaaccattagattggaacgacaaattattaaatgattgtgaaactactttagataaatggtataaagtgtactcaccaaatctaaattctgtcaaggtttcagaagaaattttaaaaccattatatgaagatttaaatacacctggatatattgccaaccttcacaagttatatgaaaaagctaatagaggtgaaaacatagacttatttgtttctgcatgtaaatttattggtttgatgagtgaaactagtgagcaatggaatgagtttaaaaagaatagagtatctataactgagtctgaaattgaaaatttgcttagctccagagataaagccagagaaaataagaattataaagaagctgatagaattagagatgtgctattagacaaaggtgttttaatagaggacaaagatggtaaaacactctggaaatttaaatga

SEQ ID NO: 299483 - DNA, 1171 bp, Unknown
  Bacterial polypeptide expressing nucleotide sequence isolated from the Sargasso Sea
aatgcttaagttatacaattcatataacaattcaatagaaaaaattgatttaaataaaagagaagtaaaaatttacttatgtggaccaactgtacagtcctcacctcatttaggtcatggaagatcagcagttgtttttgattttcttgtcaggtatctaaagtatttaaaatacaacgtcatatttgttagaaatattactgatatagatgataagataatcgaaaagtcttttgaagagggtatctcttataaagagcttgcaattagagtttcaaaagaatttgattatgcttaccaaaagctaaattgtattaagccagataaagaacctagagcaactgaatttattaaagagattattagttatattgaaacattaataaaaaatgaatatgcatatataactaaatctggtgtctactatgatatttcaaaatttgacgaatatttattgttgtctggaagaactaagaatgaggtaatttcaggaacaagagttgaattagaagaagacaaaaatgcaccagaagactttgctctctggaagttctcaaaagaaaatgaaccatattgggagtctccttggggaaacggtaggcctggttggcatattgaatgctcttcaatgattgaagcaattcttggtagaactatagattttcattgcggtggaaatgatttaatttttccacatcatgaaaatgaaattgcacaatcaaaaggagcgtacccaaaagaacaatttgtaaaatattggcttcataatggaatgttaaatttatctggcaaaaaaatgtccaaatctgatggaaatattaaattattaaacgaatatatagatgaattcagtggtccagttctaaggtttttctttttaaaatctcaatatagaagccctcaagaattcaatgtcaatttgttaaaagaatctgaatcaacattaaacaatttgattgactttacatatggagttgattcagaactaaagagtaaagaggtcttagacatttttgaagattctatgaatgaagatttaaatactccaaaaatgttaggaagcttatttaagttaataaatgaatcggatacattaaatgagcagaagttatcggaattaaaatcaagcattaaatttgtttttaatcttcttggttttgacttaataaaa

SEQ ID NO: 299484 - DNA, 661 bp, Unknown
  Bacterial polypeptide expressing nucleotide sequence isolated from the Sargasso Sea
aatgaataaagatatttttttaacaaatagttttggtaataaaaaagtaaaatttagcccaatcgacccaaaaaaaattggcatgtacgtctgtggtccaacagtttatgagagtccacatattggcaatgcacgaccattagtagtttttgatattttatttaaagtccttaaatgcaaatatggcaaagactctataacctatgttagaaatattactgatatagatgacaaaataattactagttcaattgaaaataagatatctgttagtgagttaactggtaaaattacatctattttccatgaagattgtaaatatttaaattgtgaaagccccacacatgaacctagggctacagataatatttctctgatgattgacatgataaataaacttataaaaaataattttgcctatgaaaaaaatagccacgtatactttgaagtaaaaaagtttgacgattatggaaaattatcaaataaaaatttagatgagcttgttgctggagcgagagtagagatatccaaaaataaaaaaaatcctgaagattttgttttatggaaaccatcatcaaatgatgagccatattgggattcaccttggggcaagggaagaccaggctggcaccttgaatgttcagttatgtcaaaaagattc

SEQ ID NO: 299485 - DNA, 910 bp, Unknown
  Bacterial polypeptide expressing nucleotide sequence isolated from the Sargasso Sea
tatggaaattcgattatataactcaaaaagtaagaaaaaagagatatttcatcctgttaatgatgaaaatgtgactatgtatgtatgtggcccgacagtttatggggcacatcatattggtaatgcaagaccagcagtagtttttgatgtattggcaaaattactaagaaataaatataaaaatgttacatatgcaagaaatataactgatgttgatgataaaataataaatgctgcttttgagcaaaatgttgaaatatctgaaattaccaagaaatctacaaatcaatatcactcagatatgaaaattttgaatgttgaaaaacctaataaggagccttatgcaacacaatttatttctgagatgattttatttattgaggatttaataaaaaaagataatgcatacttttctgagggacatgtgttatttaatattgattcttataaatcatatggggatttatctagcagagatcctaaagatatgattgcaggctcaagagttgaagttcaagattacaaaaaaaaccctttagattttgttttgtggaaaccttctaatgaaaatgagattggctgggacagtccttggggaagagggcggccaggatggcacctagaatgctcgactatgattctagagatatttggagaaactatagatattcatggtggaggtgaagatttaaggtttcctcatcatgaaaatgagtgtgcgcagtcattttgtagaaatgatggtaagcaattagcaaatttttggttacataatggaatggttcaaatggcagattccaaaatgtctaaatctcttggaaatattcttttaattaaagatttaattaatgaaatgcccggcgaagtaataaggctatctttaatgagctctcattataggcagccttaa

SEQ ID NO: 299486 - DNA, 1015 bp, Unknown
  Bacterial polypeptide expressing nucleotide sequence isolated from the Sargasso Sea
cacagatcacattgctgaaatgattgaaatgatccaaggtttgattgataagagccatgcttatgagaatcaaggacatgtttttttcagcatagatacatttgatgattatggtttcctctccaatcggtctgaagaggagcagatttcaggaacacgaataaaaccatccgaaataaaaaagaatcaaaaggactttgttttatggaagccatctactggggatactcctggctgggaaagtccgtggggttttggaaggcctggatggcacctcgaatgctctgcgatggcaaaaaaatatcttggaaaaacattagatattcacggaggcggtagcgatcttctgtttccacaccatgaaaatgaatgtgcgcagagcatgtgctctcattcagggaagcccttggcaaactattggattcacaatgggatgatcgattttgataacgtaaagatgtcaaaatctgagggaaaccttttgcttattcgagatcttctaaaacaaattggaccagaggtcattcgcatggcatttttaacaactcactatcgaaaacccatcaattggaatgatgctcttatcaccgattctgagaagaagctcgatcgcttatatggttccatcagaaagctaggtaaagtttcaccagcagaaccaacagaagagatgatcaatgcgcttgcagatgacattaatacacccaaggccttaagtgagctattcgccattgcaaaaagagttaataatgcaaaatcagaaaatgaatccaagcagcttgcatcgacacttgttgggtctgcaaatttattgggtttgatgaatgaagatgctgaaaagtggttcgaaaacattgatgtagatgagaaattaattgaccgactcttaaatgaaagagaggcagccaggtcagataaagatttcgaaaaggccgatcagattaggcaggaaatcgagtcacttggcgtgtcaatagaagacggccctgacggccctatttggaaaaagcaataa

SEQ ID NO: 299487 - DNA, 1225 bp, Unknown
  Bacterial polypeptide expressing nucleotide sequence isolated from the Sargasso Sea
atggatatttttttaactaataatttaactaataaaaaagaacaattcgttccaaaagataaaaaacatattggaatgtatgtttgtggaccaactgtatatgatgacccacacattggaaatgcgagacctttagttatttttgacattctttttagactactaaagaatattttttctaaagtaacatatgtaagaaatattacagatatcgatgataaaataatcaaatcatcacaagaacaaaaaatatcttcgaaagaattaacagaaaaagtaacatatagttttttagaggattgtaagtttttaaattgtgaaaaccctacccatcagcctaaagccactgaacatattgatttaatgatagaaatgataaatcaattaataaaaaaaggttttgcttatgaaaataataatcatgtttattttgaagtaaaaaaattttctgactatggaaaattatccaataaaaagttagatgatttaatagctggatctagagtagaggttagtgaaaataaaaaaaattcagaagattttgtattgtggaaaccatcaaatacaaatgaaccttcatggaattctccttggggaaaaggaaggcctgggtggcatttagaatgttctgcaatgtcaaaaaaattcttaggaaatgaatttgatattcatggaggaggtatagatttaattttccctcatcatgaaaatgaaatagctcaatcaaggtgtgcaaatgactctaaaatttttgcaaatttttggatacataatgcatttattacaatgtccaatgaaaaaatggctaagtctcaaggaaatattttaaaaattaaagattatagaaacaaaatgagcggacaaataattagattagcattgatgagcgctcattataaacaaccattagattggaacgataaattaattaatgattgtcaaaatactttagataagtggtatcgaatttattcatcagatataaaatctgtccaggtaacagaagaagttttgaaacctttacatgaagatttaaatactcctggctatattgctaacttgcatcaactttatgaaaaagcaaataaaggcgaggataaagaattatttatatcagcatgtaagtttattggtttatttagtgaaaatattcagcaatgggaaaaatataaaaaagataaagctacaattagcgagtcagagattaatagtaaaatagattaag

SEQ ID NO: 299488 - DNA, 1381 bp, Unknown
  Bacterial polypeptide expressing nucleotide sequence isolated from the Sargasso Sea
atgttgaagatttacaacagtattacccgccaaaaacaggaatttaagccaattactcccggaaaagttgggatgtatgtatgcggggtgaccgtatacgatctgtgtcatattggccatgggcgtacttttgtttccttcgatatgatcgttcgctacctgcgttacgcgggttatgaggtgaattttcaacgtaacatcaccgacattgatgacaaaatcatcaaacgcgccaacgaaaatcaagaagattgcaatacattaaccgatcgcttgattggtgaaatgcacaaggatttcgatgcgctgaatatgatccgtcccgatttcgagccacgtgccactctgcatatttccgaaattatcgatatggttgagcgtttactggcccgcgggcatgcctatgtggctgccgatggcgatgtgctgttcagtgttgcctctttccctgagtacggtcgtctatcaggtcagaacctggagcaattacaggctggtgcacgggttgaggttgacgataacaagcaaaatccaatggatttcgtgctgtggaaaatgtctaaaccgggcgagccaacatgggaatcgccatggggaccgggtcgtccaggctggcatatcgaatgttcggcaatgaacagcaagcacttaggtctgcatttcgatattcacggtggcggttcagatttacaattcccgcaccacgagaacgaaattgctcagtcttgctgcgcccatgatacgccatacgtgaattactggatgcacacaggcatggtgatggttgaccgcgagaagatgtcaaagtctttaggtaacttcttcaccattcgtgatgtattaggccattacgacgctgaaaccgtgcgttacttcctgctatctggtcattatcgtagtcaaatcaactactcagaagaaaacctcaagcaggcgcgtgccgccttagagcgtttatacactgcgattaaagatgttgacctgatggtagcaccagcaccagctgaagagtttgttgctaagtttaaagcggcaatggatgatgactttaatacgccagaagcttactcagtgctgtttgatatggtacgtgagatcaaccgcttgaaagccactgatatggcgcaggcttcagctatggctgttgccatgaagcaattggccgatgtattgggattattgcaccaagcgccagatgccttctttaaaggcgaaggtagtgacgatgaagtggcagagattgaagcgctgatcgttgagcgtaatcgtgctcgcgccgagaaagattggcctgcggctgatgttgcgcgtaatcggttaaatgagcttggtgtggttttagaagatggtccaagcggtaccacttggcgtaagaaatagg

SEQ ID NO: 299489 - DNA, 1357 bp, Unknown
  Bacterial polypeptide expressing nucleotide sequence isolated from the Sargasso Sea
atgaagatcaaactctacaattcaaacaccaagagcaaagagctatttgttcccattgaccccaaaaaagtcacaatgtatgtctgtgggcccacagtatatagttatcctcatattggaaatgcgagaggccctgtcatattcgatgttctagcaaggcttttaaggagggaatttgatctcacatacattaggaatataacagacctagacgacaaaatttatcaggcagctgatgatgagggcgtgcatatttctgaagttacacagcgttatacaaaaatttatcaagaagacatgactgccttaggtgttgaaaaaccagatttagagccattagcaacagagcatattcctgagatgattgaaatgattcaggtattaattgataaaaagcatgcatatgagagtcaaggccatgtttttttcagtgtagagacatttgatgattatggtttcctgtctaatcgaacagaagaagaacagatttcaggaacaagaataaaatcttcagaaataaaaaataatcaaagggactttgtactctggaagccatccactggggaaactcctggttgggatagtccttggggttttggaaggcctggttggcatcttgaatgctcagcaatggcaaagaaatatttaggaagaacattggatatccatggtggtggaagtgaccttttgtttcctcatcatgagaacgaatgtgcgcagagcatgtgctcacattcaggagaaccactcgcaaactattgggtccataatggaatgatcgattttgataacgtaaagatgtcaaaatctgaaggcaatcttttgcttattcgagatctcctaaaagaaatcagaccagaggtcatacgaatggcatttttaaccacacactatcgtaaaccaatcaattggaatgatgcattgatcagtgattcagagaagaagcttgatcgcttgtatggttcgatcagacaattggggaagatctcaccaggagagccctcagaagaagttttgaatgcaattgcagatgatatcaatacgcccaaggcactgagtgaactttttgccatagtaaaaaatatcaataatgcaaaatcagatgaagagtctagaaaattggcatcaattttaattgggtcagctcatttattgggtttgatgaatcaagatgcagaaatatggtttgaaaacatcgaagttgataaggcattaattgatcatcttttgactgagagagaagcagcaaggtccaatagaaattttgaacgagctgatcaaattagacaagagatcgagtcactcggtgtaacaatagaagatggtccagaaggaccagtttggaagaaactataag

SEQ ID NO: 299490 - DNA, 994 bp, Unknown
  Bacterial polypeptide expressing nucleotide sequence isolated from the Sargasso Sea
tatcgatcttatgattcaaatgataaatgatttaattaaaaaaggtttcgcatatgaaaataaaaaacatgtttattttgaggttaaaaaattttctgattatggaaaattatctaataaaaagttagaagatttagttgcaggatctagagtagagataagcgaaaataaaaaaaattcagaggactttgttttatggaaaccatctaatgaagatgagcctgcttgggattcaccttggggcaaaggtaggccaggttggcatttagagtgttcagcaatgtcaaaaaaatttttaggtgatgaatttgatatacatggtggaggtatagacttaatttttccacatcacgaaaatgaaatagcacaatctagatgtgcaaatgatacgaaagtttttgcaagatattgggttcacaatgcatttattacattatccaatgaaaaaatggctaagtctcaaggtaatattcttaagataaaagattttagaaataaaattagtggtcaaataattagactggctttaatgagcgctcactataaacagccattagattggaatgataaacttttaagtgattgtgaaagtactctagataaatggtataaagtttattcatcaaatcttaaatctgtcaaaatatcagatgaaattttaaaaccattatacgaagatttgaatactcctggatatattgccaatcttcacaagttatatgaaaaagctaataaaggtgaacatgtagacctatttgtttcagcatgtaaatttattggtttgatgaatgaaactagcaaacaatggaatgattttaaaaagaatagagtattaattactgagtccgaaattaaaaatatgcttagtttaagagataaggctagagaaaataagaattataaagaggcagatagaattcgagatgagcttttagacaaaggtgttttattagaggataaagatggtaaaacactgtggaaatttaaagagtaa

SEQ ID NO: 299491 - DNA, 877 bp, Unknown
  Bacterial polypeptide expressing nucleotide sequence isolated from the Sargasso Sea
gatgaataaacaattaaatatatttaacactctttcaggaaaaaaagaaaaatttatacccattaatacgggtaaggttgggatgtatgtttgtggaccaactgtttacgattttccacatattggaaacgcaagaccacttgttgtttttgatgttctatttagattgctaaaaaaacttaatggtaatgataaagttacttatgtgagaaatataactgatattgatgataaaattatcgaagcctctaaaaataaaaaaattccaatagataagcttacaaatgatattacaaaaaactttcacgacgattgtaaatatttaaattgtttaaaaccaaattttgaaccaagagctacagaacatattaaaggaatgattagtatgacagaaaatttattgaataataaacatgcttatgaaaaagacaaacatgtctatttttcagtaaactcttttaaaaattatggaaagttatctaataagaaacctagtgaacttgaggcaggttcaagagtagagatttcaaaattaaaaaataatccattagattttgttctttggaaaccatcttctacagatgatcctggctgggattctccttggggtcggggtagaccaggttggcatctcgagtgttcagttatgagtgaaaaatatttaggaaaaaattttgacattcatggtggtgggttagatcttgtttttcctcatcatgaaaatgaaatagctcaatcttgttgtgcaaataaaacagataaatttgcaaactattggttacacaatggttatgttacttataataaagagaagatgtccaaatcattaggtaatatagtcacaatgcaaaaaatgaaaaataaaattaatggtcaa

SEQ ID NO: 299492 - DNA, 1111 bp, Unknown
  Bacterial polypeptide expressing nucleotide sequence isolated from the Sargasso Sea
atggaaagttcaaaaaacaaaaaaataccaatagaagaactaccctcgaaaattacgaaaagttttcatgatgattgtagatatttaaactgtttatctccaagttcagaaccgaaagccaccgagcatattaaaggtatgattactatgacagaaaatcttttaaaaaataattatgcttatgagaaaaataatcatgtatatttttcaataaattcatttcaaaattatggtaagttatcgagaaaaaatcctgaagaattagttgcaggagcaagagttgagatttcgaaattaaaaaaacatccccttgattttgtactttggaaaccttcgtcaactgaagaccctggctgggattctccttggggaaggggaagaccaggatggcacctagagtgctcagttatgagcgaaaaattccttggaaaaaactttgatatccatggagggggattagatctaatttttcctcatcatgaaaatgaaattgcacaatcatgttgtgcaaataaagttgataaatttgcaaattattggctgcataatggctatgtcacttttaacaaggagaaaatgtcaaaatctttaggaaatattattactatagaaaaaatgagaaaaacaattaatggccaggttattaggcttgctctattgagctctcactataaacagcctttagattggaatgaaaatttaattaaggatagccagactactcttgataaatggtatacacagtttgaaaataccaaagaggaagttttaaacgaagatttgttagagccacttttagaggatataaacacccctggttatatagcaaaattacactcattgtatgataaagcatcaaaaggagacacttcttcaaaaaaactttttcttgctgggtgcaaacttattggtttattagaggaagatttagaaacatggaataaatttaaaaaaacaaaattaaaaattgacgaaaaaactattcaaagcaaaattaaagacagagatcaagccagaaaaaaaggtgattataaattggcagacagcataagaaaagaacttgaaatcgaaggtgtaattattgaggataaagataataaaacaatttgga

SEQ ID NO: 299493 - DNA, 253 bp, Unknown
  Bacterial polypeptide expressing nucleotide sequence isolated from the Sargasso Sea
catgagtttgaatctctataacaccttaacaaataaaaaagaggtttttaaatcaattgaaccaaatgtggttggcatgtatgtttgcggaattactgtttacgatcattgtcatcttggtcatgcaagagcatatgttgcctttgacgtcctagctagatatcttaaatatttaggttataagctaaattatgtcagaaatattactgatgttgaggacaaaataatcaaaaaagcaattgagaattctgaa

SEQ ID NO: 299494 - DNA, 988 bp, Unknown
  Bacterial polypeptide expressing nucleotide sequence isolated from the Sargasso Sea
tatggttaaaatgatagaggatttaatcgataaaaattatgcatacattaataataaccatgtttactttgaggttaaaaaatttaaagattatggaaaactttcaaataaaaatttagaagaattggttgctggttctcgggtagaaatatcagaaaataaaaagaatgcagaagattttgttttgtggaaaccatctaaagaaaatgaaccatcttgggactccccatgggggaagggtagacctggctggcatttagaatgttctgtaatgtcaaaaaaatatcttggaactaaatttgatattcatggtggtggcagagatttaatatttcctcatcatgaaaatgaaattgctcaatctcgatgtgcaaacgatactgatacatttgctaattactgggtgcataatggatttataactatttcaaatgaaaaaatggcaaagtctcagggtaatattttaaaaattaatgatctaaaaaaaaatattaatggtcaagttttaagattggctcttataaccactcactataagcagccattagattggaacgataaactacttggagaatgtcaaaaaactttaaacaaatggtatgattgttatattcaagttaaaaagaaagtcttaattccagatgagttattggcgccactttatgatgatttaaatactccaagttatatagcaaatattcataaattatatgaaaaggctcatcaaggaaatgatcaagataaggaagtttttacaactgcttgtaactttataggtttgctctctgaaacaaaagatcagtggcttaagtttaaaaaagaaaaatctgagatatcagaagaagaaatattatctaaaattaaagcgcgtgataaagctaggaaagataaagattataaactttctgataaaattagagatgagttgcttaacaaaggtgttttaatagaggataaagatggtaaaaccacgtggaaattaaaatga

SEQ ID NO: 299495 - DNA, 448 bp, Unknown
  Bacterial polypeptide expressing nucleotide sequence isolated from the Sargasso Sea
atgagtaaagatatttttttaacaaataatctaacaaataaaaaagagaagtttgttccattagataaaaacaacataagaatgtatgtgtgtggtccaacagtttatgatgaccctcatattggaaatgctagaccaatagttgtatttgatatcctttttaagatttttaaaaaaaattattccaaagtaacctatgtaagaaatatcaccgatgtagatgataaaattataaaatcttctaaagaaaataatatttctatttcagaattaaccaacaaagtaacacaaagctttagtgaagattgtacttacttaaattgtgatgcaccaacatatcaacctaaggcaacagaaaatatagatttaatgattgaaatgatttctgaattaataaaaaaaggatttgcttatgagaacaataatcatgtttattttgaagtaaaaa

SEQ ID NO: 299496 - DNA, 1399 bp, Unknown
  Bacterial polypeptide expressing nucleotide sequence isolated from the Sargasso Sea
tatggaatcactgcgcatctacaacacgctcgcgcgtgacaagcaagtcttcgtgccgcgccagtccggcgaagtgcggatgtacgtatgcggaatcaccgtatacgactattgtcacgtgggccacgcgcgcatgctggtcgtgttcgacctcgtccagcgctggttgcgtgcgatcggttaccgggtcacgtatgtgcgcaacatcaccgatatcgacgacaagatcatccgccgcgcggtcgagaacggcgagacgatcaagtcgctgaccgaccggttcatcggcgcgatgcacgacgatgaaagcgcgctcggcatccagcggcccgacatcgagccgcgcgcgaccgagttcatcccgcagatgctcggcatgatcgagacgctcgagacgaacggctacgcgtaccaggcgaccgacggcgacgtcaactactcggtgcgcaagttcgcgaactacgggaagctgtcgggcaagtcgctcgacgacctgcgcgcgggcgagcgcgtcgccgcgaacgacgcgaaggaggatccgctcgatttcgtgctgtggaagcgcgcgaagccggaggatccggagggcacgtcgtgggcgtcgaagtacgggatgggtcgcccgggctggcacatcgagtgctcggcgatgggctgcacgctgctcggcgagcatttcgacatccacgggggcggccaggatctgcaattcccgcaccacgagaacgagatcgcgcagagcgaaggcgcgaccggccagacgttcgtcaattactggatgcacaacggcttcgtgcaggtcgacaacgagaagatgtcgaaatcgctcggcaacttcttcacgatccgcgaagtgctcgaacgctacgatgccgaagtcatgcgcttcttcatcgtgcgcacgcactaccgttcgccgctcaattacagcgacgtgcatctcgacgatgcgcgcgcgtcgctcacgcgtctctataccgcactgaaagatgttgaagccgacacgctcgcgcttgactggaacgagccgcacgcgcaacgtttcgccgccgcgatgaacgacgatttcaacacgccggtcgcggtggcgacgctgttcgagctggcgggcgaggtgaatcgcacgggcgacgcatcgctcgcgcggcaactgaagcagctggcgggcctgctcggcctgctggggcgcgaaccgcgcgcgttcctgcagcaggcgtccggcgccgcgcaggcgggcgggctcgccgccgacgagatcgaagcgaagatcgccgcgcgtgtcgcggcgaagcaagcgaaggactatgccgaagcggaccggatccgggcggaactgctcgagacgggtatcgcacttgaagacaaaccgggcggatcgaccgaatggcgtcgcgtatga

SEQ ID NO: 299497 - DNA, 820 bp, Unknown
  Bacterial polypeptide expressing nucleotide sequence isolated from the Sargasso Sea
aaaaattctgaggattttgttttatggaaaccatcagttaaggatgagccttattgggattctccttggggacctggtaggccaggatggcatttagagtgttctgctatgtcaaaaaaacttttaggtgataaatttgatatacatggtggtggtattgatttaattttccctcaccacgaaaatgaaattgctcaatctagatgtgctaatgacactgaagttttcgctaatttttggattcataatgcttttattacaatgtcgaatgaaaaaatggccaagtctcaaggcaatatcttaaagataaaagactttagaaaaaaaatgagtggtcaaataatcaggttagcactgatgagtgcacattacagacaacctttagattggaacgataaattattaattgattgtgaaaatactttagataagtggtatcgaataaaattagacaatttcaaacctgttaaaatccctgatgaaatattgaaacctttatacgaagatttaaacaccccaggttatattgctaatctccatggtttgtatgaaaaagcaattaaggatgataacaaagatttatttatatcagcatgtagatttattggtttattaaatgaaacgagtgagcagtggcataattttaaaagagatagagtttcgttaagtgagcctgaaatcgaaaaaatgataaacttaagagataaagctagagaaaataaggattataaagaggctgatcgaattagagatgaactttcagacaaaggtgttttaatagaggacaaagatggtaaaacactgtggaaatttaaatgag

SEQ ID NO: 299498 - DNA, 697 bp, Unknown
  Bacterial polypeptide expressing nucleotide sequence isolated from the Sargasso Sea
ttgggaaaaatatttgatattcatggcggtggtcttgacttgatctttccacaccatgaaaatgaaattgctcaatcctgttgtaataatgctactagtagctttgctaattattgggtgcacaatggttttgtaacttttaataaagaaaaaatgtcaaaatcattaggtaacattataactatttctgatgctgtaaaaaaatatacaggccaagttgtaagactagctttactaagcgctcattatactcaaccattagactggaatgacgaacttttaagcaatcaaaaaaatattcttgataaatggtacaatctttatcaagaacaaaaaaactatgaaactttggacgttacagatatcttattagacgatttaaatactccaggatttatagcaaaaatacacgaactatataaccaagctaataatggagattcggataaaaaattattatttaatagcgcttgcaggtttataggtttatttaatatgtctaagactgagtggcaaaatttaaaaaagaaacaaataaaaatttctgaggactatattgagagtaaaatcgaggaaagaataaaagcaaagaatactggaaattacgatatcgctgataaaatcagagaggaattatcaaacgcaggaatactaatagaggatgaaaaaggtaaaactaggtggagatataaatgag

SEQ ID NO: 299499 - DNA, 700 bp, Unknown
  Bacterial polypeptide expressing nucleotide sequence isolated from the Sargasso Sea
aatgaacaaagatatatatttaactaatagtcttggcggtaaaaaagaaatatttaaaccgatagatccaaaaaaagtaaaaatgtacgtatgcggaccaactgtctatgatgatccccatataggtaacgcaagacctttagtagtatttgatattctgttcaaggttttaaaatgcaagtatggaaataaatcagttacttatgttcgaaacataactgatatagacgataaaattattgaaagcgcaaaacaaaaaaaaatatcaatagatgttttaactgaaaatattaccaatagttttcacaatgattgtgattatttaaattgtgaaaaaccatcttttgagcctaaggcgacagagaatatttctttaatggttgaaatgatcaatgttcttcttaaaaataaaaatgcttatgaaaaaaattctcatgtttatttcgatgtttctagttttaaagattacggaaaattatcaaataagaatatagatgaattaaaagcaggagctagagttgaggtatcggaaaataaaaagaatccagaagattttgtattgtggaagccgtctaataaagatgagccaagttgggactcaccctggggtaaagggagacctggttggcatttagagtgttctgcaatgtcaaaaaaatatctcggtgatacttttgatattcatggcggaggaagagat

SEQ ID NO: 299500 - DNA, 814 bp, Unknown
  Bacterial polypeptide expressing nucleotide sequence isolated from the Sargasso Sea
tatgaaaaacgaagtttctttcaagatatttaattctttaaacggccaaaaggaagaatttaatccttgtaatcctgagcacataaaaatttatgcttgtggccctacagtttacaattatgcgcatattggtaatgctcgaatggcggttgtgtttgatacctttgtaagaactttaagaattttttatcctaaagttacatacgtatcaaatattactgatatcgacgacaaaattatagaggcggcgcatgagcagaaagtagaaatttcttcaatcactgaaaaatatacaaaaatttacaatgatgatatggctgaattaaatgttttgatgcctgacatacagccaaaagctactgaatatattccagaaatgattgaattaattgaggatttaatttcaaaagattttgcatatgaaaaagagggccatgtactttttcacgttcctaattatgataattatggaaaactttcaaaaagaaatagagatgaacagattgcaggcagtagagtagagatagcaccttttaaaaaagatcctgctgattttgttttatggaaaccaagtgataaatcacaaccaggttgggattctccttggggggtaggtcgcccaggatggcatacagaatgctcagcgatgtccaaaaaaacattaggtcttccttttgatattcatggtggcggtagggacttaatttttcctcatcatgaaaacgaaatagctcaaagttgctgttcttccgcaaacattgaagatcctacatcttatgctaaatattggatgcataatggttttgtaacgatt

SEQ ID NO: 299501 - DNA, 1363 bp, Unknown
  Bacterial polypeptide expressing nucleotide sequence isolated from the Sargasso Sea
tatggtcttaaagattcacaacaccttgtctggaacaaaagaaacctttgagccagtcgacaaaaatcacgttcgaatttatgcatgcggtccaacagtgtataattttgcccatattggaaatgcaagaatggccgttgtgaatgatctcttagtgaatgttttgagaacacagttcaagagagtaacctatgtatcaaacataacagatattgatgataaaattatagatgccgccgatgaactaaatgagccaataaaaaacttaacgacaaaatatacgaaaatttacaacgatgatatgggctttttaaatgttaaacttcccgatatacaaccacatgctactgatcatatcagtgacatgatagatctaataaaaaaactaattaaaaataattatgcttacgaaaaagatgggcatgttctttttcatgtaccaagcttttcaaagtacggagttttatcaaaaagaaatcgtgatgaacaaattgcaggaagtagagtagaggtagcgcctttcaaaaaagatcctgcggattttattttatggaaaccatcaccagatccattgccaggttgggagtctccttgggggtttggccgtccgggttggcatctcgagtgttctgcaatgtctgaaaaaacattagggttaccattcgatattcatagtggaggaatggatttagtatttccacaccatgaaaatgaaatcgcacagacttgctctttagatgataatcatgagccagaaagttttgcaaaattttggtttcataatggctttgtaaatgttgagggtgaaaaaatgtctaagtctattggcaacataaaattagtttatgatcttaaaaaacaatacaaaggagaggtgctaagattgactcttttatccgctcattataggcagcctttgaactggactaaagaaattatagatcaaaacagcaaaatgcttgatcgtttttatcgctctcttaaagatctgcaagatatagaaatttcttcagggagtatatcagaggaaataatggaaagtttattagatgaccttaatactcctaaagttttggctaaactcaatacattatctaacacactatcatcagcaaatagtgaagaaaaacgaaatattaaaaacaatttaatagctgtaggaaaaattcttggtgtaatgcaagaagatccaaacatatggctgggttacaaccagacagcaaatcctgaaaaagaggagatagaagggttgataaatcaacgcaatgaagctagacgcagtaaggattttaaattagctgatcaaattagggataagcttaaatctaagggtatagaaatagaagatacaaaaaacggtact

SEQ ID NO: 299502 - DNA, 1258 bp, Unknown
  Bacterial polypeptide expressing nucleotide sequence isolated from the Sargasso Sea
gatgttaaaaatctttaatacactgacgcgccaaaaagaggaattcaaacctattcatgccggggaagtcggcatgtacgtgtgtggtattaccgtttacgatctctgtcatattggccacggacgtacctttgtttctttcgacgtcgtcgcgcgctacctgcgcttcctcggctataagctgaagtatgtacgcaacattaccgatattgatgacaaaatcatcaagcgcgcgaatgaaaacggtgaaagctttgtcgcgttggtcgacagaatgatcgcggaaatgcatagcgatttcgatgcgctgaatattctgcgcccggatctggagccgcgcgcgacgcaccatatcgctgaaattatcgaaatcactgagcagttgattgccaaaggtcacgcctacgttgctgataacggcgacgtgatgttcgacgtgccgactgacccgaactacggtcagctgtcacgccaggatctggatcagctgcaggcgggtgctcgcgttgacgtggttgatgtgaagcgtaacccgatggacttcgtgctgtggaaaatgtccaaagaaggcgagccgagctggccgtctccatggggcgcaggtcgtccgggctggcacatcgaatgttcggcgatgaactgcaaacaactgggtaaccatttcgatattcacggcggcggttcggacctgatgttcccgcatcatgaaaacgaaatcgcgcagtccacctgtgcgcatgacggtgagtacgttaattactggatgcactccgggatggtgatggttgaccgcgagaaaatgtctaaatcgctgggcaacttctttaccgtgcgcgatgtgctgaaatactacgacgccgaaaccattcgctacttcctgatgtcgggtcactatcgtagccagctcaactacagcgaagagaacctgaaacaggcgcgttctgcgctggagcgtctgtacactgcactgcgcggtaccgacaaatccgttgcccctgcgggtggcgaggcctttgaagcacgtttcattgaagcgatggacgatgacttcaacacgccggaagcttactccgtgctgtttgatatggcgcgtgaagttaaccgcctgaagggtgaagatatggcggcggctaacggtatggctgcgcatctgcgcaagctctccagcgtgctgggactgctggaacaggatccggaagcgttcctgcaaagcggggcgcaggcggatgacggtgaagttgctgaaattgaagcgtta

SEQ ID NO: 299503 - DNA, 1162 bp, Unknown
  Bacterial polypeptide expressing nucleotide sequence isolated from the Sargasso Sea
agatatagacgataagattattgaagcagcagttgagcaaaatgttgagatatctgtgattacaaaaaaattcacaaaaatatataacgaagacatggccaaacttaatgttctagcgcctgatgttcaacctaaggcaacagaatatattcctgaaatgatagacctaattaaagaactcatcgagaaagattttgcatatgaaaaggatggacacgttttattccatgttccaacttatgaaaattatggcaagttatcaaatagaattaaagatgagcaaattgctggaagtagagtagatgttgcagattttaaaaaagatcctgctgattttgttttgtggaaaccaagtactggtgtgcaacctggctgggagtcaccatggggcattggaagacctggatggcatactgagtgttctgcaatgtctgaaaagactcttggattgccgctagacattcatggaggaggcagagacttaattttccctcatcatgaaaatgaaattgctcaaagttgttgtactgctgcagaaaatagtaatcctgaatcctatgcaaaatactggatgcataatggttttgtaacaattgatggcgaaaagatgtccaaatctcttgggaatattattttggttaatgaactcacacagaaatatcatggagaagtaattaggctagctcttttgtccactcattacagacaagcacttgattggaatgataatgtaattcatcaagctaaaaagttgctggataaattatattctttattaaatgagctaaatgatgtcaaagaaagtaaagagcctgataacgatttaattgagatattgttagatgatttaaatacaccaggtttaatagcgaatataaataaattaataaaaaatgctgaatctcgagaagaagatgacaaacctaacctcaaatcaaatcttttactaattggaaaactgatgggtattttggaggatcaatcatacaatcagatttctgatgaattcaaagataaagttgatagccttattgaagatcgatcaaatgcgaagaaaaaaagagattttgaattagcagataagattcgctcagagcttatagaattgggggttgaaataaatgattcgccagagggaaccacatggaaagttgttaaatga

SEQ ID NO: 299504 - DNA, 786 bp, Unknown
  Bacterial polypeptide expressing nucleotide sequence isolated from the Sargasso Sea
aaaatgaaccatcatggatttctccgtgggaaaaaggtagacctggttggcaccttgaatgttcagtaatgtcaaaaaaatttttaggtgataaatttgatattcatggaggtggaatggatttaatttttcctcatcatgaaaatgaaattgcgcagtccagatgtgctaatgaaaatgaaacatttgctaattattgggttcacaatggatttataacaatctcaagtgaaaagatgtcaaaatcacaaggcaacattttaaaaattggtgattttaaaaataaagtaagtggacaagtgttaagattagctttgattagtgcacactataaacagtctttagattggaatgataagcttttatctgagtgtgaaaaaacaattaataaatggtatgaaagttatactgatattaaaaaacaagtattaattcctgaagattatctttctccattatatgacgatttaaatacaccaggctatattgctaatcttcataaactttttgataaatctcaaaaaggttcaattaaggataaagaaatatttgtttcagcatgtaattttattggtcttttaaatgaaaataaaaacacatgggatcaatttaaacaaagtaaatctgtgatttcagaagaagaaattaaacaaaaaattactgaaagaaataatgccagaaagaataaagattataaagctgcagataaaattagagatgaattattagataaaggagtattaattgaagacaaagatgataaaaccctctggaaatttaaatgag

SEQ ID NO: 299505 - DNA, 396 bp, Unknown
  Bacterial polypeptide expressing nucleotide sequence isolated from the Sargasso Sea
gatgatcaaactttttaatacattaaacaaaaaagttgaggtttttaagcctattgatgatgaagtaaaaatttattgttgtggagtaactgtttatgatttatgtcatcttggtcatgcaagaagttatatagcctgggatatcttgagaagatttttaatttacagtgatttcaaagtgaaatatgttcagaattttacagatattgatgacaagatcttaaaaagggcaaaagaagaaaatagttcaatgcaggaagtatctgaaaagaatattattgaatttcacaaagatatggatgctctaggaattatgcgtccagacagcatgccaagagcgactaatcatatatgcaatatctgctcttttcatacaattcttgaggaaaaaggtta

SEQ ID NO: 299506 - DNA, 832 bp, Unknown
  Bacterial polypeptide expressing nucleotide sequence isolated from the Sargasso Sea
ataaaaaaaaatcctgaagattttgtattatggaaaccatcaacagataaagagccttcatgggaatctccttggggcaaaggcagaccaggttggcacttagaatgttcggttatgtctaaaagatatttgggtgaagaatttgatattcatgggggcggtagagacttgatttttcctcatcatgaaaacgagattgctcaatcaagatgtgcaaatgaaacaaattcatttgcaaattattgggttcataacggatttataactctttctaatgaaaaaatggcaaaatctcagggaaacatattaaaaataaaagattttaaaaataaatataatggtcaggttttaagattagcattaattagtgctcactatagacaaggattagattggaatgaaaaactaatatcagaatgtgagaagactttaagcaaatggtattcagcctattctgttgttcataaaagtacaatattaccagacgaattattagatcctttatatgacgatttaaacaccccaggctatattgctaatttacattctttatatagtaaagcttcaactggaacgaacgaggataaagcaacttttgtaaaagcttgcaattttataggtttattaactgatacttcggaagagtggctacaaacaaaaaaaaatacaatttctctttcagaggatgaaattaattcaaaaatagctgagagaaataaagcaagagatgaaaaaaattatgaattagctgacaaaattagaaaagatcttttagataagggtattttaattgaagataaagatggtacaacctcgtggaaattaaaatgag

SEQ ID NO: 299507 - DNA, 1180 bp, Unknown
  Bacterial polypeptide expressing nucleotide sequence isolated from the Sargasso Sea
aatgaaaaaccttaagatttcaaacacattaactagaactaaagaattatttaaaccaattaattctaaaaatataaccatgtatgcctgtggcccaacagtttatgatgatccacacgttggaaatgcacgttcattagttgtttttgatcttttatttagagttctaaaaaaaatttatggagataataatgttacttatgtaagaaatataacagatgttgatgataaaattatagatattgctaaagagaaaaatttacctatagaaaaaataacttcagaagttacaaatcagtttcatttagcttgtaaaaatcttaattgcttgaatcctacagttgaacctaaagctacagaacatattaatgagatgattaaaatgacagactcattaattaaaaaagattttgcctatataaacaatgaacatgtttattttaaaatttcttcatttaaaaattatggaaaactctccaataaaaatttagatgaactaaaagcaggatctcgagtagaagtttctagttttaaaaaaaaccctttggattttgttctttggaaaccttctcgagaaaaggagccaggctgggactcgccatggggtagaggacgtccaggatggcatttagagtgttcggttatgagtgaaaaatatttaggaaaaaaatttgatatacatgggggtggtttagatttagtttttccccaccatgaaaatgaaatagcgcaatcttgctctaacaactctatagaaagaatggctaattactgggtgcataatggttttttaactatggataaagaaaaaatgtcaaaatcattaggcaatatagttagtattagtaatgctgttaaaaaatacaatggtcagattataaggctagctcttttaagctctcattacaaacaacccctagattggagtgaaaaattattagaacaccagaggagcacactcgacaagtggtactctttatatgaaaaaaaatctatttctaaagaaacaccccagtgttttgaaactctgttggatgatcttaatacaccggaatatatttcaaaacttcaccagctttacaatgaagctttgaaaggagataataagcaaaaagaatactttaataacgcttgtcgtcttataggtatttttaatgaagataaaaaagactgggaacaa

SEQ ID NO: 299508 - DNA, 1096 bp, Unknown
  Bacterial polypeptide expressing nucleotide sequence isolated from the Sargasso Sea
atggcactgtcgatctacaacacgctgagcaaggtcaaggaaccgttcaagccgctggaaggcaatagcgtgcgcatgtacgtgtgcggcatgaccgtctatgacttctgccacatcggtcatgcccgggtgatggttgccttcgacgtcgtcacccgctggctgcgtcagcgcggctatgacgtgacctatgtgcgtaacatcaccgacatcgacgacaagatcatccgccgggccaacgagaacggcgagccgttcgaggcgttggtcgagcgcatgatcgcggcgatgcacgaggacgaggcgcgcctttccgtgctgcgccctgacatcgagccgcgtgccaccggccatatcgccggcatgcaccagatgatccagaccctgatcgacaagggctatgcctacgcgccgggcaatggcgacgtgtattaccgcgtcggcaagttcgttggctacggcaagctgtcgcgcaagaagatcgaagacctgaagatcggtgcgcgcatcgaggtcgacgaggccaaagaagacccgctggacttcgtcctgtggaagggcgtcaaaccgggcgaaccgagctggcagtcgccttggggcgcagggcgcccgggctggcatatcgagtgctcggtgatgtccacctgctgcctgggcgagaccttcgacattcacggcggcggcccggatctggtgttcccccaccacgagaacgagatcgcgcagagcgaggcggccactggcaagcagtacgccaatgcctggatgcacgccggcgccgtgcgcgtggatggcgagaagatgtccaagagcctgggcaaacttcttcaccattcgcgaggtgctggagaagtaccacccggaggtggtgcgctacctgctggtgtccagtcactaccgcagcccgatcaactactcggaagagagcctcaaggaagccaagggcgccctggagcgtttctacaacggcctcaaaggcttgccggaagccgcgcctgccggtggagaggcgttcgtcgagcgcttcggcgcggcgatggacgacgatttcaactcgccggaagcctgcgccgtgttgttcgagatgatccgtgag

SEQ ID NO: 299509 - DNA, 1387 bp, Unknown
  Bacterial polypeptide expressing nucleotide sequence isolated from the Sargasso Sea
atgccgctcgtcctgtacgacacctggtcgcgcaccttgcgcgctttctcgccgatccgggcggaccacgtcggtctgtattgctgcggccctaccgtgtacgaccacgcgcatatcggcaacctgcggacctacgtcttcgaagacgtactgcgacgcgcattggcattgaacggctacagcgtgcggcacgttgtcaatatcaccgacgtgggtcatctggtctccgatgccgacgaaggcgaagacaagatggagaagggcagcaggcgcaccggcgagtcggcatgggcaatcgcggaacactataccgcggcgttcatgaacgactggcgtgcgttgaacctgctggagccgtccctgtggtgccgggcgaccgatcacatagccgaacagatcgacttcattgccgcgatcgagcgtaacggctatgcctaccgcacgaccgacggcgtttacttcgacacgagcaagcaggacgattacggctttctcgcgcgtctcgatgcagcggggctgcaaccgggcaaacgcgttgcaccaggcgagaagcggcacgcgaccgacttcgcgctgtggaaattcacccccccggataccgtgcggcaaatggagtgggatagtccatggggccggggctttccggggtggcatatcgaatgctcggcgatgtcggcgaaatacctgagcccgtggttcgacattcactgcggcggagaagatcacatcgccgtgcatcacagcaatgaaatcgcgcaaacgctggcgtgccatggaacccgtctcgccaacttctggatgcacggtcatttccttatgctggatgccggcaagatgtcgaagtcgggtggcgacttcgtgcgcctctcgacgttgaccgggcggggcatcgatccgcttgcgtatcgttacttgtgcctgagtgcgcattaccgcagcaacctgcgtttcagcatggaggcgctcgatgccgcgcaatccgcgttggaccgtttgcgccgcgcgtatgtgcaatggccggaagggggaacacccgatgacgtgtacgtcgatcgtttcaggctcgaggtcgatcaggatctgaatctgccacgtgcgctcgccgtgctgtgggacctggtgagaagcgatcttccggcggccacgcggcgggcaacggtcgattgcttcgacgccgtgctcggacttcggcttgccgactggagggaggacgtgtcggcgattcccgccgatatcgcgcgtctcgccgctgaacgcgaaagggcccgcgcggcgaaggactggaatgcggcagaccgtctgcgtgaccgtttgaaaaccgaaagctggcaggtggaggacagcgcgagcgggcaggtactgcgtcggctcgacaaggcgcaataac

SEQ ID NO: 299510 - DNA, 1414 bp, Unknown
  Bacterial polypeptide expressing nucleotide sequence isolated from the Sargasso Sea
gatgccgcttgcgctgtatgacacctggtcgcgtaccgtgcgccccttcacgcctgtccgggccgggcaggtcggcatgtattgctgcggcccgacggtgtacgaccatgcccacatcggcaacctgagaacctacgtgttcgaggatctcctgcgccgtgtactggcgcgcaacggctacgcggtccggcacgtcgtcaacatcaccgacgtcggccacctgacgtcggatgccgacgaaggcgaagacaagatggagaaggggagccgtcggaccggcgaatcggcatgggccatcgcccggcgctacaccgaggcgttcgtccgcgactggcgcgcgctcaacctgctcgagccgacggtgtggtgccgcgccaccgaccacatcgccgaacagatcgcgttcatcgatacgctcgaccgcggcggctacgtctaccggacggacgacggcctctacttcgacaccagtcggcaggacgactacgggtatctcgcgcggctggaccgcgcggggttgcaggcgggcaagcgggtggcgctgggcgggaagcggagcatcacggattttgcgttgtggaagttcagcccggccgacgtcaagcggcaaatggaatgggacagcccgtgggggcgcggctttccgggctggcatatcgaatgctcggcgatgtcggcgaagtatctcgggacattgttcgatatccattgcggcggcgaggatcacatcgccgtgcatcacagcaacgagatcgcgcagacgcgggcggcccacggcacgcagctcgcgaattactggatgcacgggcacttcctgacgtttgacgacgatacgaagatgtcgaagtcgagcggcgatttcgttcgcctggagaccttgcagagccggggtgtcgatccgctcgcgtaccgctacctgtgcctgacggcccactatcgaagcaagctgcatttcacgtgggcgtcgctcgacgcggcacacaccgcgctgaatcgactgcggcacctttatgccggctggccggacggcgggtgcgccgatgcggacttcgtcgcgcgattcgatgccgaagtgaacgaggacctgaatctgccgagggcgctcgcggtgctgtgggatctggtcaggagcaacctgccgcctgccaccctgaaagcgaccgtcgacagcttcgatgacgtgctcggccttggcttgcgcgaatggcggccggttgcgttcgacattccggaacatgtccacgtgttgctcggtgagcgtgagcgcgcgagggcggacaaggactgggcacaagccgaccggatccgggaagcgttgagcgccgagggctggagagtcgaggacacgccggaagggcaacgtctattcggcatggtgatgggttcgagcgatacagccggcgcgccgcagtaa

SEQ ID NO: 299511 - DNA, 586 bp, Unknown
  Bacterial polypeptide expressing nucleotide sequence isolated from the Sargasso Sea
aatgaacaaagatatatatttaactaatagtcttggcggtaaaaaagaaaaatttaaaccgatagatacaaaaaaagtaaaaatgtatgtatgcggaccaacagtgtatgatgatcctcatataggaaatgcaagacctttagtagtatttgatattctatataaagttttaaaatgtaaatatggaaataaatctgtcacatatgttcgaaatataactgatatagatgataaaattattgaaagtgcaaaacaaaaaaaaatatcaatagatgttttaaccaaaaatattacgaataattttcacaatgattgtaattatttaaattgtgaaaaaccatcttttgagcccaaagctacagaaaatatttctttaatgatcgaaatgattaatgttctaataaaaaataaaaatgcttacgaaaaaaattctcatgtgtattttgatgtatcaagttttaaagattatgggaaattatcaaataagaatattgatgagttaaaggcaggagctagagttgaaatttctgaaaataaaaaaaatcaagaagactttgttctttggaagccatctaataaagatgaa

SEQ ID NO: 299512 - DNA, 1172 bp, Unknown
  Bacterial polypeptide expressing nucleotide sequence isolated from the Sargasso Sea
gatgcttaaattatataattcacttactaaaaaacaggaagaaataaagatagatcaagatgatgtaaggatctatctttgtggaccaaccgtccaatcatctcctcatctaggacatggaagatcagctgtcgtatttgatttttttataaggtaccttaagtatttaaattattcagtattatttgcaagaaatatcacagatatagatgataaaataatcgaaaaatcacaggaaaaaaatataagttatcgtgaacttggagataatgtttggaaggagtttgttttagcccatgaaaatctcaattgtttggttcctgatattgagccaagggccaccgcttatattcctgaaattatcaaatatattgaacagctagttgaaaatgggtttggttatgttacaagttccggggtttattatgatgtttcaaaatttgataaatatcttgagttatcaggaagaagcattgaggatgtaaggactggtacaagggttgaaacagaagatgataaaaaaagagcggaagattttgctttgtggaaattttctaaagaaaatgaaccatcttgggattctccctggggagatggtcgaccaggatggcatatagaatgttcaacaatgattagtgaaacattaggtaaaacaatcgactttcattgtggaggaatcgatctaatctttccacatcatgaaaatgagattgctcaatctaaaggtgttgatattaatgagaattttgcaaactattggttacataatggaatgttaaacctgtcaggaaaaaaaatgtcaaaatcagatggaaatgtgaaattacttaatgaatatattgatgaatatggtggggatgttgtaagattcttttttttgagagcccattacagaagtccacaagaatttagtgagcagttgcttgaagagacaaaaaaaactttgagcaatttggctgaatttacaaaaggtgtagttgcagaaccaaatgataacgatactattgatatttttattaaatgtatgaatgatgatatgaatactccgaagcttcttggagaaatttttgagaaaataaaaaatacaaataatttagatcaagaaaatacattaaaaattaaacaaacagtgaaattcatatttgaaattcttggatttgagctatgtactt

SEQ ID NO: 299513 - DNA, 1022 bp, Unknown
  Bacterial polypeptide expressing nucleotide sequence isolated from the Sargasso Sea
gtacataccagaaatgattgaacttatagtagagctaattgaaaaggattttgcctatgaaaaagaaggacacgtgctttttcacgtaccaacatatcaaaattatggaaagctttcaaaaagaaacagggatgagcaaattgctggaagtcgggtagaggttgcgccttttaagaaagatcctgctgacttcgtattatggaagcctagtactgatgagcagcctggttgggaatcgccatggggaattggaagacctggttggcacactgagtgctcagcaatgtctaaaaaaactttaggacttccatttgatatccatggaggtggaagagatcttatttttcctcatcatgaaaatgaaattgctcaaagttgttgtacatccgcaagtattgatgagcctgattcttatgcaaagtattggatgcataatggttttgtaacaattaatggtgaaaaaatggctaaatctctaggaaatataattttagtaaaagatttagctgaaaattatcacggtgaagtaataagacttgctttgttgtcttcacattacagacaaggactagattggaatgaaaaagttattcaccaagcaaataaattaattaataagttatatgaaattaaagatgacttagatgatgtaactatttctgataaaaatgaaaataatttagatgctatatcaattctaatggatgacttgaatactccaggactaataactgagttaaataatatcgtaaaagaatacaattcctctgacagcgaaaaagtaaatataaaaagcaggcttaatttaattagctcagtattaggaattttagaagatgaaacttttaacgagatttctgaagaatttaaaaataaaattaatgatatggtcttaaaaagatctgaagcaaaaaataataaagattttaagacagctgatgccattagagatcaattaattgagctaggagttgaaataaatgactctagtgatggaactgagtggaaactcaaatcatgat

SEQ ID NO: 299514 - DNA, 658 bp, Unknown
  Bacterial polypeptide expressing nucleotide sequence isolated from the Sargasso Sea
ttttcctcatcatgaaaatgaaattgctcaatctagatgcgctaacgaaaatcagatttttgcaaattattggatacataatggatttataacaatttcaaatgagaaaatgtcaaaatctcaaggtaatattttgaaaattggagattttaaaaaaaaagtaagtggacaggtattgagattagctttgatgagcgctcactacaaacagtcattggattggaatgataagcttttatttgattgtcaaaaaacaattaacaaatggtatgatagttataccgaaattaaaaaacaagttttaattcctgatgaatatcttcttccattgtatgatgatttgaatacaccaggatatatagcaaatcttcataaactttttgaaaaatctcaaaaaggtacaaataaagacaaagaaacttttatctcagcatgtaatttcgttggattattgaatgaaagtaaaaaatcttgggatgaatttaaacaaggaaatttaagtatttctgaggaagaaattaaacagagaattactgaaagaaataatgctagaaaaaataaagattataaagaagcagacaaaattagaaatgaattattggacaaaggagttttaattgaggacaaagatgataaaaccctttggaaatataaatga

SEQ ID NO: 299515 - DNA, 806 bp, Unknown
  Bacterial polypeptide expressing nucleotide sequence isolated from the Sargasso Sea
aatgaataaagatatttttttaacaaatagtctgggtaacaaaaaggcaaaattcattccaattgatccaaaaaaaattggaatgtacgtttgtggaccaacagtttatgataatccacatattggaaatgcaagacctctggttgtatttgatatcttgttcaaagttttaaaatgcaaatacggaaatagttcagtcagttatgtaagaaatattacagatattgatgataaaataatatcttcatcaatcgaaaaaaatatttcaatagatgatcttacaaagaatattacaaatatttttcatcaagattgtaagtatttaaattgtgaagttcccacaaatgaaccaaaggcaactgaaaatatttcattaatgattgaaatgattaataaacttgttcaaaataaattcgcatatgaaataaataatcatgtttattttgaagtaaaaaaatttaaagattatggaaaattatcaaataaaaatttagatgaattaattgctggtgcaagggttgagatttcagaaaataaaaaaaatccagctgattttgttttatggaaaccatcaacagaaaacgaaccagcttgggattcaccatggggcaaaggtaggcctggttggcatctcgaatgttctgtaatgtcaaaaaaatttttaggtgataaatttgacatacatggaggtggaatggatttaatttttccacatcatgaaaacgaaatcgcacaatccagatgtgctaatgaaaatgagacatgtgctaattattgggttcataatggatttataacaatctcaa

SEQ ID NO: 299516 - DNA, 1357 bp, Unknown
  Bacterial polypeptide expressing nucleotide sequence isolated from the Sargasso Sea
catgggtaatgatatttttttaactaataatctaagcaataaaaaagaaaagtttgttccaatagatgaaaaaaatattaaaatgtatgtttgtggtcctaccgtatacgacgatcctcatatcggtaatgcaagaccaattgttgtttttgatattctttacaaaatttttaaaaaaaaatatccaaaagttacttatgttagaaatataactgatgttgatgataaaattataaattcatcaaaggacaaaaatatttcaatttctgaattaactgaaaatgtaaataaaagttttcagaaggattgcagttatttaaattgtgatatccccactcatcaaccaaaagcaacagagcatattgatttgatgataaaaatgatttctgatttgataaacaagggatttgcttacgaagaaaatcaacatatatattttgaagtaaaaaaatttaaagactatggaaaactttcgaataaaaatcttgatgaattaattgctggttcaagagtagaagtgagtgataataaaaaaaactcacaggattttgttctatggaaaccttccaaagatgatgagccttcttgggcatctccttggggtaaaggcagaccaggttggcacttagagtgctctgctatgtcaaaaaaatttcttggaaatgagtttgatattcatggaggaggtatagatttattatttccgcaccatgaaaatgaaattgcacaatcaagatgtgcaaatgatactaaagtttttgcaaactactggctacataatgcatttataacaatatcaaatgaaaaaatggccaaatcacaaggaaatattttaaagataaaagattttagaaataatgtaagcggacaagttttgaggttagctataatgagtacccactacaaacagcctttagattggaatgataaacttttaaatgattgtcaaaatacaattaacaaatggtacaaagtgtatacatctgattataaagcagtggaaattgatgatgaaattctaaaaccactctatgatgatttaaatactccaggatatattgctaatctccataaattgtatgacaaagcgcaaaaaggcaactccagtgataaagctttatttatttcggcatgtaaatttgttggtttattaaatgaaacagaaaatcaatggttagaatttaagaaaaataaatattcaataaatgaaactgaaatattagagaagattgaacaaagaaataaagcaagagaagataaaaactataaagaagctgataaaataagagatgagcttttagacaaaggtgttttaatagaagataaagatggtaaaacgacctggaaatttaaatga

SEQ ID NO: 299517 - DNA, 1188 bp, Unknown
  Bacterial polypeptide expressing nucleotide sequence isolated from the Sargasso Sea
tatggacgaaatctacctatatgattctttatctaacaaaaagagaaagtttgagccaatagatcaaaaccacatccgtatttatgcttgcggacctacagtatacaactatgcacatattggtaatgcaaggatggcggtagtttttgattcatttgtaaggttattaagaaataaatatccaaatgttacatatgtttcaaatattactgatatcgatgacaagataatagaagctgcaaatgaatctaatatacctataaatgaactgacaaagaaatatacggatatttacaatgcagatatgtcttatttgaatgttcttcctccagatattcagccaaaggcaacagagtatgttgaggatatgattaattttattgataaattaatccagaaagataaagcttatgaaaaagatggacatgtattttttcatgtaccttcctatgagggatatggaaaattatcaaacagagaaatagatcagcagcttgctggaagcagggtacaagtttccgatatcaaaaaaaatcaacaggattttgttttgtggaaaccttcaaacaaaaatcagcctggatgggaatcaccatggggcattggaaggccaggatggcatacagaatgttgtgtgatgtctgaagtgaatttaaaaataccttttgatatccatggtggtgggcaagacttactctttccgcatcatgaaaatgaaattgcccaatcttgtgcaagcgttaattctgataatcctgaagattatgctaagtattggatacataatggttttgtaacaatagatggagaaaaaatgtcaaaatctcttaataacattattcttctaaatgatcttttaaaagaacatgatggagaaacaataagactagcactgttatcttcccattatcgaaaatcacttgattggaatgacaatgtaataaaacagtcaaaagtattgttggacaaagtttatgattttcttgatacctgtgacgatgatctggaaggtgaaattgatgaaagtctcatagaaaacttttctaatgatctggacataccaaaagtattaacttccattaatgagcttttaaaaaatagaaattccttaaacactcaaaccatcaaacagtctctattatttgcggggagcattttaggagtatttgataaaaaaccatcagaagg

SEQ ID NO: 299518 - DNA, 943 bp, Unknown
  Bacterial polypeptide expressing nucleotide sequence isolated from the Sargasso Sea
gaagaaaatcaacatatatattttgaagtaaaaaaatttaaagactatggaaaactttcaaataaaaatcttgatgaattaattgctggttcaagagttgaagtgagtgataataaaaaaaactcacaggattttgttctatggaaaccttccaaagatgatgagccttcttgggcatctccttggggtaaaggcagaccaggttggcacttagagtgctctgctatgtcaaaaaaatttcttggaaatgagtttgatattcatggaggaggtatagatttattatttccgcatcatgaaaatgaaattgcacaatcaagatgtgcaaatgatacaaaagtttttgcaaactactggctacataatgcatttataacaatgtcgaatgaaaaaatggccaaatcacaagggaatattttaaagataaaagattttagaagtaatgtaagtggacaagttttgcggttagctataatgagtgcccactacaaacagcctttagattggaatgataaacttttaaatgattgtcaaaatacaattgacaaatggtacaaagtgtatgcatcaaattataaagcagaagagattgatgatgaaactctaaaaccgctctatgacgatttaaatactccaggatatatagctaatcttcataaattgtatgacaaagcacaaaaaggtaactccactaataaagctttatttatttcggcatgtaaatttgttggtttattaaatgaaacagaaaatcaatggttagaatttaagaaaaataaacattcaataaatgaaactgaaattttaaagaagattgaacacagaaataaagcaagagaagataaaaactatgaagaagctgataaaataagagatgagcttttagacaaaggtgttttaatagaagataaagatggtaaaacgatctggaaattcaaatgag

SEQ ID NO: 299519 - DNA, 1360 bp, Unknown
  Bacterial polypeptide expressing nucleotide sequence isolated from the Sargasso Sea
atgagtaaagaattaaacatttttaatacactttctggaaaaaaagaaaaatttattccgatcaataaagataaagtcggcatgtatgtttgtggtccaacagtatacgactttccacacataggaaatgcaagaccgttagttgtttttgacgttttatacagacttctattaaagatttttggaaaagataaagtgacttatgtcagaaatataaccgatatagacgataagataattgaatcatcaaaaaataataagatacctatagatatgcttacaacaagtaccactaaaagttttcatgatgattgtaaatatttgaattgtcttaaaccaaactttgaaccaaaagccacagaacatatcaaaggtatgattgctatgactgagaaattattgaaaaataaaaatgcttatgaaaaagataaacatgtctatttttctgtaagctcatttaaaaattatggcaagttatccaaaaaaaatacagaagaattagttgccggagcaagggtagaagtttcaaaatcaaaaaaagatccgcttgattttgttctttggaaaccatcaacagcagaagatccaggttgggattcaccgtggggaagaggaagacctggatggcacttagaatgttctgttatgagtgagaaatttcttggaaaaaattttgatattcatggtggaggattagatcttgtttttcctcatcatgaaaatgaaattgcacaatcatgttgtgctaataaagcagataaattcgcaaactattggttacacaatggctatgttacttttaataaagaaaagatgtcaaaatctctaggaaatgttgtttctatcgaaaaaatgagaggagcaattaatggacaggttattagacttgcgttgttaagcactcattataaacaacctttggattggaatgaaaatttaattaacgaaagtcagaacactcttgataaatggtatactcagtttgaaaagaccagccaaggtgatttagatgatgatttattaaaaccacttttggaagacataaataccccgggctatatatcaaaattacatttgctttatgataaagcatctaaaggagataagtcttcaaaaaaacttttcctctcaggatgtaaacttatcggtttattagaggaagatttagaaacatggagaaaatttaaaaaaacaaaatcaaaaattgatgaaaaaacaattaaaagtaaaatcaaagatcgagaaaatgctagaaaaaaaggtgattataaattagcagacagtataagaaaagatttagaaggtagcggagtaattattgaagacaaaggcgataagacaacttggaaatataaatgag

SEQ ID NO: 299520 - DNA, 1384 bp, Unknown
  Bacterial polypeptide expressing nucleotide sequence isolated from the Sargasso Sea
atgaaaagcttaaagtctttcaaaatatttaattcccttaatggtaaaaaagaaaaactagatccaattgacccaaatcacataaaaatatacgcatgcggcccaactgtatataactatgcacatataggtaatgcgcgaatggcagttgtttttgatactttagttcgagctttaagaattttttacccaaatgttacatatgtatcaaatatcactgatattgatgacaaaattattgatgcagcaaatgaacaaaatatagaaatttctacaattactgaaaaatatacaaaaatctataacgatgatatggctaagctaaatgtgttaattccagatatccaaccaaaagcaacagaatacatatcagaaatgattgaattaatagaagatttgattattaaagattttgcatatgaaaaagatggacatgttctcttccatgtgcctaactattcaaactatggcaagctttcaaaaagaaatagagaagagcagatcgctgggagtagagtagaagtcgcaccatttaaaaaagatccctcagattttgttttatggaaaccaagttatgattcgcagccaggatgggattctccatggggtattggacgaccaggttggcatacagaatgctctgctatgtcaaaagaaacacttggccttccttttgatattcatggaggcggcagagatttaatttttcctcatcatgaaaacgaaattgctcaaagttgttgctcaaccgcacatattgatgatccaacatcctatgcaaagtattggatgcataacgggtttgtaactattgaaggtgaaaaaatgtctaaatcacttggtaatattattcttgttaacgaattaacagattcacatcatggagaagtaattagattagctttgttatcttcccattacagacaaaatttggattggaatgaaaagataatttatcaatctagtaagcttctagataaactatatgaaataaaaaaagatttaaaaaatgaaaaaacatcaaagataaaccataaaaacactgatgtcataagtgctttagcagatgacttgaatactcctgagcttatagttaagttaaataaaattataaaagaatataattcctcaaataaagataagcaaaagaccaaagatcaactcgatttgatttcagaagcattaggtattttaaaagacgattcgtataaaaaagtctcgcaagaacttgaagaaaaaattaatacattaatcgcagacaggactaaagcaaaaattaatagaaattatgatttggcagataaaattaggaaagagttaactgacctgggtgttgaaataaaagatactagtgatggtactgattggaatttaaaaatatgat

SEQ ID NO: 299521 - DNA, 934 bp, Unknown
  Bacterial polypeptide expressing nucleotide sequence isolated from the Sargasso Sea
tatgcatgtttatttcgaagtaaaaaaatttaaagattatggacagttatcaaacaaaaaattagatgaattggttgcagggtcaagaattgaagtaagtgataataaaaaaaatcctgaagatttcgttctttggaaaccatcagaaacagacgaaccatcatgggactcaccttggggaaaaggaagacctggatggcatttagaatgttcggcaatgtctaaaaaatatttaggaaaagagtttgatattcatggaggaggtgttgatttattatttcctcatcacgaaaatgaaattgctcaatcaagatgtgcaaatgatagtaaagtgtttgctaattattggttacataatgcttttatcacaatgtccaatgaaaaaatggcaaaatctcaaggtaatattttaaaaattaaagattttagaaatataaaaagtggtcaagttttaagactggctttaatgagtgcacattaccgacaaccacttgattggaatgataagcttttagaagatagtgaaaatacaattaataaatggtataatgtttacctaaacattgaaaaacaaccaaaaatttcagacgaaattttaaaacctcttctcgatgatttgaatactccaggctatataactaatttgcacaaattatatgagaaagcatcaaaaggatctgatgaggataaaagaatatttatttcagcatgtcattttgttggattattaaatgaaagtaaagaggattggcttaaatttaaaaaaagcaaggtttcaatttccgaaagtgaaattttatttaaaattaatcagagaaataaagctagaattaataaaaattatgatgaagctgataaaattagaaatgatcttttagacaaaggtgttttaatagaggacaaagatggtaaaacggtctggaaatttaaatga

SEQ ID NO: 299522 - DNA, 1051 bp, Unknown
  Bacterial polypeptide expressing nucleotide sequence isolated from the Sargasso Sea
aatgaataaagatatttttttaacaaatagccttagtaacaataaggataagttttctccattaaattcaaaaaaaattggaatgtatgtttgtggaccaactgtttatgacaatccacatattggtaatgcaagacctttagttgtgtttgatatattattcaaagttctaaaatgcaaatatggacataattctgttacctatgtaagaaatattacagatattgatgacaaaataataacttcgtcaattgaaaaaaaaatttcaatagcagaccttacaaaaaaaattacaaatattttccacgaagactgtaaatatttaaactgtgagaatccgacacatgagccaaaagcaactgaaaatatttctttaatgattgaaatgataaataaacttattaaaaataaatttgcttacgaagttagtaatcacgtttatttcgaagtaaaaaaatttaaagattatggaaaattatcaaataaaaatttagatgaattgattgcaggttcaagagttgaggtttctgagaacaaaaaaaatccagctgactttgtactatggaaaccatctactgaaagtgaaccgtcatgggaatctccatgggggaaaggtagacctggctggcatcttgagtgttcggttatgtcaaaaaaatttttaggagataagtttgatattcatggaggaggaatggatttaacttttccacatcatgagaatgaaattgcacaatctagatgtgctaatgaaaacgaagtgtttgcaaattattggatacataatgggtttattactatctcgagtgaaaaaatgtcaaaatcacaaggaaatgttttaaaaattagtgattttaaaaacaaagtgaacgggcaagtattaagattagctttgattagtgcgcattacaaacagcctttagattggaatgataaacttttaaatgagtgtcaaaaaacaattaataagtggtatgaaagttatattgaattaaataaacaagttttaattccagaaagattatctttttcccattatatgatgatttga

SEQ ID NO: 299523 - DNA, 867 bp, Unknown
  Bacterial polypeptide expressing nucleotide sequence isolated from the Sargasso Sea
gtagaggtcgcaccttcaaaaaagatcctgctgacttcgtattatggaaacctagtaccaatgagcagcctggctgggaatctccttggggaattgggagacctggttggcacactgagtgctcagcaatgtctaaaaaaactttaggacttccatttgatattcacggaggcggacgagatcttatctttcctcatcatgaaaatgaaattgctcaaagttgttgtacatccgccagtattgatgagcctgattcttatgcaaagtattggatgcataatggttttgtaacaataaatggtgaaaaaatggctaaatctttgggaaatataattttagtaaaagatttagctgaaaattatcacggtgaagtaataagacttgctttattgtcctcacattatagacaaggactagattggaatgaaaaagttattcaccaagcaaataaattaattaataagttatatgaaattaaagatgacttaaatgacgtaactatttctgataaaaacgaaaataatttagatgctatatcaattctaatggatgatctgaatactcctggattaataaccgagttaaataatattgtaaaagaatacaattcctctaatagtgaaaaagagaatataaaaagcagacttagtttaattagttcagtcttaggaattttagaagatgaaacttttaatgagatttctgaagaattcaaaaataaaattaatgatatggttttaaaaagatcggaagcaaaaaataataaagattttgagacagctgatgccatcagatataaattacttgagctgggagttgaaataaatgattctagtgatgggactgagtggaaactcaaatcatgac

SEQ ID NO: 299524 - DNA, 358 bp, Unknown
  Bacterial polypeptide expressing nucleotide sequence isolated from the Sargasso Sea
atgaataaagatttatatatttttaattctctaagtggtgagaaagagctttttagatctattaagcctaatgaagtttctttgtacgtttgtgggccaactgtttatagcagttcacatatgggtcacgcaagatcggcaattgtattcgatacaatagttaaatttttaagatttatcaatttaaaagttacctatgtaaggaactttactgatatagacgataaaataataaacagggcaaatgaagaaaaggttgatcataaagaaatatctatgaaatacaaactagagtacatagaagatatgaagaatttgggatgcattgaacctgattatcagccctctgtctcagaaa

SEQ ID NO: 299525 - DNA, 415 bp, Unknown
  Bacterial polypeptide expressing nucleotide sequence isolated from the Sargasso Sea
atgaacaaagatatttttttaacaaatagccttggcaacaagaaagtgaaatttacaccaataaatccaaaaaaaattggtatgtatgtatgtggcccaactgtttatgacaacccacatataggaaacgcaagacctttagttgtttttgatattctatttaaagtgttaaaatgtaaatatggaaataattcagttacatacgtaagaaatattactgatatagatgacaagataatatcatcatcaattgaaaaaaaaatctcaataagtgatcttacaaaaaaaattacagatatatttcatgatgactgtaaatatttaaattgtgaaaatccgacacacgagccgaaagctacagaaaatattaatttaatggttgaaatgattaatacacttataaaaaataagtttg

SEQ ID NO: 299526 - DNA, 1369 bp, Unknown
  Bacterial polypeptide expressing nucleotide sequence isolated from the Sargasso Sea
atgagcgaaatctatttatacgattctttatcaaacaaaaaaagaaagtttgagccaatagatcaaaaccacgtccgcatttatgcttgtggacctactgtgtataactatgcacatattggtaacgcaagaatggcggtagtttttgattcttttgtaagactatttagaaataaatatccaaatgttacatatgtatcaaatattactgatatcgatgacaagataatagaagccgcaaatgaatctaatatacctataaacgaactgacaaaaaaatatacggatatttataatgcagatatgtctaatttgaatgtccttcctccagacattcagccaaaagcaacagagtatgttgaggatatggttaattttattgataaattaatcaagaatgataaagcttatgaaaaagatggtcatgtatttttcaatgttccttcctatggggcctacggaaaattatcaaatagagagatagatcaacaacttgctgggagtagagtgcaagtttcggatatcaaaaaaaatcaacaggactttgttttgtggaaaccatcaagcgaaagtcagcctgggtgggaatctccatggggtattggaagaccgggatggcatactgaatgttgtgtgatgtctgaagtaaatctaaaaataccttttgatattcatggtggtggacaagacttactctttcctcatcatgaaaatgaaattgctcaatcttgtgcaagcgttaattctgataatcctgaagattatgctaagtattggatacataatggttttgtgactatagatggagaaaaaatgtcaaaatctcttaataatattattcttttgaatgatcttttaaaagaatatgatggagaaacaataagactagcgctgttatcctctcattatagaaaatcacttgattggaatgaaaatgtaattaagcagtctaaagtattgttggataaagtttacgattttcttaatacctgtgacgatgatccagaaggtgaaattgatcaaagtctcatagaaaatttttctaatgatcttgatatacctaaagtattaacttctattaatgagcttttaaaaaataagaattcttctaaccttcgaactatcaaacaatctttattatttgcaggcagtattttaggagtatttaataaaaaaccatcagaatggaatgtgcaaattgaaatgagtaactctgaaatggcagaaatagaaaagcttattaatgagaggaaagctctcaaagaaaataaagattttatcggcgctgatgcaataagagattcacttttagaaaaaggtattgagcttattgattctgaagatggcaccacctggaaatctaaataat

SEQ ID NO: 299527 - DNA, 1477 bp, Unknown
  Bacterial polypeptide expressing nucleotide sequence isolated from the Sargasso Sea
cctgcgcttcaccaacagcctcacaagccgcaccgaagcgttcgagcccctcaccgagggcaaagccagcatttattgctgcggcgtgacggtctacgacctctgccacctgggccatgcccgcagctacatcaattgggatgttctgcggcggtatctgatctggcgcgggtacgacgtcacctacgtccagaactacaccgacatcgacgacaagatcctcaaccgcgccaatgaggagggcatcacgatgcaggcggtgagcgaacgcaatatcgaagcgttcgaggtcgacatggggcgtctgaatattctcccggccgaccgaatgcctcgggccaccggctgcatcgaaggcatccagacactgattagcgaactggaatccaaaggagccgcctacagctcagatggtgatgtctacttcgacatttcgaaggccaagaattacggcaagctcagcggccgcgaccccaacgaccagcagcagggagccagcggtcgaaccgctgatggagaggaaagccgcaagcgtcatccctttgatttcgcgctgtggaagggggccaaagccggagaacccagctgggaatccccctgggggccaggccgcccgggctggcacatcgaatgctcagcgatggtgcgccaggaactgggccaaaccattgacattcacctcggtggcggagatctggtgttcccgcaccacgaaaacgagattgctcaatcggaaaccgccaacggcacaaccctggcgaagctatggatgcacaacggcatggtcaatgtcggtggcaccaagatgtccaaatcgctcggcaacttcaccaccatccgcgcattgctggacagtggaatctcgccgatgacccttcgcctgtttgtgctgcaggcgcactaccgcaaaccgcttgatttcaccgccgagtcccttgaggccgcagccgccggctggaagggtctgaatgcggccctgaaccttggcgatcgccacggcgaaaaccttggctggagcacggccgcaccgctcacagagggcgccatgacggccgatggagttccagccgacaccgctctggcggagctcgaacaacgcttcatcagcgccatggacgatgacctcaacagctccggcggactggccgtgcttttcgatctggccaagcccctgcgggcccttgccaacttgctggaacgtggggaagacgccgccctgcctaagcaggaattgaagggtctagaggggcgttggcagctgctgcgacacctggcggcggtgctgggactgcgctcagaagcggaagccgccacttgcctcgacgacggcgctattgatgcagccatcgcggcgcgcaaagccgcgaaagcagcgaagaattacgcggaggccgaccggatccgggatgaactcgccgcccaaggggtggagctgatcgacaaacccggtgggatcaccgaatggatccgcagctga

SEQ ID NO: 299528 - DNA, 824 bp, Unknown
  Bacterial polypeptide expressing nucleotide sequence isolated from the Sargasso Sea
aaatcccgaagattttgtattgtggaagccatctaataaagatgagccaggttgggactcaccttggggcaaaggaagacctggttggcatttagagtgttctgctatgtcaaaaaaatatcttggtgatacttttgatattcatggcggaggaagggatttaatatttcctcatcacgaaaatgaaattgctcaatcaagatgtgctaataataataaatctttctcaaattattggatacataatggattcattacaatagcaaatgagaaaatggcaaagtcacaaggaaatatttttaaaattagagatttctatcagagatataatggtcaagttttaagactagctttaatttcaactcactacaaacaagcaatggattggagtgatgatttattaacacaatcaaaaaaaactttaaataaatggtacgagtgccaaaaaaaaccagaaggcaaagtattaataccagatgatgatttaatccctctttatgatgatttaaatacgcctggatatattagtaacattcataaattatatgataaagctgccaaaggatctgacaaagataaagaaatttttacaacagcatgtaattttattggtctgttaactgagccaaaatcaaaatggcaagagtttaaaaagaatattttagaaatttcagaggaagagattttgcaaaagataaaagatagaaatacagctagagacaataaaaattaccaattagctgatgaaataagaaatgaacttttagataaaggtattttaattgaagacaaagatgataaaacaacttggaaaataaaatgag

SEQ ID NO: 299529 - DNA, 1369 bp, Unknown
  Bacterial polypeptide expressing nucleotide sequence isolated from the Sargasso Sea
tatggattatcacttattcaatacactaagtggtaaaaaagaaatattaaagcctggtgatccaaagcatgtgaaaatctatgcttgtggaccaactgtttacaattatgcccacatcggaaatgcaagaatggcagttgtatttgatacttttgttagaacactcagatttatttttccaaaagttacatatgtctctaacataacagatatagacgataagataattgaagcagcagttgagcaaaatgttgagatatctgtgatcacaaaaaaattcacaaaaatatataacgaagatatggctaaacttaatgttctagcgcctgacgttcagcctaaggcaacagaatatattcctgaaatgatagacctaattaaagaacttatcgagaaggattttgcctatgaaaaggacggacacgttttgttccatgttccaacttatgaaaattatggcaagttatcaaatcgaattaaagatgagcaaattgctggaagtagagttgatgttgcagattttaaaaaagatcctgctgattttgttttatggaaaccaagtactggtgtgcaacctggctgggagtcaccatggggcactggaagacctggatggcatactgagtgttctgcaatgtctgaaaagactcttggattgccgctagacattcatggaggaggcagagacttaattttccctcatcatgaaaatgaaattgctcaaagttgttgtactgctgcagaaaatagtaatcctgaatcctatgcaaaatactggatgcataatggttttgtaacaattgatggcgaaaagatgtccaaatctcttgggaatattattttggttaatgaactcacacagaaatatcatggagaagtaattaggctagctcttttgtccactcattacagacaagcacttgattggaatgataatgtaattcatcaagctaaaaagttgctggataaattatattctttattaaatgagctaaatgatgtcaaagaaagtaaagagcctgataacgatttaattgagatgttgttagatgatttaaatactccaggtttaatggcgaatataaataaattattaaaaaatgctgaatctcgagaagaaggcgacaaacctaacctcaaatcaaatcttttactaattggaaaactaatgggtattttggaggataaatcatacaatcagatctcaagtgaattcaaagataaagttgataacctcattgaagatcgatcaaatgcgaagaaaaaaagagattttgtattagcagataagattcgctctgagctaatagatttgggggttgaaataaatgattcgccagagggaaccacatggaaagttgttaaatga

SEQ ID NO: 299530 - DNA, 898 bp, Unknown
  Bacterial polypeptide expressing nucleotide sequence isolated from the Sargasso Sea
aatgagtagtctccaactaactaattctttatcaagaaaaaaggaagtttttaaacccattaacccaaataaggtttctttatatgcttgtggccccacagtttatgataaccctcatgtaggtaatgctcgtagtctagtggtatttgatgttttgtttagagtgttgaaagcaatctatggaccaaatgtaaactatgtaagaaatataactgatgttgatgataaaataattgaagcctctaaaagaaataaaaaagatatcaacgaaatcacaagcgatgttacaaaagtttttcatgaaaattgtaaaagtttaaattgtttgaaacctactgtagaacctaaagccactgagcatattaaagaaatgatagaaatgtcttcctctttaatttctaagggttttgcttatgaaaataaaggtcacgtatatttttcagtaaattcatttaaaaattacggaaaattatcaaacaaaaatttagaggaattaaaagccggaagtagagtagaagtttcagatctgaaaaaaaacccaatggattttgttttatggaaaccctccgataatgacgatccaggatgggactcaccgtggggaagaggtagacctggctggcatttagaatgttcagttatgagtgaaaaatacctaggaaaaaattttgatattcatggcggaggtttagatttaatttttcctcatcatgaaaatgaaattgctcagtcctgtagcaacaattctagcgatagttttgcaaattattgggttcataatggatttgttacatttaataaagaaaagatgtctaaatctttaggtaatataattacaatttctcaagccgtgaaaaaatattcaggggaagttgtaagattagctttattaagtgct

SEQ ID NO: 299531 - DNA, 211 bp, Unknown
  Bacterial polypeptide expressing nucleotide sequence isolated from the Sargasso Sea
atgctgaagatatacaacacactcactcgtcaaaaagaagaattcaaacctatccacccgggcaaggtgggcatgtatgtgtgtggcgtcactatctacgatcactgtcatatcggccacggccgcaccttcgtcgccttcgacgtcgtagcccgttacctgcgctacagcggttatcagctcaactacgtgcgcaacgtcaccgacgtgg

SEQ ID NO: 299532 - DNA, 1090 bp, Unknown
  Bacterial polypeptide expressing nucleotide sequence isolated from the Sargasso Sea
tgaaactattaaacattttcatgtagattgtaacaaactaaaaaatatttctccagattttgaaccaaaagctactgatcatatcaaagaaatggttgaactcatagatactttaattgaaaaagattttgcctatgaaaaatctggtaatgtattttttagagttaagaattatgaacattatggtcgtttgtcacatagaactattgatgaaatgcaggctggtgcacgggtagaggtttcaggagtaaaggaaaattcagcagactttactttatggaaaccttcctcaaaagatttaccaggttgggatagtccgtggggtagaggaagacctggttggcatattgaatgttcagctatgagtaaaaaatatttaggagaaacttttgatatacatggtgggggagctgatttaatttttcctcatcatgaaaatgaaattgcacaatcatgttgcgcaaataacaaacaattaatggctaaatactgggtacataacggttatgttaatttagaccaaaaaaaaatgtcaaaatctttaggtaatttcaaaactatttatgatttgctaaaaaaatttaatggagaagtaataagatattttttattacaagctcattacagagcaccgttaaattttaaacaagagtatattttagaggctaaatcctctctatctaggttatatcgatctataaagggttttgaaaaaaatggggatccagataatgaaattttatttcatttgaagaatgacttaaatactcctaaagcttttgcaagagctcattttttgtctgagcagtcaaataaagggagtagagaagcaggtcaattattaaaaaattcttcagcgttattaggtatacttgaagatgataccgaaacttggtttaaaaataacccaatagatttaaaaatagaatatcaattaacagaaacaaatattgaaaatatgatagaagacagaagaatagctaaagaaaataaagattttaaggcagctgacaaaattagagataatttattaaataatgggattgttcttgaagataacttaaatggaacaagttggcgaaggtcataa

SEQ ID NO: 299533 - DNA, 444 bp, Unknown
  Bacterial polypeptide expressing nucleotide sequence isolated from the Sargasso Sea
catgacattgtcgctatacaatactctttcccgcgccaaggaggaattcattccggccgatcccgggcgggtgacggtgtatgtttgtggcccgaccgtctattcatacgctcatatcggcaatgcccggcccgccgtggttttcgacgttctggtccggttgttgcgccatcaatggccaaacgtggtgttcgcgcgcaacattaccgacattgacgacaagataaacgcagccgccgcggatcaaggcgttcccatcggcacgatcaccgagaagttcgaaaaaatttatctcgatgatatggactcgctgggagttctgccgccggacattgatccccatgcgaccgatcacattccagaaatgatcgccatgatggaaaagctgatcgccgacggccatgcctacgccgccgacggacatgtgctgttcaacgtgccaag

SEQ ID NO: 299534 - DNA, 1333 bp, Unknown
  Bacterial polypeptide expressing nucleotide sequence isolated from the Sargasso Sea
aatgcttaaaatttataatagcctttctaagaaaaaggaagatttcgttcccaacgatcctgatcatattaaattctatgcttgcgggccgaccgtatataacaaaatacatataggcaatgctagagccttcatttcggctgatcttttagcaaaggttttgaaaggcatgtatagcaaagttacttatgtatgtaatatcactgacatagatgacaaaataatagacgctgctaaagaagagaatttatccatcaaagatatttcgactaagtactttaatcaatatcaagaagatacagcactcttaggtatttctaaacctgatattcaaccctttgctactgattatatcgatgacatgataacttacattgaaaagcttattgcttctgataatgcctatgagaaagatggtaatgtgctttttagagtctcatcatttccaaattacggttgtctttcagatagaaagctagacgaacatgagtctggttcaagagttaaagttgaagattttaaagagagtccaaatgattttacattatggaaaccttcacttgatgatgatcctggatgggattctccctggggtagaggcaggcctggctggcatctagaatgttctgttatgtctgaatcaaccttggatattccatttgatattcattcaggtggcaatgatctaaagttccctcatcatgataatgagattgcacagacctgtgcttatcatggcaatgaagatccaacatcatttgctaaatattgggttcataacggtttcttaaatcttgaagatcaaaagatgtctaaatctttaggcaatgtcatatatatagatcaattactaaaaaaatataaaggcaatgaggttagacttgcccttctttccactcactatagacaacctataccctggagcgaagatctgcttgatcaatcgcataatatttatgtcaagttacaaaacgctttcaaaaagtatggaaaaattgaagaaaaattttatgctgattcaaagattgctgagattttaatggatgatttaaacacgccacttgctattaggacaatgcaagatttaatctcagagcctaatgaaaagatagaaaatgagatagcgacctttaaatatatatttgaagggtcaaatcaagatctttctttgtcagacgaacaagttaatgaaattaatgaacttgttaaagaaagagatgatgctagaaactcaggtgattatgatagagctgataaaattcgagataaattgagtaaaatgaatgtgtccataaaggacgttaatgggaaaacggaatgggaaatattgtaa

SEQ ID NO: 299535 - DNA, 1232 bp, Unknown
  Bacterial polypeptide expressing nucleotide sequence isolated from the Sargasso Sea
tagaacttttttttgttttgatgtgatggtgaatttttttaaatttctgggatatgaagttaattacgtaagaaatattacagatatagatgacaaaataatcgaaaaggccaaaaaagaacaagtgccattcaatttgataacagataaatttattaaagccatgaatgacgattttaaagctttggatattcaaccacccaatttagagcctaaagtttccgagcatatcgaagatattcttaaaatgatcgaaaatttggaagttaatgattttgcctactccaaagaagattcagatgtttactttgacatagaaaagtttcctgattatggaaaactctctaatagagtgcaagatgacttagattcaggttctagagtagaaattgataaaaataaaaaaaatccaaatgattttgttttgtggaaaaaaacaaatgaagaaccatcgtggaattcaaagtggggccctggtaggccagggtggcatatagaatgttccgcaatgagcaataaatatttaggtgcaaattttgatattcatggcggtggtttagatttaaagtttcctcatcacgaaaacgaaatagcacaatcggaatgtgccaataattctgactttgcaaattattggattcatgttgctcctttaaatgtagatggaaagaaaatgtcgaagtctcttggtaattacctcactattagggaccttctcaatgattatcatccagaggttttaaagaccttttttcttttaactcactatagaaaaccaatcaattacacaaatgattcgattaaggaatcaaaaaatattttagataaattatatgaatctttaaaagatgtaaaaaaatttaattcttcagaagttgaaaatgagattatcgattcatttaaatctgcacttaaagatgacttcaatacttcaaaagctcttaaaattcttcaaaaaatttctcaagggattaattcaaataaatcagataaaaaagcaaaagcaaagctttcaaatactttaaaagttttgggaaatcttttaggtattttaagtaattcctcgcgggattattttcaatatgattcaagtaaaaaaatatctaatgaagatattgaattgatgatcaaagaaagaaaccaagcaagactcaacaaagactttaaaaaagctgatttgattagggaaaaactttcttctttaaatattaccttagaagatgacggcgaga

SEQ ID NO: 299536 - DNA, 751 bp, Unknown
  Bacterial polypeptide expressing nucleotide sequence isolated from the Sargasso Sea
tggaaggccaggctggcatttggagtgttcagcaatgtcaaaaaaatatcttggtgataagtttgatatccatggtggtggtagggacttaatttttcctcatcatgaaaatgaaattgcacaatcaaggtgtgcaaatggtactgaagtattttcaaattattgggtacacaatggatttataacattatcaaatgaaaaaatgtctaaatcccatggaaatattttaaaaataaatgatttaaaaaatagtattaacggtcaagttttaagattagctttaatgagcacacattacaggcaacccttagattggaatgataaccttataaacgaaagtcaaaagactatagataaatggtataaaagctatgttgaggttgatagactaaaattaatttctgatgaagacctttatccattgtatgatgacttaaatactccaaaatatattgctaatttacacaggctatttgaaaagtctcaatcaggtaatttggaaaataaaaaagaatttgtctctgcatgtaattttgttgggttacttaaagaaacaaaagatgagtggatcaattttaaaaaaaataattcagttttaagcgatgaaataattgaaacaaaaattaaagaacgaaatgatgctagagacgataaaaattatgaattagctgacaaaatccgcaatgaacttttggaaaaaggtgttcaaatagaagataaagatggtaaaacctcctggaaatttaaataa

SEQ ID NO: 299537 - DNA, 689 bp, Unknown
  Bacterial polypeptide expressing nucleotide sequence isolated from the Sargasso Sea
tgatattcatggtggaggtagagacctaatatttcctcatcacgaaaatgaaattgctcaatcaaggtgtgctaatgacactgatgtatttgcaaattattgggtacataacggttttattacaatttcaaatgaaaaaatggcgaaatcacaaggaaacattttaaaaattaaagattttaaaaaaaatattaacggtcaagttttaagattggccttgataagctctcactacaaacagccattagactggaacgataaattgctcgacgaatgtcaaaaaattttaaacaaatggtatgaatgctatgttgatgtaaaaaagaaaattctaattccaaatgatatacttgaaccactttatgacgatttaaatactcctggttatattgcaaatattcataaattatataataaggcacaaaatggagacatcaaagataaagaaatttttactacagcatgcaattttatcggtttattaaaagatacaaagaatgagtggataaaatttaaaaagagaaagtcagatttatctgaagaagaaatattatttaaaattaaagaacgtgataaagcaagaaaaaataatgattataaactttcagataaaattagagatgaattgctaaataaaggtgttttaatagaagataaagatggtaaaaccacctggaaattaaaatgag

SEQ ID NO: 299538 - DNA, 1084 bp, Unknown
  Bacterial polypeptide expressing nucleotide sequence isolated from the Sargasso Sea
aaaatttctactaaaaaattagttgaacaaactcaaaaagtttatcatgaagatttaaaatcactttcaatcttagaaccaacacatgaacccaaagcaactgaatatatctctaaaatgatagatatgattacaagtttaatccaaaaagattatgcatatgtctcctcaaatcatgttttgtttgagtcaaaaaaatttaaaaattatggtgctttatcaaaattttctcttaaagatattattagtggagcaagagtagaggtagcagaatataaaaaaaatccagaagattttgttttgtggaaaccgtcaaaagataatgaaccatattgggaaagtccgtggggaaaagggagacctggatggcacattgaatgttcggccatgattgcagaactattaggacctactattgatattcatgcaggtggacttgacttaattttccctcatcatgaaaatgaaatagctcaatcatgttgttaccatgatcagaatatggctaattattggcttcataacggatttatcaattttgagggagaaaagatgtcaaaatctctaggaaacataacaataatgaatgatcttttaactcttcataatcccatctcaattaaatatgccattttaacaactcattacagacagccgattgatttttctaatgacttgttaaaatattcttcaaatattgtctcaaaatggagagattttattaaaaaagcgaccaataaccatttagatcaagattttctaaaggctttggaagatgatttaaacacacctcaggctctaatgagacttcaacaaatttttaatgatcttaaaaaagcacctgaagacatagaactttctaattattttaataatggattatctcttttgggtttagtgcctcatttccaaaatacagaattaagccttgataatgatgatattgaaaatatgatagctcgccgagctgatgcaaaatcaaataaaaattttgaattagccgaccaaattagagaagaacttttacaaaatggaattattttagaagatacaaaaagcgggacaaaatggaagaaaacataaa

SEQ ID NO: 299539 - DNA, 581 bp, Unknown
  Bacterial polypeptide expressing nucleotide sequence isolated from the Sargasso Sea
aatggataaagatatttttttaacaaatagccttggcaaccaaaaggaaaaatttaatccaataagctcaaaaaaaattggaatgtatgtatgtgggccaactgtatatgataaccctcatataggtaatgcgagacctttggttgtatttgatatcttgtttaaagttttaaaatgtaaatatggaaataaagctgttaattatgttagaaatattacagatattgatgacaaaataattaaagcatcgattgaaaaaaaaatatctataagcgatcttacaaaaaaaattactaaaatttttcatgatgattgtaattatttaaattgtgaagctccttctcacgaaccaaaagctactgaaaatatttctttaatgattgaaatgattattaagttaataaagaataataacgcttacgaaagtaatcaacatgtttattttgatgtaaataaatttaaagattatggaaaattatcaaataaaaatttagatgaattgatttctggagcaagggtagagatatctgaaaataaaaataacccagctgacttcgtgttatggaagccatcttctgaaa

SEQ ID NO: 299540 - DNA, 1372 bp, Unknown
  Bacterial polypeptide expressing nucleotide sequence isolated from the Sargasso Sea
catgagcgaaatctatttatatgattctttatctaacaaaaagaaaaagtttgagccaatagatcaaaatcatgtccgcatttatgcttgtggacctacagtttataactatgcacacattggtaacgcaaggatggcggtagtttttgattcgtttgtaaggctattaagaaataaatatccaaaagttacatatgtatcaaacattactgatatcgatgacaagataatagaagccgcaaatgaatctaatattcctataaacgaactgacaaaaaaatatacggatatttataatgcagatatgtctaatttgaatgtccttcatccggatatacagccaaaggcgacagagtatgttgaggatatggttaattttattgataaattaatccagaaagataaagcttatgaaaaagatggacatgtattttttcatgttccctcacatgaaggatatggaaaattatcaaacagagaaattgatcaacagcttgctggaagcagggtacaagtttctgatatcaaaaaaaatcaacaggactttgttttgtggaaaccatcaagcaaaagtcagcctggatgggattctccatggggaattggaagaccgggatggcatacagaatgttgtgtgatgtctgaagtaaatctaaaaatacctttcgatattcatggtggtgggcaagacttactctttcctcatcatgaaaatgaaattgctcagtcttgtgcaagcgttaattctgataatcccgaagattatgctaagtattggatacataatggttttgtcactatagatggcgaaaaaatgtcaaaatctcttaataatattattcttttgaatgaccttttaaaagagcatgatggagaaacaataagacttgcattgctatcttctcattatcgaaaatcacttgattggaatgaaaatgtgataaaacagtccaaagtattgttagataaagtttatgattttcttgataactgtgacgatgatccagaaggtgaaattgatcaaagtctcatggaaaatttttctaatgatcttgatatacctaaagtattaacttctattaacgagattttaaaaaataaaaattcttctagccctggaactatcaaacaatctttattatttgcaggcagtatcttaggtatatttgataaaaaaccgtctgagtggaatatgcaaattgaaattagtgattctgaattggcggaaatagaaaagcttattaatgagaggaaaactcttaaagaaaataaagattttaccggcgctgatgcaataagagattcacttttggaaaaaggtattgagcttatagattctgaagatggcaccacctggaaatctaaaagctaa

SEQ ID NO: 299541 - DNA, 1243 bp, Unknown
  Bacterial polypeptide expressing nucleotide sequence isolated from the Sargasso Sea
gatgattcctcatattggtaatgctagaccattaatcatatttgatatcttatttaagcttctcaaaaaaaaatttgagtcagttacatatgtaagaaatataactgatatagatgataaaataattaaatcatcacaagagcaaaaaatttcaactaaagaattaacagaaaaagttactaaaagttttttagaagattgtaaatttttaaattgtgaaaatccaacacatcaacccaaagccacagaacatattggtctaatgattgaaatgataaatgagttaataaaaaaaggttttgcttatgaaaatgaaagtcatgtttactttgaggtaaaaaaattttctgattatggaaaattatcaaataaaaatttagaggaattaattgctggttcgagagttgaaattagtgaaaataaaaaaaactcagaggattttgtattgtggaaaccttcaaatgataatgaaccttcatgggactcaccctggggaaagggtagacctggttggcatttggaatgttccgcaatgtcaaaaaaatttttaggtgaggagtttgatattcatggaggtggaattgatttaatttttccacatcatgaaaatgaaatagcacaatcaagatgtgctaatgatacaaaagcttttgcaaattattgggttcataatgcctttataaccatgtccaatgaaaagatggcaaaatctcagggtaatattttaaagataaaagattttagagaaaaaatgagtgggcaggttattaggttagcacttatgagtgcacattataaacagcccttagattggaacgaaaaactaattaatgattgtcaaaacaccttggataaatggtatcgcatttattcacctgaaattaagagtgcagatattccggagatgattttgaaacctttatatgaagatcttaacactccaggttatatagcaaatttacatcaactttatgacaaagctaacaaaggtgaggatctagatatttttatatctgcttgtaaatttattgggttatttaatgaggacagcaaacaatgggatagttttaaaaagaataaagcctctattagtgaggaacaaataaaaaaaatgattgatttaagaaacaaggcaagagagaacaaaaattataaagaagcagatgaaattagaaataagcttttagataaaggtgttttaatagaggacaaagatgataaaacactgtggaaatttaaatga

SEQ ID NO: 299542 - DNA, 794 bp, Unknown
  Bacterial polypeptide expressing nucleotide sequence isolated from the Sargasso Sea
aatgaagatcaaactctacaattcgaacaccaagagcaaagagctatttgttcccattgaccccaaaaaggtcacaatgtatgtctgtggacccacagtatatagttatcctcatattggaaatgcaagaggtcctgtcatattcgatgttctagcaaggcttttaaagagagaatttgatctcacgtatgttaggaatattaccgacttagatgacaaaatttatcaggcagctgatgatgagggcaaacatatttctgaagttacacagcgatatacaagaatttatcaagaagacatgagtgccttaggtgtggaaaagccagatttagagcctttggctacagagcatattcctgagatgattgaaatgatcgagggattaattattaaaggacacgcatatgagaatcaaggccatgtttttttcagtgtagagacttttgatgattatggtttcctttctaatcgaacagaagatgaacagatctcaggaacaagaataaaatcgtcagaaataaaaaataatcaaagggactttgtactctggaagccatctactgggcaaactcctggttgggagagtccttggggttatggaagacctggatggcaccttgaatgttcagcaatggcgaagaaatatttaggaaggacattggatatccatggaggcggaagtgatcttttgtttcctcatcatgagaatgaatgtgcgcaaagcatatgctcacactcaggagaaccacttgcaaactattgggtccataatggaatgatcgatttcgataacg

SEQ ID NO: 299543 - DNA, 867 bp, Unknown
  Bacterial polypeptide expressing nucleotide sequence isolated from the Sargasso Sea
aatgaaaaaagatatttttttgtcaaatagcttgggtaataaaaaagaaaaatttattccaataaatgaagacaaaattggtatgtatgtttgtggaccaacagtatatgactatccacatataggtaacgcaagacctttagttatttttgatattttgtataaagttttgaaatgtaaatttggtaaaaacaaagttacatatattagaaatataacagatattgatgataaaattatcgaagcttcaattgaaaaaaaaatttcaatagatgaccttacaaaaaaaattacaaatatttttcatgaggattgcaaatatttaaattgtgaagttccaacacacgaaccaaaagctactgaaaatattttattaatgattgaaatgattaaaaaacttcttgataataagtttgcttatgaaaataacaatcatgtttattttgaagtaaataaatttaaagactatggaaaattatcaaataaaaatttagatgaattaatttcaggagtaagagtagaaatatctaaatataaaaaaaatccagcggattttgtattatggaaaccttccaaatcaaatgaaccatcatgggaatctccatggggaaaaggtagaccaggttggcatcttgaatgttcagttatgtctaaaaaatttttaggtaataaatttgatattcatggaggaggaatggatttaatatttcctcatcatgaaaatgaaatagcacaatcaagatgtgccaatgaaaatgaaattttagcaaattattgggttcataatggatttattactatatcaagtgaaaaaatgtcaaaatcaaaaggcaacattttaaaaattgaagatttaaaaaaaaggta

SEQ ID NO: 299544 - DNA, 720 bp, Unknown
  Bacterial polypeptide expressing nucleotide sequence isolated from the Sargasso Sea
gttcagcaatgtcaaaaaaatttttaggaaacgaatttgatatacatggaggtgggattgacttgatatttccacatcatgaaaatgagatagctcaatccagatgtgcaaatgactcaaaaatttttgcaaaatattgggttcataatgcttttataacaatgtccaatgaaaaaatggctaaatcacaaggaaacattttaaaaataaaagattttagaaacaagattagtgggcaagttttgagattagctcttatgagtgcgcattataaacagccattagattggaatgataaattgataaatgattgtcaaaatactttaaataaatggtatcgtatttattccacagatatcaaatctgctaaagtaaaagaagagattctaaaacctttatatgaagatttaaacaccccgggctatattgctaacttgcataaactttatgaaaaagcaaacaaaggtgaggataaagaattattcatttcagcttgtaagtttataggtttatttaatgaagataatcagcaatgggaaaaatataaaaaagataaagcaacaattagtgagtcagagataaatagtaaaatagatttaagaaataaggctagagcaaacaaagattataatgaagctgatagaattagagatgaacttttaaacaaaggtgttttaatagaagataaagatggtaaaacactgtggaaatttaaatgag

SEQ ID NO: 299545 - DNA, 1135 bp, Unknown
  Bacterial polypeptide expressing nucleotide sequence isolated from the Sargasso Sea
gacaaaattattaaagcatcaaatgataaaaaaatttccataaaagatttaactctaaaaatatcagagagttttcacgatgattgcaaatatttaaagtgtgagcagccaacagaagaacccaaagcaactgataatataaatcaaatggtcgatatgataactgatttggaaaatcaaggttatgcttattcaaataacaatcatgtatattttgaagtaaataaatttgaggattatggaaaactttcaaataaaaaattagatgaattaattgcaggctcaagagttgaggtgtctgaattcaagaaaaatcctgaagattttgtattatggaaaccatctacagctgatgaaccgtcatgggactctccttggggaaaaggtaggcctggctggcatttagagtgttcagcaatgtcaaaaagatacttaggtgatgaatttgatattcatgggggtggcagagatttaatatttccacaccatgaaaatgaaatagcacaatctagatgtgcaaatggaactaaatcgttcgcaaattattgggttcataatggatttattactttatcaaatgaaaaaatggctaaatctcagggtaatattttaaaaataaaagactttaaaacaaaatataatggtcaagtattaagattagcattaattactagtcattacagacaaggacttgattggaatgacaagttaatatctgagtgtgagaaaactttaacaaaatggtactctgcacatattgaagttaaggaaagaattacagtctctgatgatattttatctccactttatgacgacttaaacacaccaggttatattgcaaacttacactctttatactttaaagcttcttctggaacagacgaagataaaaatatttttgtaagtgcttgtaattttattggtcttttaacagatactaaagaggaatggatgagtttcaaaaaaaattcgataaatatatctgaagatgaaattagatctaaaattgaagagagaaataaagcaagatctgacaaaaattatgaattggctgataaaataagacaggatcttttggataagggtattttaattgaggataaagatggtacaacctcgtggaaattaaaatgag

SEQ ID NO: 299546 - DNA, 1375 bp, Unknown
  Bacterial polypeptide expressing nucleotide sequence isolated from the Sargasso Sea
aatgagcttaaaattatataattcactttcaagtaagaaagaaatctttaaatcaatatcagataaaaaagttaaaacttatggttgtggcccaacagtttataacgatcctcatataggaaattttagaacctttgtattttatgacttgttaaatagggttcttcaattgaatggttatgaaacagaaactgcagtaaatataactgatattgatgacaagataattgatagagtgaatcatgagaatacttcattaaaagaaataacttcaaaatatgaattatcatttatggaattatctaaatccttaaaaattttacctaataatcataaccctagagcaacagaatatgttgaggaaatgatagaattcattcaagctttaatagatcaaagtttagcatatgaaatgaagggaaatatcttttttgatattgaagcttatccaaaatatggaaaatttgtaaatattaacgacgaacttgaaacagaagataatgaactgttaaaaaggaatcgtaatgattttacgctttggaaagcaaaaaaagattcagatggtgaaatattttggaatagtgaatggggtaagggaaggcctggttggcacactgagtgcgctgtaatgataaagacgctttttgatggtcgtcttgatattcattgtggtggaattgacctaaaatttcctcatcatgagaatgagagtgcacaaattgaagctctacaaaagcataatttatctaattattggcttcatgcagagcatttgaatatggatgatgaaaaaatgagtaaatcattgggcaattttattgatgtaaataatcttattgaaaataatggatcggatgtagttaggttgtttttactatctgctcattatagaactaaggtatcctttagccagaaaaaattagatgaatgcaaaaaaatgattgaaaaaattaatagatttgcaaaaaactttaaatttgatgatcaaagtattgaattaaaattttcagatgatcacaatttatttattgatgctcttaatgatgatttaaacacacctgaagctattggagttttctttagttttatatctgaaatgaataaaaaaattgcagaaaattcaataaatgaatcagataaagaaaaatctttagtttttttaaaattatttaattcaatttttgctattttagattctaataatttgcaagatcataaaattccaaaagagatacaaactttgcttatttctcgtcaagaagctagagaaaatcaagattggaaattgtctgattcaattagggataaaattgagtctttaggctggcatgttgaagatacttccagcggacaaaaaccctctaaaaagaattaa

SEQ ID NO: 299547 - DNA, 790 bp, Unknown
  Bacterial polypeptide expressing nucleotide sequence isolated from the Sargasso Sea
tatgagtttagatatttttttaacaaataatcttactaacaaaaaagaaaaatttattcctaaagataaaaataatgtgagaatgtatgtttgcggtccaactgtttatgatgatcctcatattggtaatgctagaccagtagttgtatttgatattctttttaaaattttaaaaaataaatatcctaatgtaacttatgtaagaaatattacagatgtagatgataaaataataaaatcctcaaaggaaaataatatttcaatttcagagcttactaaaaaaattactcaaagttttaacgaagattgtatctatctaaattgtgaacaaccaaatcatgagccaaaagcaactgagcatatttctgaaatgatagaaatgatctctgaattaattaaaaaaggatttgcttacgaaaataataagcatgtttattttgaagtaaaaaaattcaaagattatgggcagttatcaaacaaaaagctagatgaactagttgcaggatcaagaattgaagtaagtgataataaaaaaaatcctgaagattttgttttatggaaaccatcagaaacagatgagccttcatgggactcaccttggggaaaaggtagacctggttggcatttagaatgttcggcaatgtctaaaaaatatttaggaaacgaatttgatgttcatggaggaggcgttgatttgttatttccgcatcatgaaaatgaaatagctcaatcaagatgtgcaaatgatagtaaggcgtttgctaattattggttacataatgcatttatc

SEQ ID NO: 299548 - DNA, 834 bp, Unknown
  Bacterial polypeptide expressing nucleotide sequence isolated from the Sargasso Sea
aatgaataaagatatttttttgacaaatagctatggtggaaaaaaagaaaaattccaacctattgatgaaaataatatcaaaatgtatgtttgtggcccaacagtttatgatgatccacacataggtaatgcaaggccattggttgtatttgatttactttttaaagtactaaagtgtaaatatggaaatgacaaagttacatatgtaagaaatattacagatattgatgataaaataattcaatctgcaaaagatagtaaaatttcaatcaaagatctcaccactaaaataaataataattttcaagaagattgtaattatcttaattgtgaaaaaccgagctttcaacctaaagcaacagaaaatattaaggagatgatagagatgattagtattttagttgaaaaaggttttgcgtatcaaagcaagaatcatatttattttgaagttaaaaaatttaaagattatggaaaattatcaaataaaaagatagatgatttaatatctggatcaagagtagaggtatcaactaataagaaaaacgctgaagattttgtattatggaaaccctcaaacgatgatgagcctagttggacatcaccttgggggcatggtagacctggatggcatttagaatgttcagcaatgtcaaaaaaatatcttggtaaaaaatttgatattcatggtggaggtagagatttattatttccacatcacgaaaatgaaattgcacaatcatgttgtgccaatggaactgaagttttatctaatcattgggttcacaatggatttattactcaatcaaatgaaaaaatgtctaaatcacaaggcaa

SEQ ID NO: 299549 - DNA, 1471 bp, Unknown
  Bacterial polypeptide expressing nucleotide sequence isolated from the Sargasso Sea
atgatcaaactttttaatactttaagcaaaagagttgaggtttttaagcctattgatgatgtagtaaaaatttattgttgtggagtaactgtttatgatttatgtcatcttggtcatgccagaagttatatagcttgggatgtattgagaagatttttaatttacagtgatttcaaagtgaagtatgttcaaaattttacagatattgatgacaagatcttaaaaagagccaaagaagaaagcagttcaatgaaggaagtatctgaaaagaatatcattgaatttcataaagatatggattctttagggataatgcgtccggatagtatgccaagagcaacgaatcatatatgcaatatctgctccttcataacaatccttgaggacaaaggttatgcatattctagggatggagacgtttattattctgttttcaaaaataaaaattatggaaagctaagtaatcaaaatttacatgaacaaaatatcaatcagcaaggaaggatggtaaatgaggaaaatagtaaaaaacttaatccgcaagattttgcgctatggaaaaaagccaaaaatgatgaaccattttttgattcgccatggggtaaaggtaggccaggatggcatatcgaatgttcggcgatggttaaagatgaattaggagatactatcgatatccatttaggtggttctgatttaatttttcctcatcatgagaatgaaatcgcccaatcagaagcagctaatggcaaaaagctagcgaactattggttacacaatgggatggtcaatgtaaatggacaaaaaatgagtaaatcccttaaaaattttaaaactatcagagagctaattaagtcaggtgtaagccctatgactttgcgatattttgttatgactgtgaattatagaaaaccacttgattttactgaagatgctttaaggagtgcttcagaagcttggaaaaatattaatgtagccctttcttttatggaacttacaaaaggtgtttttagatctattgataaagatgaatctatcgaagaagaatataaagagaaaataagttttgaattatctcaaaaaaagcttaaattttctgaggccctaggaaatgacctcaatacagcaggtgctattgcaattatttacgatttagcgaaaccattaaaaaactttttaaaccaatttcaaagggttgaaggttttaaaatagaccaaaatgaaaaattctttctacttgagaattttaaaactcttgcaaagttgactgaggtacttggtcttaaaaaagaagttttagtaaaagaaagtaaaataacagaagaagaaatttcatctcttattaatgaaagattgaaagcaaaaatggaaaagaattatgcgaaggccgatgaaataagaaatttgttaaaagaaaaaggtattgaacttattgatcaatcaaaggaaataacaacatggataagggtctaaa

SEQ ID NO: 299550 - DNA, 749 bp, Unknown
  Bacterial polypeptide expressing nucleotide sequence isolated from the Sargasso Sea
aatgataagaatcttcaatacgttgcaaaaagaaattcaagattttgtccctttggaaaaaaaacacgtaaaggtttacgtttgtggtccaacagtttatgacaagattcatattggtaatgctagacctcttgtagtttttgatgttttagttcgccttcttaaatcaaattttgaaaaggtcacttacgtaaggaatataactgacgttgatgacaaaattaacaatcaatcacatgagactggtatcccaattaatgaattaacaaaggaaacaatcaagcattttcataatgattgtttgagtttgcaaaatattttaccagacatagagcccaaagctacagaccatattaatgaaatgattgaaatgattaaagttcttatagacaaaggttttgcttatgaatcatgtggtaatgtaatgttcagagtgaacagatataagaattatgggttgctttcaaaaagaactttagaagagatgatagcagggtcaagaatagaaatagcaggttataaagaagatccatcagactttattttatggaaaccttcttcaaatgatcttccagggtgggaaagtccgtggggcaggggtcgtccaggttggcatatagaatgttctgctatgagcaaaaaatatttaggtaagacttttgatattcatggtggcggaatagacttagtttttccacatcatgagaatgagatagcacaatcctgttgcgctaatgatactgaaataa

SEQ ID NO: 299551 - DNA, 661 bp, Unknown
  Bacterial polypeptide expressing nucleotide sequence isolated from the Sargasso Sea
atatttcctcatcatgaaaatgaaattgcccaatcaagatgtgctaatgatactgatgtgtttgcaaattattggttacacaatggtttcatcacaatatcaaatgagaaaatggcaaaatcacaaggcaatattttaaaaataaaagatctgaaaaaaagcatcaatggtcaagttttacgactagctctgataagcgctcattacaagcaacctttagattggaacgataagttgcttaatgaatgtcaaaaaattttaaacaagtggtacgattgttatgttgaagtaaaaaaaagtgttttaatccctgaggaatttctagaacctctttatgacgatttaaatacacctggctacatttcaaatattcataaattatatgataaggcacaaaatggaagcatcgaagataaagaaatttttactacagcatgtaattttattggtttactgacagatacaaaagatcaatggttaaaatttaaaaaggaaaaattagacatatccgaagaagaaatattatctaaaattaaagaacgtgataaagcaagagaaaataaagattataaactgtcagacgaaattagaaatgagttattaaacaaaggtgttttaatagaagataaagatggtaaaaccacttggaaattaaaatgag

SEQ ID NO: 299552 - DNA, 1165 bp, Unknown
  Bacterial polypeptide expressing nucleotide sequence isolated from the Sargasso Sea
tgttacatatgtaagaaacattactgatatagacgataaaattattaactcatcaaaagaaaaaaatatttcaatttctgaattaaccgaaaaaattactaaaacttttcatgatgattgtaattatttaaattgtgagacaccaactcacgaaccaaaagcaaccgaaaacattaaattaatgattgaaatgatagaagaattaattagcaaggaatatgcatatgaaagtgaaaaacatgtgtattttaaagttaaaaatttcgaggattatggaaagctctcaaacaaaaaactagaagatcttatagctggatctcgagtagatatatcggagaagaaacataaccctgaagactttgttttatggaaaccttcaaaagaaaatgaaccttattggtcgtctccatggggaaatggaagacctgggtggcatttagagtgttctgtcatgtcaaaaaaatatttaggtgaaacatttgatattcatggcgggggaagagatttaattttccctcatcacgaaaatgaaatagcacaatcggtttgtgcaaataataaaaaatttgcaaattattgggttcataatggttttataactatttcaaaagaaaaaatgtcaaagtcacaaggcaacattcttaaaattgacagtttaaaaaacaaatataatggtcaagtgttgagattagctctaatgagctcacattatagacagcctttagattggaatgatcaattaatggaagaatgttataaaactttagacaagtggtactcttgttatcttaaattagaaaaaaaaattttaatcgatgatgatgatttactacctctatatgatgaccttaatactccaggttatatatctgtacttcataaattatttgataaagcaaagtctggaaaccaacaagacaaagaaaagtttatagcaggatgtaattttgttggtcttttagagcagagcaaagaggaatggctatcatttaaaaaaggtaaaataaaaatttcagaagaggaaataaacttattgattaataaaagaaatgaagcaaggaattctaaaaattacgaattagctgataaaattcgaaatgaacttttagacaaaggtgttttaattgaagataaagatggtaaaacaacttggaaaattaaatga

SEQ ID NO: 299553 - DNA, 1384 bp, Unknown
  Bacterial polypeptide expressing nucleotide sequence isolated from the Sargasso Sea
gatgtcattacagttacaaaacacattaagtggtaaaaaagaattttttaaaccagttaatccagatcatgtaagaatatatgcgtgcggtccaactgtttacaattttgcgcacataggtaatgcgcgtatggcagttgtaaatgatttattagtccgtgtattaaaaacacaatttaaacaagtgacctatgtatctaatatcactgatattgatgacaagattatagaagcttctaaagaaacaggtgaggacattagtgttatcacaaataaatatacagagatttacaataatgacatgagtgcacttggcgttaatcttcctgatattcaaccaagggcaactgatcatattaaagaaatgatcgagttgataaaaaaattaattgatgaaaataaagcttatgaaaaagagggtcatgttttatttcatgtgccaagttttgataattatggaattctttcaaaaagaaatagagatgaacaaatagctggaagccgtgttgaagtagcgccgttcaaaaaagatccagcagattttattttatggaaaccatctccctcacccttacctggttgggattcaccttggggatttggaagaccaggatggcatttagagtgctccgttatgtcagaaaaatcattaggtcttccttttgatatccatagcggtggtattgacttggtgtttccgcatcatgaaaatgaaatagcacaaacttgttccatatctgaaaataaagatcctaaagattttgcaacttattggtttcataatggatttgttaatgttgagggagaaaaaatgtcaaagtcaattggcaatattagactcgttcatgatctcaataaaaaatacaagggagaggttttgcgattaacattgttgtcagctcattacaaacagccattgaactggacagaagaaatcattgaacaaaatagcaaaatgatagatcgactttatagagttctattagagctgtcagaagttgaaatagattctaacttaccttctgattctataatggaatcatttttagatgatttgaatacacctaaagtcattgcaaaacttaatgaagaagcaaatgatgcttcatctgcatctgatgaaagaaaaaaagaaatcaaaaaaaatcttctttctgccggtaaaatattaggtattcttgaagatgatccaggaaattggttaggttataatcaaaaagatactgaaaatactgaagaaattgaaaggttgataaatgaacgtaatgaagctagacgcagtaaaaattttaatttggcagatactattagggacacattaaaagataaaggcatagaaatagaagatactgataaaggaacgatttggcggaaatctagatga

SEQ ID NO: 299554 - DNA, 1165 bp, Unknown
  Bacterial polypeptide expressing nucleotide sequence isolated from the Sargasso Sea
aacgccaggccattagttatttttgatattctctataagatacttaaaaataatttttcaaaagttacttatgtaagaaacattacagatatagatgacaagataatcaaatcttctcaagatcaaaaaatatctacaacagaattaactgaaaaaataacattaagttttttagaagattgtaagtttttgaactgcgaaagtccctctcatcaaccaaaagcaactgaacatattaatttaatgattgaaatgataaatctgctaattaaaaaaggttttgcttatgaaaaaaataatcatgtttattttgaggtaaaaaaattttcagaatatggaaaattatccaataaaaatttagaagacttaatatcaggatcaagaatagaagttagtgaaaataaaaaaagctctgaagattttgttttatggaaaccatctaatagagatgaaccttcatgggaatccccttggggtaatggtaggcctggttggcacttagaatgttctgcaatgtcaaaaaaatttttaggaagtgaatttgatattcatggtggaggtattgatttaatttttcctcatcatgagaatgaaatagcacaatctaggtgtgcaaacgatacaaaaacttttgctaaatattgggttcataatgcatttattacaatgtccaatgaaaaaatggctaagtcacaaggaaatattttaaaaataaagaattttagaaacaatacaagtggacaagtgatcagattggcacttatgagcgctcattacaaacaaccattagattggaattataaattaataagtgattgtcagaatactttaaataaatggtatcgtatttattcatcagatattaaaactgttcaagtgacaaaagaagttttaaaaccattatatgaagatttaaacacacctggttatatagcaaatttacatcagctttatgaacaagctaacaaaggtgagaataaagaattatttatatcagcatgtaaattcataggtttatttaatgaaaatattgagcaatgggaaaaatataaaaaagataaagccttaataaatgaaacagagataacaagcaaaatagatttaagaaataaggcaagggccgataaagattataaagaagcagatagaattagagatgaacttt

SEQ ID NO: 299555 - DNA, 1162 bp, Unknown
  Bacterial polypeptide expressing nucleotide sequence isolated from the Sargasso Sea
tatgcgtctttatgacaccgcccatcaagccgtggttgacctggagctagataatcacgtccgcatgtacgtgtgtggcatcactccctatgactcaactcacttaggccacgcagctacatatctgacctatgacctcattattcgaagactcgaggatcttggccacaccgtggagatggtgaggaatgtcacagatgtagacgacagcatcttgcccaaggcgcgggaacttggaatcgatttccttcaactagccgaacaggaaatggaacgctttgggaaagatatggacgccctaaatatgcgccccgcgaactttgaacctcgggccactgaatccatagacagcatgctcgacctgatccagcaactccaagatggcggccatacctatgtgagtgaggggacaacatactttgatgtaacaacctttccttcgtttggaaagctgtcacatctcactgaaaaagagatgaaagaactcgctgctgagagaggtggaaatccggacaaccctgctcaacgaaatccacttgactttgttttgtggcagcccagcgcagaagatgaacccaaatgggattcgcccttcgggatcggtcgccccggatggcatatcgagtgttcggccatgtgcatgaatgcactaggacagacaatcgatattcatggtggcggaggtgacttaatttttccgcatcatgaatgcgagattgcacaaagcgaagcggttaacggatcgccctttagtcgctattgggtccatgcaggtctagttgcgtatcagggaacaaagatgtctaagtcactaggcaatttggtgtttgtctctgatttgcgcgaggagattgaccctagagcaatccgcctagcattgatggcccatcactaccgatcagatttcgaatggttcgatgatgaaggacccaaagcacaaactgatcttgacctgctcattgaggcgtgcgctatcaccaagccgatcagcgatgggcagttgatggacgaagtgcgtgaagctctcgacgatgatctcaatgcgccacgagctcgggaactcctacttaactcggcccgaactattcttgaggactcatctcaacgacacgaaagttgtgtcgcggccgcggccgctttgtgtggaatcgaaattcggtag

SEQ ID NO: 299556 - DNA, 974 bp, Unknown
  Bacterial polypeptide expressing nucleotide sequence isolated from the Sargasso Sea
aatgaatcaatccactcataactttccaaacattgaactttacaacacattaagccaccagaaagagcacttcaaaacagttgttcctggcaaggttggcatgtatctctgcggaccaacggtctacaagccgagtcatattggacacatggttggcccggttatttttgacacaatcaaacggcatcttgtctattcagggtgggacgtgacatgggttgtcaacattacggatgttgatgacaaactcatcgccgagagtaaaaaccgcggcacatcgatggccgctctggctgaggaaatgaccaccgactatctggacaaccttgctgcgctgggcgtcgacggtattgacaccatgccaaaggcaactgaccacattgaaggcattattcaattcatcgcaggcctcgttgagaaagattttgcgtatcccgcggatggcgatgtctattttgatgtcgctaaagacgaagattacggaaaactaaccaaccgtacgctagaaaaaacacagggagaaggtggtgctgccgcttccagaaagcggtcggctgccgactttgcgctttggaagaaggcaaagtctggtgagccatcctgggaaagtccatggggcccgggacgacccggctggcatattgagtgttctgctatgagtgaggctcttcttggaagtcattttgatatccacggaggcgggctcgatttagtctttcctcaccacgaaaacgaaattgcgcagagtgaatcactccatgattgccccatggccacatattggatgcataacggactcatgcaagcagccggggcagcagggaaagtcggcggtcgcccacgagatggtggtgccacacccgacgatctggccgctacaaaaatatcgaagtcgactggagctgaaccattccgggaactcctttcccgccatcgaccggaagcgattaaacttctgctcctgtccacacatt

SEQ ID NO: 299557 - DNA, 454 bp, Unknown
  Bacterial polypeptide expressing nucleotide sequence isolated from the Sargasso Sea
catgggtaatgatatttttttaaccaataatcttagtaacaaaaaagaaaaatttgttcctatagatgaaaaaaatattagaatgtatgtttgtggtccaactgtatacgatgatccgcatattggtaatgcaagaccacttgttgtttttgatactctttataaaatttttaaaaaaaaatatccaaaagtaacttatgttagaaatataactgacattgatgataaaattataaattcatcaaagactaaaaatatttcaatttcagaattaaccgaaaatataaataaaagttttcaaaaggattgtagttatttaaattgcgaaattcccacattccaaccaaaagcaactgaacatattgatttaatgatagaaatgatttcttatttgataaacaagggatttgcttacgaagaaaatcaacatgtatattttgaagtaaaaaaattc

SEQ ID NO: 299558 - DNA, 1108 bp, Unknown
  Bacterial polypeptide expressing nucleotide sequence isolated from the Sargasso Sea
gatgttgaagatttacaacagtattacccgccaaaaacaggaatttaagcctattaatcccggaaaagttgggatgtatgtatgtggcgtgaccgtttacgatctctgtcatattggccatgggcgtacttttgtttccttcgatatgattgttcgctacctgcgttacgcgggttatgaagtgaatttccagcgcaacatcaccgatattgatgacaaaatcatcaagcgtgctaacgaaaaccaagaagactgcaatacattaaccgatcgcttgattggtgaaatgcacaaggatttcgatgcgctgaatatgatccgtcccgatttcgaaccacgtgccactctgcacattgccgaaatcatcgatatggttgagcgtttactcgctcgcgggcatgcctatgtggcagctgatggcgatgtgctgttcagtgtggcttctttccctgagtatggtcgcctatcaggtcagaatctggagcaattacaggcgggcgcacgggttgaggttgacgataacaagcaaaatccaatggatttcgtgctatggaaaatgtccaaaccgggcgaaccaacatgggaatcaccatgggggccgggtcgtccaggctggcatatcgaatgttcggcaatgaacagcaagcacttaggtctgcattttgatattcacggtggcggttcagatttacaattcccacaccatgagaacgaaattgctcagtcttgctgcgcccatgatacgccatacgtgaattactggatgcacaccggcatggtgatggttgaccgcgaaaagatgtccaagtccttgggtaacttcttcaccattcgtgatgtattaggccattacgacgctgaaaccgtgcgttacttcctgctatcgggtcattatcgtagccaaatcaactactctgaagaaaacctcaagcaggcgcgtgcggcgttagagcgtttatacactgcgattaaagatgttgacctgactgtagcgccggcacctgccgaagagtttgtggctaagtttaagcggcaatggacgatgactttaacaccccagaagcctattcagtgctgtttgatatggtgcgtgagatcaaccgtctga

SEQ ID NO: 299559 - DNA, 1012 bp, Unknown
  Bacterial polypeptide expressing nucleotide sequence isolated from the Sargasso Sea
ccaagagctaccgaacatattaaaggcatgattactatgacagaaaatttattgagtaataaacatgcctatgaaaaagacaaacatgtctatttttcagtaaactcttttaaaaattatggaaagttatctaataagaaacctggtgaacttgaggcaggttcaagagtagagatttcaaaattaaaaaataatccgttagattttgttctttggaaaccatcttcttcagatgatcctggttgggattctccatggggcaggggtagaccaggttggcatctcgagtgttcagttatgagtgaaaaatatttaggaaaaaattttgacattcatggtggtgggttagatcttgtatttcctcatcatgaaaatgaaatagctcaatcttgttgtgcaaataaaacagataaatttgcaaactattggttacacaatggttatgttacttataacaaagagaagatgtccaaatcattaggtaatataattactatgcaaaaaatgaaaaataaaattaatggtcaagttattcgtttggcattattaagctctcattacaaacaaccattagattggaacgaaaagttagttaatgaaagtcagagtacccttgataaatggtataatttatacgaaccagttaaaggaagtaatttagatgataatttagtaagtccactactggaggatttaaatacacctgggtttatttcaaaactacatttattatacgaaaaagcttcaaaaggtgacaagtcttccaaaaaactttttcttgagggttgtaagttaattggattaatggaggaaaatcaagagtcttggaaaaattttaaaaaaacaaaaataaatattgatgaaaatacaattgaactaaaaattaaggaaagagaaaatgctagaaaaaaaggtaattataaattggctgatgatataagaaaagagttagaagagaacgggatttcaattgaagataaaaacaacaaaacgatatggaaatataaatgag

SEQ ID NO: 299560 - DNA, 993 bp, Unknown
  Bacterial polypeptide expressing nucleotide sequence isolated from the Sargasso Sea
atataatgattgaaatgatttctgatttaataaaaaaaggatttgcttatgaggaaaatcagcatgtgtattttgaagtaaataaatttaaagattatggaaaactttcaaataaaaaacttgatgaattaattgccggttcaagggttgaagtaagtgataataaaaaaaattcacaagattttgttctatggaaaccttctaaagatgatgaaccttcttgggaatctccttggggcaaaggaagacctggttggcatttagaatgttctgctatgtcaaaaaaacttcttggaaatgaatttgatattcatggaggtggtatagacttattgttcccacatcatgaaaacgaaattgcacaatcaagatgtgcaaatgatacaaaagtttttgcaaattactggttgcataacgcatttataacaatgtcgaatgaaaaaatggctaaatcgcaaggaaatattttaaaaataaagaattttaggaataatctaagtggtcaagtattaagattagctttaatgagtgcacattacaaacaaccattggattggaacgataaacttttaaatgattgtcaaaatacaattagtaaatggtataatgtttactcttctggttatcacgaggaagaagttgatgatgaaattttaaaaccactttatgacgatttaaatacaccaggttacattgctaaccttcataaattgtatgagaaagcacaaaaaggtaattccactgacaaagcattatttacatctgcatgtaattttataggtttattgaatgaaactgaaatcgaatggttagaatttaagaaaaataaactttcaataaatgaagctgaaattttagataaaattgagcaaagaaataaagctagaaaagataaaaactatgaagaagctgataaaataagagacgagcttttagacaaaggtgttttattagaagataaagatggtaaaacgacgtggaaatttaaatgag

SEQ ID NO: 299561 - DNA, 1342 bp, Unknown
  Bacterial polypeptide expressing nucleotide sequence isolated from the Sargasso Sea
aatggattttgaattatttaatacttattcaaataaaacggaattattcacaccattagatgataatgacattcgcatatacgtatgtggtcccacggtttatgattatattcatgttggcaatgcaaggccgttaattatctttgatgttctagtaaggtttcttaaattaatttacccaaaggttacgtatgtaagaaatatcacagacgttgatgacaaaattattgttcaggcaaatcaaaataaagagagcattaataacttgaccgaaagaactataaaggctttttcagatgatgccgatgcattatttgttaaaaaaccagattttgaacctcgcgctactgaacatattcaagaaatgcttaaaatgattaaagttttattagagaatgggaatgcttatttatcagatggtcatgttctcttttctgtttcatctatgccgaattacggcaaactctcaggtatgaatttaagtgaaatgattgatggagcaagagttgaagtaagtgactataaaaaggagccagctgattttgtgttgtggaaaccgtcaaaaacaggagaactaggttggcattcagattttggatttggtaggccaggatggcatatcgagtgcagtgcaatgagtgaaaaatacttaggaaaacaattcgatattcatgctggtggtttagatttgatttttcctcatcatgaaaatgaaattgctcaatcctgttgcgcttttaatacagaatttatggcgaagtattggatgcataatggttatataacagtgaataatgagaagatgtcaaagtctgaaggaaattttataactgtcagagatgccttaaagaaacatgatggtgaaaccattcgttatgcaatactttctggtcactacaggtcaccgattgactttagttttaaagcattaaaagaagccaagtctgcactggatagactgtatcgtgcatcagaaaattttgagcatgacaacgtaattgatgaggaatttttatcgtgtctgtctaatgatttgaattcacctcaagcaatttctaggcttcatgaattagcaagtgaatacaataaaggtaataagaatgcaggacaattactcaaatcaagtgcacaaattctaggtttacttaattacgacacttcgaaatggtttaccaaggatgtcagcgatgacgaaaatgaaattaataatttaattgcggaaagagataaagcaagaagcgataaaaattttaagttagctgatgaaataagagataaactaaaagaaatgggtgtttcgattgaagacagtaattcaggaacgaaatggcgagttgattaa

SEQ ID NO: 299562 - DNA, 853 bp, Unknown
  Bacterial polypeptide expressing nucleotide sequence isolated from the Sargasso Sea
tggcatattgaatgttcagcgatggttaaagatgaattaggagatactattgatatccatttaggtggttctgatttgatttttccacatcatgagaatgaaatcgcccaatcagaagcagccaatggcaaaaagctagcgaactattggttacacaatgggatggtcaatgtaaatggacaaaagatgagtaaatcccttaaaaattttaaaactatcagagaactaattaagtcaggtataagccctatgactttgcgatattttgttatgactgtgaattatagaaaaccacttgattttactgaagaagctttaaggagtgcttcagaagcttggaaaaacattaatgtagccctttcttttttggaccttacaaaaggtgcttttaaatctattgataagaatgaatctatcgaagacgaatataaagagaaaataagctttgaattatctcaaaaaaagcttaaattttctgaggctctgggaaatgaccttaatacagcaggtgctattgcaattatttacgatttagcaaaaccattaaaaaactttttaaaccaatttcaaagggtcgaaggttttaaaatagacctaaatgaaaaattctttctacttgagaattttaaaactcttgaaaagttgactgaggtacttggtcttaaaaaagaggttttagtaaaagaaagtaaaataaaagaagaagaaatatcaatgcttattaatgaaagattgaaagcaaaaaaagaaaagaattatacgaaggccgatgaaattaggaatttgttaaaagaaaaaggtattgaacttattgatcaatcaaaggaaataacaacatggataagggtctaaa

SEQ ID NO: 299563 - DNA, 491 bp, Unknown
  Bacterial polypeptide expressing nucleotide sequence isolated from the Sargasso Sea
aatgtcacaaaaagatttatacatatacaactcattaacaagttctaaagagaaatttaagtccttaagaaataatagtgttggtatgtatgtctgtggcccaactgtctatagtgaggttcaccttggtaattgtagaacatttatttccttcgatgtaatatataggtatctaacgcatttaggctataaagttagatacgttagaaatataactgatgtagggcatctagaagatactggtgaagataaaatctcaaaaaaagctaagattgaacaggttgagccaatggaaatagctcaaaaatacactaatagttttagagagattttaaaagaatttaatgtattagatccaagcattgaaccaactgcatcaggacatataacagaacaaatctcaataattgaagatttaatacaaaagaatcttgcatatatatctaatggatctgtatactttgatatatctaattataatgacattgatt

SEQ ID NO: 299564 - DNA, 979 bp, Unknown
  Bacterial polypeptide expressing nucleotide sequence isolated from the Sargasso Sea
ggccgcgatcccaatgagcagcaacagggggcgagcggccgcacggctgatggggaggagagccgcaaacgccatccgtttgactttgccctgtggaaaggagccaaggcaggcgaacccagctgggactctccatggggaccgggacggcctggttggcacatcgaatgctcagcgatggtgcgtcaggagctggggctcaccatcgacatccaccttggcggtggtgatttggtgttcccgcatcacgaaaacgagatcgcccaatcagaaaccgctaacgggacaaccctggcgaagttgtggatgcacaacggcatggtcaatgtcggtggcaccaagatgtcgaaatcgctcggcaacttcaccacgatcagggccttgctcgacagcggtatctcgccgatgaccctgcgcctcttcgtgttgcaggcccactaccgcaaaccactggacttcaccgctgaggcactggatgcagcggccagtggctggaaaggactcaatagcgccctgctggtgggcgaacgccatggcgagtcacttggctggtcaaccgctccaggcgaggtcagccctgaactggaggagcagcggcagcgcttcatggaggccatggatgatgacctcaacagctccggcggccttgcagtgctgtttgagctggcccgtccgctgcgggccctggccaaccgactcgagcgtagtgatgccatccatccagaagacaagttgctctgcggtcagtggcaactgctgcaggacctagccggggccctgggactggcgacagagatcacagccccagcatgcgcgagcgatgacagcgcccggattcatgacttgatcgaagcccgcaaggctgccaaagccaacaaggactacggcgaagccgaccggatccgggctgaactcaaggccgaaggcgttgagctcatcgacaagcccggtggcgttaccgactggatccgggcctagg

SEQ ID NO: 299565 - DNA, 1363 bp, Unknown
  Bacterial polypeptide expressing nucleotide sequence isolated from the Sargasso Sea
aatgaacaaagatatatatttaactaatagtcttggcggtaaaaaagaaatatttaaaccgatagatccaaagaaggtaagaatgtatgtatgtggaccaactgtatatgatgatccacatattggtaacgcaagacctttagtggttttcgatattctttttaaagttctcaaatgtaaatatggaaactcttcagttttatatgcaagaaatattactgatgttgatgacaaaattatagaaggtgcaaaaaataaaaatataacaataaataaacttaccgaagacactacaaaacggtttaatgaggattgcaattatttaaagtgtgaaaaaccttcttttgaaccaaaagcaactgagaacattcctttaatgatcgacatgataaatattctcataaaaaagaataatgcatatgaaaataaatcacatgtttattttaacgtgtcgagttttaaagactatggaaaactatcaaataaaaatgttgatgaactttttgcaggggcccgagttgaggtatcagaaaataaaaaaagacctgaagattttgttttatggaaaccatctacaaaagatgaacccggatgggactctccttggggaagaggtagaccaggttggcatatagaatgttcagcaatgtcaaaaaaatttcttggagatacatttgatatacacggaggtggacgtgatttattatttccgcaccacgaaaatgaaatagctcagtcaagatgtgcaaatgaaaataaatcattatcaaattattggatacacaatggctttattacggtttcaaatgagaaaatggcaaagtctcaaggaaatgtttttaaaataaaagatttttatgaaaggtataatggtcaagtattaagattagcattaatatcaactcattataggcaagcaatggattggaatgaaaatctattaacacagtcaaaaaaaactttggataaatggtatgagtgccaaaaaaaaccagaaggtaaagtattgataccagatgatgatttagttcctctttacgatgatttaaatacacctgggtatataagtaatattcataaattatatgacaaagctgccaaaggatctgacaaagataaagaaatttttacaacagcatgtaattttattggtctgttaactgagccaaaatcaaaatggcaagagtttaaaaagaatattttagaaatttcagaggaagagattttgcaaaagataaaagatagaaacacagctagagacaacaaaaattaccaattagccgatgaaatcagaaatgaacttttagataaaggtattttaattgaagataaagatgataaaacaacttggaaaataaaatga

SEQ ID NO: 299566 - DNA, 899 bp, Unknown
  Bacterial polypeptide expressing nucleotide sequence isolated from the Sargasso Sea
tatgaaaacacttaaaattcataataccttaggtaataatttagaggagtttaagccaatagaccctttaaatgttcgggtatatgcatgtggacctacagtttataattacgctcatattggaaatgccagaatggcagtggtaaatgatttattaattcgttttttgaaaactttgtatccaaaagttacttatgtttctaatatcacagatattgatgataagataattgcagcatctcaagaaaataaaatttctataaaagaattaactgaaaaatatactaaaatttataatgaagacatgtctattctaggtgtgaaccaaccagatatacaaccaaaagcaactgattatattaaagaaatgattaatcttattgaaaaattaattaaaaataattttgcttatgaaaaggatggtcatgttttatttcatgttccatcatttaaaaattatggcatgttatctggccgaaacagagatgaacaaattactggaagcagagttgaagttgcgccatataagaaagatcctacagacttcgtgttatggaaaccaagtccttcacccttaccgggatgggagtctccctgggggctaggaaggccaggatggcatttagaatgttccgctatgtcagaaaaaactttgggcttaccatttgatatacacagtggaggagctgatttaatttttcctcatcacgaaaatgaaattgctcaaacatgtgcggcacataaaagtaatgatgatttaaaatccttttcaaagtattggtttcacaatgggtttgtaaatgtagaaggagaaaaaatgtccaaatctattggtaatattaaattggttcatgacttggtaaaaaaatataaaggcgaagtgctaagattaactctgc

SEQ ID NO: 299567 - DNA, 1192 bp, Unknown
  Bacterial polypeptide expressing nucleotide sequence isolated from the Sargasso Sea
atgaagaataatcaacttaacttatcaaataccataactggcaaaagagaaacgtttgtaccaattaatccaaaaaaaattgggatgtatgtttgtggtcctactgtttatgattttccacacgtaggtaatgcaaggcctttagttgtttttgatgtattgtacagagttttgtctaaaatttttggaaaaactaatgttaattatgttagaaatataactgatatagacgataaaattatagagagttcaaaaaataaaaaaatatcaatagacgaacttaccactactattacaaaaagttttcatgatgattgtaagtatttgaactgtttaaaaccaaattcagaacctaaagctactgaacacatcaagggaatgataaatatgactgaaaaccttttaaaaaataatcacgcttatgagaaagataatcatgtatatttttcaataaactcctttgaaagttacggcaagttatcaaataaaaatcccgaggaattagttgcaggcgcaagagttgagatttctaaattaaaaaaacatcctcttgattttgttctttggaaaccttcatcaaaagaagatccgggatgggagtctccttggggaagaggacgtcctggctggcacctagaatgttccgtcatgagtgaaaaattccttggaaaaaatttcgatattcatggaggtggattagatctaatttttcctcatcatgaaaatgaaatagcacaatcatgctgtgctaataaggttgaaaaatttgcgaactattggttacataatggctatgttactttcaataaagaaaaaatgtctaaatctttaggaaatatcgtaactattgaaaaaatgcgaaagacaattaacgggcaggttatcagacttgctttactaagttcgcattataaacaacccttagattggaatgaaaacttaattaaagaaagtcaggccaccctagataagtggtactctttgtatgaaaacacacaagaggataatttgaacaacgatctattacaaccacttttagaagatcttaataccccaggttacatagcaaaactgcatttacttttcgaaaagtcatctaaaggagatgtatcttcaaaaaaacttttccttgctggatgtaagcttattgggctattagaggaagattttgaaacatgggaaaaattttaaa

SEQ ID NO: 299568 - DNA, 742 bp, Unknown
  Bacterial polypeptide expressing nucleotide sequence isolated from the Sargasso Sea
atggatatttattttacaaataatttaactaataaaaaagaacagtttattcctagggatattaagaatgtaggaatgtatgtttgtggtcctacagtctatgatgatcctcatattggaaatgcaagaccattagttatttttgatattctttttaagttactcaaaaataaatttacctcagtgacatatgtaagaaatataacagacattgacgataaaattattaaatcttcaaaagaacaaaatatatcatccaaagaattaactgagaaaataactaaaaattttctaaatgattgctcctatttaaattgtgagagtccaactcatcaacccagagccactgaacatatagaccttatgatcaaaatgataaataaattaataaaaaaaggttttgcatatgaaaataataagcatgtttattttgaagtcaaaaaattttctgattatggaaaattatcaaataaaaagttagaagatttaatagctggatcaagagtagaagtaagtgaagataaaaaaaattctgaagattttgtactgtggaaaccctcaaatgaagacgaaccatcatgggattctccttggggaaaaggaagacccggctggcatttagaatgctctgcaatggcgaaaaaatttttaggtaatgagtttgatatccatggaggaggtatagacctaatatttcctcatcatgaaaatgagattgcacaatcaacatgtgcaaatgaca

SEQ ID NO: 299569 - DNA, 265 bp, Unknown
  Bacterial polypeptide expressing nucleotide sequence isolated from the Sargasso Sea
aatgctatcaaagccattagttctatacaactccttatctggtaaaaaagaggagtttaaaccattaaaaaaaaatcacttagggatttatgtttgtggacctacagtatacagtaatgttcatctaggtaattgtagaacttttatttcatttgacataatatatcgttactttatgcataaaggatataaagttagatatgttaggaatattacagatgtagggcatcttgaagatgatggacaagatagaattaacaaaaag

SEQ ID NO: 299570 - DNA, 316 bp, Unknown
  Bacterial polypeptide expressing nucleotide sequence isolated from the Sargasso Sea
atgatcaaactttttaatactttaagcaaaaaagttgaggtttttaagcctattgatgatgttgtaaaaatttattgttgtggggtaactgtttatgatttatgtcatcttggtcatgccagaagttatatcgcttgggatgtattgagaagatttttaatttacagtgatttcaaagtgaagtatgttcaaaattttacagatattgatgacaagatcttaaaaagagcgaaagaagaaagcagttcaatgaaggaagtatctgaaaagaatatcattgaatttcataaagatatggattctttagggataatgc

SEQ ID NO: 299571 - DNA, 685 bp, Unknown
  Bacterial polypeptide expressing nucleotide sequence isolated from the Sargasso Sea
atttgatattcatggtgggggaatagatctagtttttcctcatcatgaaaatgaaatagcgcaatctaggtgcgcaaatcaaactaaagtttttgctaattattggattcataatgcttttattactatgtcaaatgaaaaaatggcaaagtctcagggaaatattctaaagattaaaaattttagaaaaaagattagtggtcaagttattagattggctttaatgagtgcacattataaacaacctttagactggaacaataaattattagataattgtcagtctactttagacaaatggtatcgtgtttattcacaagatattaaatctattaaacttactgatgaaattttaaaacctttatatgaagatttaaatactcctggatatattgctaatttacatcaactttatgaaaaagcgaatatgggtcaaaataaagaattatttttatcagcttgtaaattcataggtctattaaatgaaaataaagaacaatgggaaaattataaaaaaattaatgcctctattactgtaacagacatagaaagtaaaattgatttaagaaataaagctagagcaaataaagattataaagaagcagatagaattagagatgatttattaaacaaaggagttttaatagaagataaagatggtaaaactctttggaaatttaaatga

SEQ ID NO: 299572 - DNA, 865 bp, Unknown
  Bacterial polypeptide expressing nucleotide sequence isolated from the Sargasso Sea
gatttctggagcaagggggttgagatatctgaaaataaaaataaccctgccgactttgtattatggaagccatcttctgaaaatgaaccttcttgggaatccccatggggaaaaggaagaccaggttggcatcttgaatgttcagttatgtctaaaaaatatttaggggataaatttgatattcatggtggaggcatagatttaatttttccgcatcacgaaaatgaaatcgctcaatctagatgtgcaaacgaaaatgaaacatttgctaattattggatccataatggatttataacaatatcaagtgaaaaaatgtcaaaatcacaaggcaacgttttaacaattgacgatttaaaaaataaagtaaatgggcaggtaataagactagctttgattagcgctcattataaacaaccattagattggaatgaaaaacttttatctgaaagtgaaaaaactattaacaaatggtatgaaagttacacagaattaaaaaaacaagttttaattccacaggatcatctttcacctttatatgatgatttaaatacaccaggctatatagctaatcttcataaactatttgaaagttctcaaaaaggatcaacaaaagacaaagagatatttgtgtcagcatgtaattttattggtttgttaaacgaagataaagaaacttgggaaaaatttaaacaaagtaagtcaaaaatttctaaggaagaaattgaaaaaaaaattgaagagagaaatattgctagaaaaaacaaagattataaagcagctgataacattagagatgagctattagataaaggagttttaattgaagacaaagatgataaaaccctgtggaaatttaaatgag

SEQ ID NO: 299573 - DNA, 754 bp, Unknown
  Bacterial polypeptide expressing nucleotide sequence isolated from the Sargasso Sea
ggcagggaagacaggctggcatttagaatgttcagtaatgtccaaaaaatatcttggtgataagtttgatattcatgggggaggcatagatttgatatttccacaccatgaaaatgaaattgctcaatcatgttgtgctaatgatactgaagttttttcaaattattgggtgcataatggttttataaccttatcaaatgaaaaaatggcaaaatcacagggtaatattttaaagataagtgattttaaaaataatgtgaatggtcaagctctaagactagctttaattagcgcacattatagacagcctttagattggaacgacaaacttttagaggaaagtcaaaaaacaatcgataagtggtataaaagctatgtagaactaaataagcccaaactcatctctgatgatgatctttatcctttgtatgatgatttaaatacaccaaaatatatagccaaccttcataagctatatgaaaaatctcaatcaggtaatttggaagataaacaagaatttatatctgcatgtaattttgtaggattgttaacggagactaaagatgaatgggaaaaatttaaaaaaaataaatctgatttgagcgatgagataattgaaataaaaattaaagaacgaaatcaggctagagatgataaaaattacgaattagctgataaaattcgaaatgatcttttggaaaaaggagttcaaatagaggataaaggtggtaaaacctcgtggaaatttaaataa

SEQ ID NO: 299574 - DNA, 739 bp, Unknown
  Bacterial polypeptide expressing nucleotide sequence isolated from the Sargasso Sea
catgggtaatgatatttttttaacaaataatctaaacaacaaaaaagaaaagtttgttcctattgatgaaaaaaatattaaaatgtatgtctgtggtccgaccgtatacgacgatcctcatatcggtaatgcaagaccaattgttgtttttgacattctttataaaatttttaaaaaaaaatatccaaaagttacttatgtaagaaatataactgatgttgatgataaaattataaattcctcaaagagcaaaaatatatcaatttctgaattaactgaaaatgtaaataaaagttttcagaaggattgcagttatttaaattgtgatatccctacgcatcaaccaaaagcaacagaacatattgatttgatgatagaaatgatttctaatttgataaacaagggatttgcttatgaagaaaatcaacacgtatattttgaagtaaaaaaatttaaagactatggaaaactttcaaataaaaatcttgatgaattaattactggttcaagagtcgaagtgagtgataataaaaaaaactcacaggattttgttctatggaaaccttccaaagccgatgagccttcttgggcgtctccttggggcaaaggcagaccaggttggcacttagaatgctctgctatgtcgaaaaaatttcttggaaatgagtttgatattcatggaggaggtatagatttattatttccgcaccatgaaaatgaaattgcacaatcaagatgt

SEQ ID NO: 299575 - DNA, 1363 bp, Unknown
  Bacterial polypeptide expressing nucleotide sequence isolated from the Sargasso Sea
aatgaatagagacatttatttaagcaatagtttgggtggtagaaaagaaaaattcaaaccaataaatcctaaaaaagttagaatgtatgtttgtggaccaacagtatatgatgacccacatataggtaatgcaagaccccttgttgtatttgatattttatttaaaattcttaaatgtaaatttggaaattcctcagttgtatatgttagaaatattaccgatgttgatgataagattattgagggtgcaaaacaaaaaaaaatattaataaataagctaactacagatattacaaaacgatttaatgaggattgtgattatttaaattgtgaaaaaccatcttttgaaccaaaagcaactgaaaatatccctttaatgattgatatgataaaaattttaattaaaaaaaataatgcatatgaaaataactctcacgtttattttgacgtatcgagttttaaagattatggaaaattatcaaacaaaaatgtcgatcaactctttgcaggggcacgagttgaagtttcagaaaataaaaaaaggcctgaagattttgttttatggaaaccatctttgaaggaagagccaggatgggactctccatggggcagaggtagaccaggctggcatatagaatgttctgcaatgtcaaaaaaatatcttggggatacttttgatatacatggaggcggaagagatttgttattccctcatcacgaaaatgagatagcccaatcacgttgtgctaatgacaataaaagtctatctaatttttggatacataatggttttattacagtttcaaatgaaaaaatgtccaagtctttgggaaatatttataagataaaggatttttataaaaagtataacgggcaagttttaagattagcactaatgtcaacacattataaacaagccatggattggagtgacgatttattattacagtcacaaaaaactttagataaatggtatgaacaccaaaagaaaccagaagggaaagttttaataccagatgaggatttaaatcctctttatgatgatataaatacgcctgggtatattagtaatattcataaattatatgataaagctgcaaaaggatcagacaaagataaagaaatttttacaatggcatgtaattttataggtcttctaaatgaaccgaaatcaaagtggctaaagtttaaaaaaaatattttagaaatttcagaggaagaaattttacgaaagataaaagatagggacaaagcaagagataataaaaattacgaattagctgataaaataagaaatgagcttttagacaaaggtgttttaattgaagataaagatgataaaacaacctggaaattaaaatga

SEQ ID NO: 299576 - DNA, 488 bp, Unknown
  Bacterial polypeptide expressing nucleotide sequence isolated from the Sargasso Sea
catgggtaatgatatttttttaactaacaatctaaacaataaaaaagaaaagtttgttcctatagatgaaaaaaatattagaatgtatgtctgtggtccgaccgtatacgacgatcctcatatcggtaatgcaagaccaattgttgtttttgatattctttataaaatttttaaaaaaaaatatgcaaaagttacttatgttagaaatataactgatgttgatgataaaattataaattcatcgaaggacaaaaatatatcaattgctgaattaactgaaaatgtaaataaaagttttcagaaggattgtagttatttaaattgtgatatccctacgcatcaaccaaaagcaacagaacatattgatttgatgatagaaatgatttctgatttgataaataagggatttgcttacgaagaaaatcaacatgtatattttgaagttaaaaaatttaaagactatggaaaactttcaaataaaaatcttg

SEQ ID NO: 299577 - DNA, 1201 bp, Unknown
  Bacterial polypeptide expressing nucleotide sequence isolated from the Sargasso Sea
taagcccgtgaaaaacggacaggtaaagatgtacgtctgtggacccactgtttatgattttgcccatattggaaatgctcgtccagtagtggtttttgacttgttttatagaatgtttttacagtcttatggagaagctaacgtaacttatgtaagaaattttaccgatgttgacgataaaattaacgaacgttcaaaaaaattaggtatcaaaataggtgaacttaccaatagcactatagaggactatttgtttgatatggattctcttggtgctcttagacccaattttatgccgcgtgcgacaaattatatagagcacatgatagaaatgataaaaaaattgatagagtctaataatgcatattcagatgatggtgggcacgttatgttttctgtcagaacgtttaaggattatggtcaattatctagaagaaccatagaggaaatgaaggctggagcgcgcgtggaagtcgctcaaaacaaaagagatccaatggattttgtactttggaaaccttctactgataatcagcctggctgggaaagtccttggggacgaggtaggcctggctggcatattgaatgttctgcaatgagcaaagagctcctgggtcactcatttgatattcacggaggaggaatagatcttgcattcccccatcatgaaaatgagttagcacagagcttatgtgctaaccctgggaaaagttttgctaagtattggctccataatggcatgcttacggtagaaggtaataaaatgtctaaatctctgggaaattttgtgacagttagagaattgcttgaagatggtataagtggtgatgcaattaggcttgctttgatctctagtcactatcgtcaaccgttagattggacgaaaaagcgattaaatgaatgtggtgagacaataaaaagatggaaagaattaacattgggaaaaaaagagatagggttccagtcaaataaagtgttagaggcaatttatgatgatttaaatactcctaaggctatttctgaaatgcatcacttggcaaagaatggagattatgaagggttgcttgcttctcttcgcttcatggggtttcttgatacacgaactgcaaaaaataagcctgaaatagaatctgaagtaaaaaaattagttgaatctttaattgagagacgaaagcaggcaaaactggataagaacttgagc

SEQ ID NO: 299578 - DNA, 490 bp, Unknown
  Bacterial polypeptide expressing nucleotide sequence isolated from the Sargasso Sea
aatggatatttttttaacaaataatttaacaaataaaaaagaacaatttattccaaaagataaaaaaaatattggaatgtatgtttgtggaccaactgtatatgatgatccacatattggaaatgcgcgaccactagttatttttgatattctttttaaattattaaaaaatacttttccaaaagtaacatatgtaagaaatattacagatattgatgataaaataattaaatcatcacaggaacaaaaaatatctgcaagagaacttactgaaaaagtaacatcaagtttttatgaggattgtaagtttttgaattgtgaaaatcccacttatcagcctaaagccactgaacatattaatttaatgatagaaatgataaatcaattaataaaaaaaggttttgcttatgaaaataataatcatgtttattttgaggttaagaagttttctgattatggaaaattatcaaataagaaattagaggatttg

SEQ ID NO: 299579 - DNA, 700 bp, Unknown
  Bacterial polypeptide expressing nucleotide sequence isolated from the Sargasso Sea
tatgaaaatctttaatactctttctggaaagaaagaaatctttgaacccatcgaggataataagattcgaatgtatgtatgtggtatgacagtttatgatgacacacacataggtcacgcaagaaccttcctgtcttttgatcttattgtcagatatttaagaagtatagattatgaagtccaatacataagaaacattactgatgttgacgacaaaattattgcaaggtcagaagagttgaatataagtccatcagaattaactaaagattgtataaattcaatgcatgttgatttccaggcattaggaatgatcagtcctgatgccgaacctcgggctacagagaatattgactcgattatttctctcataacaaaacttatagataagggtcatgcatatgtgagtgaatcagatgtttacttttctactgaatcttttgaagaatatggaaagcttagcaaaagaaaattagaagatatgttatctggagccagaattgatattgatctagataagaaaaatcctgctgattttgttttatggaaaaaggatactgagggattgaaatgggactcaccttggggaccaggaagaccaggttggcatatagagtgctcagcaatgagcatggatgctcttggggaaacttttgatattcatggcggtggatcagatctaaagttcctcatcagaaaa

SEQ ID NO: 299580 - DNA, 709 bp, Unknown
  Bacterial polypeptide expressing nucleotide sequence isolated from the Sargasso Sea
atgatcaaactttttaatactttaagcaaaaaagttgaggtttttaagcctattgatgatgtagtaaaaatttattgttgtggggtaactgtttatgatttatgtcatcttggtcatgccagaagttatatcgcttgggatgtattgagaagatttttaatttacagtgatttcaaagtgaagtatgttcaaaattttacagatattgatgacaagatcttaaaaagagcgaaagaagaaagcagttcaatgaaggaagtatctgaaaagaatatcattgaatttcataaagatatggattctttagggataatgcgtccggatagcatgccaagagcaacgaatcatatatgcaatatctgctccttcataacaatccttgaggacaaaggttttgcatactctagggatggagacgtttattattctgttttcaaaaataaaaattatggaaagctaagtaatcaaaatttacaagaacaaaatatcaatcagcaaggaagaatggtaaatgaggaaaatagtaaaaaacttaatccgcaagattttgcgctatggaaaaaagccaaagatgatgaaccattttttgattcgccatggggtaaaggtaggccaggatggcatattgaatgttcggcgatggttaaagatgaattaggagatactatcgatatccatttaggtggttctgatttgatttttcctcatc

SEQ ID NO: 299581 - DNA, 767 bp, Unknown
  Bacterial polypeptide expressing nucleotide sequence isolated from the Sargasso Sea
ggagtctccttggggaagaggacgtcccggctggcaccttgaatgttccgtcatgagtgaaaaatttcttggaaaaaattttgatatacatgggggaggattagatcttatttttccacatcatgaaaatgagattgctcaatcatgttgtgcaaacaaagtagataaatttgcaaactattggttacataatgggtatgttactttcaataaggagaaaatgtcaaaatctttaggaaatattgttacaatcgaaaaaatgagaaaaacaattaatgggcaggttatcaggcttgcacttttgagttcccactacaaacaacccttagattggaatgaaaatttaatcaaggaaagtcagaacactcttgacaagtggtatacacagtttgaaaatactaaagaagatgctttaacccaagatttactggaaccacttttagaagatattaataccccaggtttcatagcaaaattacattcattatatgacaaagcatcaaagggagaccaatcttcaaaaaaaactttccttgcaggatgtaaacttattgggttacttgaagaagacttagaaatttggaataaatttaaaaaaacaacatcaaaaattgatgaaaaaaatatccaaaataaaattaaaaatagagatcaagcaagaaaaaaaggtgattataaactagctgacaacataagaaaagaacttgaaagtaaaggggtaattattgaagacaaagataacaaaacaatttggaaatataaatgag

SEQ ID NO: 299582 - DNA, 1026 bp, Unknown
  Bacterial polypeptide expressing nucleotide sequence isolated from the Sargasso Sea
aatgagtaaagatatttttttaacaaataatctaacaaataaaaaagagaagtttgttccactagataagagcaacattagaatgtatgtgtgtggtcctactgtttatgatgatccccatattgggaacgcaagaccaatagttgtatttgatattctgtttaaaattttcaaaaaaaattatcctaaagttacttatgtgcgaaacattacagatgtagatgataaaatcattaaatcttcaaaagaaaataatatttcaatttcagaattaacaagcaaagtaactaaaagttttagtgaagattgtcattacttaaattgtgagaaaccaactcatcaacctaaagcaacagaaaatatagatttgatgattaaaatgatttctgaattaataaaaaaaggatttgcttatcaaaataataagcatatttattttgaggttaaaaaatttaaggattatggtcaattatcaaataaaaaattagaagaacttattgctggatcaagagtagaagtcagtgaaaataaaaaaaattcagaagattttgttttatggaaaccttcagaagatgaagaaccttcatgggaatctccatgggggaaaggaaggccaggatggcatctagaatgttcagcaatgtcaaagaaatttttaggagataagtttgatgttcatggaggtggtatagatttgttatttcctcatcatgaaaatgaaatagctcaatcaagatgtgcaaatgatacaaaaatattggcaaaattttggatgcataatgcatttatcactatgtctaatgaaaagatggctaagtctcagggaaatattttaaaaataaaagattttagaaataaaataagtggtcaagttttgagattagctttactgagtgcgcattataaacaaccattagattggaatgataaacttctggacgactgtcaaaacacaataaataaatggtacaattcatatttagatattgaaaataattctaaagtttctgatgaaattcttcagcc

SEQ ID NO: 299583 - DNA, 926 bp, Unknown
  Bacterial polypeptide expressing nucleotide sequence isolated from the Sargasso Sea
ttattttaaagttaaaaattttaacgattatggaaaactctcaaataaaaatcttgatgatttaattgcaggatcaagagtagaactatctgacaataaggatagtccagaggattttgtgttatggaagccttcaaatgatgatgagccatcatggaattcaccttggggaaaaggaagacctggttggcatttagaatgttctgttatgtcaaaaaaatatcttgggaatacttttgatattcacggaggtggaagagatcttatatttccacaccatgagaatgaaatagcccaatctgtttgcgcaaataaaacgaaaaaatttgcaaattattgggtgcacaataattttatcacaaactcaaaagaaaaaatggctaagtctcaaggtaatattttaaaaataagtgattataaaaaaaaatataatggtcaagttttaagattagctctaatgagtacccattacagtcaaccactggactggaacgataaactgatggatgaatgtaatagaactttagataaatggtacaattgctttgtaccagtaaataaaaaggtattgatagaggataatgatttaaaacctttatatgatgacttaaatacgccaggttttattgctgtactgcataagctctttgataaagctaaagatggaacttttgaagataaagaaatattttcaactgcatgtaaatttgttggtcttttagatcagtcaaaagatgaatgggatagttttaaaaaacaaaatttaaaactttctgaaaatgatattttaaagaaaattgaggagagaaataaagctagagataaaaaagattatgaattagcagataaaattagaaatgagctattagacaaaggtattttaattgaagataaagatggtaaaacaatctggaaaattaaatgag

SEQ ID NO: 299584 - DNA, 846 bp, Unknown
  Bacterial polypeptide expressing nucleotide sequence isolated from the Sargasso Sea
gatgatcaaactttttaatactttaagcaaaagagttgaggtttttaagcctattgatgatgtagtaaaaatttattgttgtggagtaactgtttatgatttatgtcatcttggtcatgccagaagttatatagcttgggatgtattgagaagatttttaatttacagtgatttcaaagtgaagtatgttcaaaattttacagatattgatgacaagatcttaaaaagagcgaaagaagaaagcagttcaatgaaggaagtatctgaaaagaatattattgaatttcataaagatatggattctttagggataatgcgtccggatagtatgccaagagcaacgaatcatatatgcaatatctgctccttcataacaatccttgaggacaaaggttatgcatactctagtgatggagatgtttattattctgtttttaaaaataaaaattatggaaagctaagtaatcaaaatatacaagaacaaaatatcaatcagcaaggaagaatggctaatgaggaaaatagtaaaaaacttaatccgcaagattttgcactatggaaaaaagccaaagatgatgaaccattttttgattcgccatggggtaaaggtaggccaggatggcatattgaatgttcggcgatggttaaagatgaattaggagatactattgatatccatttaggtggttctgatttgattttcccacatcatgagaatgaaatcgcccaatcagaagcagccaatggcaaaaagcttgcgaactattggttacacaatgggatggtcaatgtaaatggtcagaagatgagtaaatctcttaaaaattttaaaaccataagagaact

SEQ ID NO: 299585 - DNA, 757 bp, Unknown
  Bacterial polypeptide expressing nucleotide sequence isolated from the Sargasso Sea
tatggatatttttctttataattcactgtccaaacaaaaagagaaatttacccctatagatcctaaatctattaaaatgtatgtatgcgggccaactgtttatgatgaaccgcatattgggaatgcaaggcccgtcattgtctttgatttattatttcgattacttaggtataaatatgggaatgataaagtcaactatgtccgaaatataacagatgttgatgataaaattaataagatagcattacaaaaatatccagatttagatatcaacgaagcaatacgtgaaattaccaataaaatcgaagtaatatttaaagatactgcaatcaaattgggctgccttgagccgtcaaaagagcctcgcgctacagaacatgttaccgaaatgattaatatcattgatagcctattaataaataaaaaggcatatgtaaacgaaggtcatgtaatttttgatattaactcatactctaattatggtcatttatctaataaatcaaaggaagatttaatggctggggtgcgcattgaagttgcaacctataaacgagatcctttagattttgtattatggaagccaagtgcagtaaatgagccatcttgggatagtccgtggggtaggggaagacccggttggcacatagaatgctctgctatgtccgcaaaatatttaggcgaggtttttgatattcatggtgggggtatcgatcttgcttttccccatcacgagaatgaaattgctcaatcatgtagc

SEQ ID NO: 299586 - DNA, 766 bp, Unknown
  Bacterial polypeptide expressing nucleotide sequence isolated from the Sargasso Sea
ccaggatggcatacagaatgctcagcgatgtccaaaaaaacattaggtcttccttttgatattcatggtggcggtagggacttaatttttcctcatcatgaaaacgaaatagctcaaagttgctgttcttccgcaaacattgaagatcctacatcttatgctaaatattggatgcataatggttttgtaacgattgatggtcaaaaaatgtctaaatcgctaggcaatataatacttgtaaatgagttaacagaatcccatcatggtgaagtaattagattggctctattatcatcacattataggcagggcttagattggaacgaaaaaataattcatcaagcaagcatccttctagataaattatacgaaattaagtttttgttaaatggtgaaaatacagaatattcatctgaaacaaatttagaaccaatcgcctacctagctgatgatctaaatacacctggactaatcgctgaactgcataaactagttaaagattttaatacttcaaattccaataaatcagagattaaaattcatctaaatttaatttcacaagctttaggaatcttacaagatgattcttataaaaaaatatctgaggaattagaatcaaaaatacattcattaatattaaaaagaaaagtagcaaaagatagtaaggattatgaattagcagataaaattcgaaatgaactattcgatttaggtgttgaaattaaagacactagtagcggtactgattggaatttgaaatcatgac

SEQ ID NO: 299587 - DNA, 922 bp, Unknown
  Bacterial polypeptide expressing nucleotide sequence isolated from the Sargasso Sea
aatgaagatcaatctctataattcaagcacaaagagtaaggagctgtttgttcccattgaccctaagaaggtcacaatgtatgtgtgtgggcccacagtatatagttttcctcatattggaaatgccaggggtcctgtcatatttgatgtcttggcaaatctcttgagaagagaatatcagctcgtatatgtaagaaatataaccgatcttgacgataaaatttatcaggcagctgaagaggaaggtgttcaaatatccgagattactcagcgatatacaaaaatttatcaagaggatatgaatgctttaggggtaagagatccggatatagaacctttggccacagatcacattgctgaaatgattgaaatgatccaaggtttgattgataaaagccatgcttatgagaatcaaggacatgtttttttcagcatagatacatttaatgattatggcttcctctccaatcggtctgaagaggagcagatttcagggacacgaataaaaccatccgaaataaaaaagaatcaaaaggactttgttttatggaagccatctactggggatactcctggctgggatagtccgtggggttttggaaggcctgggtggcacctcgaatgctctgcgatggcaaaaaaatatcttggaaaaacattagatattcacggaggcggtagtgatcttctgtttccacaccatgaaaatgaatgtgcacagagcatgtgttctcattcagggaagcccttggcaaactattggattcacaatgggatgatcgattttgataacgtaaagatgtcaaaatctgagggaaatcttttgcttattagagatcttctaaaacaaattggaccagagatcattcgcatggcatttttaacaactcactatcgaaaacccatcaatggaatgatgctc

SEQ ID NO: 299588 - DNA, 728 bp, Unknown
  Bacterial polypeptide expressing nucleotide sequence isolated from the Sargasso Sea
tctgcggctcaccaacaccctcacccgccgcattgaaccgttcacccctctgacgcctggcaaggtcagcatttactgctgtggggtaacggtctacgacctctgccacttgggccatgcccgcagctatatcaactgggatgtgctgcggcgcttcctgatctggcggggccttgaggtgaccttcgttcagaacttcaccgacatcgacgacaagatcctcaaacgggctgcgcaacaagacagctcgatgaccgaagtgagtgagcgcaacatcgacgcgttccaccaggacatggatgcactggggattctcaggccggaccgcatgccgcgcgccacccagtgtctggatggcatccgctcactcatcggcgaactggaagcgaagggtgcggcctatagcgccgatggggatgtgtacttcgcagtgatgaagcatgccggctacggcaagctcagtggtcgcgatctgagcgaacagcaggacaacgccgccggacgggtcgctgatgctgaggaggcccgcaagcagcaccccttcgacttcgccctttggaaaggggccaagcctggtgaaccgagcttcccctcgccatggggtgaaggtcggcccggctggcacattgagtgttccgccatggtgcgggcggaactgggggacacgatcgacattcacctcggtggcgccgatctggtgttccctcaccacgagaatgaaatcgccc

SEQ ID NO: 299589 - DNA, 997 bp, Unknown
  Bacterial polypeptide expressing nucleotide sequence isolated from the Sargasso Sea
gattcataaaattattgattcagggcatggttatgttgaaaacaatcatgtactttttaatacagaaaaagataataattatggatgtctatcaagaaaaaaactggatgaaatgatagatggcgctagggtagaggttgcagaatataaaaagtctcctcgagattttgttttatggaaaccatccgataacgatagttttggctgggatagtccctggggatatggaagacccggatggcatatcgaatgtacttctatgataaaaaaaattattggagatgattgcactttagatatacatggtggtggtaatgacttgatattccctcatcatgaaaatgagatagcacaaggatcatgcatttcaactagcaaatattgcaactattggtttcacaatggtattgtgcttgttaataaaaagaaaatgtcgaaatcattaggaaatgtcattctattagatgatttgcttaaagagcatagctcgtccgtgattcgtttagctttgctatctgcacattatagacaaccgcttaattggacagaacaaactattatcaatgcaaaaaatctgtataaaaaattagtatcagcagttggtataatcactgaagatatgtttagttatgcagcagaggctacctacctacctttttcacaatgcggtgaaattcaagatatactctctgacgatttaaatacacctgaagtaattaattatctttctagattagcaaagacagctcgaaataattctgatgatgcaatgaaactagcacaatcaatgaaatttattggattagatttggcaaaaaaatcttacatgaatttaccagacgataaagacataattaatcttataaaacaaagagacgaatttagaattaaaaaagactttaaaagtgccgatgaagtgagagacaagcttttagacatgggcgtagaattgcgagattcagatggcaaaacaacttggaagtattctgaggattaa

SEQ ID NO: 299590 - DNA, 1381 bp, Unknown
  Bacterial polypeptide expressing nucleotide sequence isolated from the Sargasso Sea
catgctacagatttttaacaccctgacccgtaaaaaagagtcctttgtgcctttagtgcctggcaaagtttctatgtatgtctgcggcatcactatttatgatttctgtcatgttggccacgcccgtacttatgtagcttttgatgtgatgaaccgttacctacgtttcagcggctatgacgtcacttatgtgcgtaacatcacagatgtagacgacaaaatcatcaaaagagccaatgaaaacggcgaaagctgtgatgctttaacggcccgttatactgtggctatgcatgatgactttaatgcactggggttaatgcctgccgatattgaacctcgtgtcaccacgcatatggccgaaatcattgagctgattgaaaccttagtggcaaaaggttatgcctacatcgcctctgacggtgacgtcctctttgatgtcagtaaatacgaagcttatggacagcttagtcagcagaacctggatatgctgcaatctggcgcccgggtcgaaattgatcaggccaaagacgatccactggattttgtattgtggaaaatggccaagccaaatgagccaagctggtcatcgccatggggcgaaggccgtcctggctggcatatcgaatgttcggctatgagtgcaaaacatttaggcaaacattttgatattcacggtggtggttcagatttacagttcccgcaccatgaaaacgaaattgctcagtcttgctgcgctcatgatacgccttatgtgaatacctggatccatactggtatggtgcaggtcgataaagagaagatgtctaaatctttaggcaatttctttaccgtgaaagatgtgctggcagattacaacgctgaagctgtgcgttatttcctgatctccagtcattaccgcagccagctgaattactcggctgaaaacttgctgcaggcgcattcagctttaggccgtttgtacaccgccttgcgcgaagtgaaagctgcgacagacgtcgatatgaataacgattacgtcaaaaccttccgtgctgctatggatgatgacttcaatacagctttggctttgcctgtgttatttgaactggcgcgtgatatcaacaaagaaaaagccacagatccaaccaaagcttcacagcttgcgggcttgttaattaaactcggcagtgtgatgggtattttgcagggcgatgcagagacctttttacagtcaggtacagattcagatgatgtggctgaaattgaagctttaattacacagcgcaatacagcacgagctaacaaagactgggctgcggctgatgctgcccgtgacgctttagtggctaaggggattattctggaagataaagcaggtgttaccacctggcgtcggggttaa

SEQ ID NO: 299591 - DNA, 703 bp, Unknown
  Bacterial polypeptide expressing nucleotide sequence isolated from the Sargasso Sea
atgaataaacaactaaatatatttaatactctttcaggaaaaaaagaaaaatttatacctattaacacgtctaaggtaggaatgtatgtttgtggaccaaccgtttatgattttccacatattggaaatgcaagaccacttgttatttttgatgttttattcagattactaaaaaaattaaatggtgatgataaagttacttatgtaagaaatataaccgatattgatgataaaattattgaagcctctaaaaataaaaacattccaatagacaggcttacaaatgatattacaaaaaactttcatgacgattgtaaatatttaaattgtttaaaaccaaatttcgaaccaagagctactgaacatattaaaggtatgatcagtatgacagaaaatttattaaataataaacatgcctacgaaaaagacaaacatgtatatttttctgtaaactcttttaaaaattatggaaagttatctaataaaaaacctggcgagcttgaggcgggttcaagagtagagatttcaaaattaaaaaacaatccattagattttgttctttggaaaccatcttctttagatgatcctggctgggattctccatggggtcggggaagaccaggttggcatctcgaatgttcagttatgagtgaaaaatatctaggaaaaaattttgacattcatggaggtggcttagatcttg

SEQ ID NO: 299592 - DNA, 715 bp, Unknown
  Bacterial polypeptide expressing nucleotide sequence isolated from the Sargasso Sea
aattttccacatcacgaaaatgaaattgcacaatcaaaaggagcacacccaaaagaacaatttgtaaaatattggcttcataatggaatgttaaatttatctggcaaaaagatgtccaaatctgatggaaatgttaaattattaaatgaatatatagatgaattcagtggtcctattctaagatttttctttttaaaatctcaatatagaagtcctcaagaatttaatgttaatttgttaaaagaatctgaaacaacattaaacaatttgattgactttacatatggtgttgattctgaactaaagagcaaagaggtcttagaaatttttgaaaattctatgaatgaagatttaaatactccaaaaatgttaggaagcttatttaagttaataaatgaatccaatacattaaatgagcaaaagttactggaattaaaatcaagcattaaatttgtttttaatcttcttggttttgacttaataaaagtagagaataatgaaaaaacagatgaggaattaacaaaattctttaaaaaatatgatattaactttgaaaatattaaccaagcagtttctgaatttatcaataaacgagaagacctaaggaagcaaaaagattttgcatcagcagataaaatgagagaaagcatcttaggaatcggaataagtcttgaagatggaacagacagtggatggtcttggaaaaatagttgag

SEQ ID NO: 299593 - DNA, 1366 bp, Unknown
  Bacterial polypeptide expressing nucleotide sequence isolated from the Sargasso Sea
aatggacttgatgctttacgatacatttaccaattcaaaaaagaagtttgaaccaattgatccaaataatgtgcgaatgtacgtttgtgggccaactgtttacgattatgcgcatgtaggcaatgctcgaccagttatagtgtttgatattttatttcgattactccaaaaaatttatggcagtgaaaatgtaacttatgtaagaaatatcactgacgttgatgataaaattatacacgcagcaaatgatcaaaatgaagacattggaatacttacagaaaagacaattaattattttcatgacgatgcgaaatatattggtgctttaaaacctacatttgagccaagagcaaccgaacatatacctgagatgatcgagttgattgaaaaactcatatcaaaagagtttgcatatgtagcggatggtaatgttcttttttcttcaaataaatttaaagaatatggaaaactctctggcaagaatttagatgaaatggttgctggttcgcgtgtaggtgtagaaagttataaaaaagaagagtctgactttgtattatggaaaccttcaaaagaagatgagcccagttggaaaagtccatggggagatgggagacctggctggcacattgagtgctctgcaatgagtgaaaaacttttaggggaaaattttgatattcatggaggaggccaagatttaatatttccacatcatgagaatgaaattgctcaaagtgagtgtgcaaataataacaaatttgcaaattattgggttcacaatggctttgtcactgttgagggtaataaaatgtcaaagtctgatggtaattttgtaactgtaaacgagttaaaagacagtttccaaggggaagttattaggcttaccatgatatcaactcactacagacaacctctgaattggaccaaggataacctcaatgaaagtaaaaaaacattagataaatggtacacatttttgagcaattttaatgatgatgaattaaaagatgcaaataatgataatgaaattatggaaacattattggatgatattaatacacctaaagctatcagcgtgcttcatcaaaaatttaaagactgccaatcaggggataaaggcttagtaagcaattttttatattcagcaaatatgcttggacttttaaatgaaaaaccatctgaatggctttcctggaaaaaggaaaatttaaatattaataccgctcaagttgagttgcttattgctcaaagaaatgaggcacgatcaaacaagaactttgatgatgctgataggatccgagatgaattagacaaaatgggagtcatacttgaagatcaaggtggcgaaacaacttggaaagttaagtaa

SEQ ID NO: 299594 - DNA, 716 bp, Unknown
  Bacterial polypeptide expressing nucleotide sequence isolated from the Sargasso Sea
ttttgatattcatggcggtggtaatgatttgcagtttccacatcatgaaaatgagatagctcaaagctgttgcgcataccctgaaagtgaatttgcgcgttattggttgcataacgaaatgcttcaagtcgatggaaaaaaaatgtctaaatcacttggtaacttttttacagttcgcgatttacttgataagggatatcctggtgaagtgatcagatttgtatttctgtcgacccattatagcaagccgatggattggaataactcaaaagccttagaagccaaaaacattctgagaaaatggcgagtattattgaaaaataattttgaaattgtcccattaccagaggaagctattaagattttatctgacgacttgaatactgctggcgttatttcgttacttcataattatgctagtaatggggaaatagggaagctcaaagctggtgctaattttttaggtattttaactcaggaattgagtgactggtgcgcagatgtcgatatgagctctttggagggactctttgcagatcttaggaaacgggccattgaaagtaaaaattttgaaaatattgatgagttgaggtctaaactaacaaacgcaggggtagatgtccaaattggaaaatctaatgttaccctagtaccaaacgcgagtttcgaccttcaagaagtgaacaaaataataaatttttatggtttaaattagg

SEQ ID NO: 299595 - DNA, 631 bp, Unknown
  Bacterial polypeptide expressing nucleotide sequence isolated from the Sargasso Sea
aattattggattcattcaggattgttgaagatcggtggtgaaaagatgtcaaagtcgcttggtaactttgctttgatcaaagatttaattaagcaatatcattttgaagtcataagactcttcttaatatcaagccactatagaagcgaattaagttttgatgaaggctctttgaaccaagcaagggcagcactagaaagactttatacaactttacaattaaatgatgaagatgctgaaaacaccgctaaagataatccttttatcgaagcatttgagatggccatgaatgatgacttgaatacacctaaggctgtaagtattctttttgatcttgcaaaagaattaaattcaaacaaggaaatgaattctaggagtgaacaattatatgcatttaaaaccattgcaaataacttaggcttgcttactgacaaacctgaaaatttctttaaatttggagctgaagtggatgattttttcattcaagaaaaaatagatgcaaggaatctagcacggaatgaaaaagactttgctagagctgacgaaattagagacgaactatcagatatgggagtattgcttgatgatgggcctgatggaacgacatggaaaatagaaaaacctaattaac

SEQ ID NO: 299596 - DNA, 1362 bp, Unknown
  Bacterial polypeptide expressing nucleotide sequence isolated from the Sargasso Sea
aagcagtcaacttaaatcaagaagacgtaaggatatatttgtgcggccctacagtacaatcatcaccccaccttggacatggtaggtcagcagttgtttttgatttctttataaggtacttaaaacatttaaattattctgttttgtacgttagaaatattactgatattgatgataagataatccaaaagtcacaagaaaaaaatattaattatagagaactcgctgaaagtgtttgggaagagtttgttcaagctcatgaaaatttaaattgtttagttccagatattgaaccaagagcaactgcctatgtaccagaaatcgttcaatatattgatcaattaatcaacaatggatatggctacattacaaagtcaggtgtttattatgatgtttcaaaatttgatgattatcttaaattatctggaagaagcactgaggaagttaaaacaggaacacgaatagagactgtagaagataaaaaaagtcctgaagattttgcattatggaaattctcaaaagagggagaaccttcatgggattcgccatggggagttggacgtcctggatggcatatagagtgctcaactatgattaatcaaacacttggaaagactattgatttccactgtggtggaatagatttaatttttcctcatcatgaaaacgaaattgctcagtctaaaggagttgaaaagaatgaaaattttgtaaattattggcttcataatgggatgttgaatctatctggtaagaaaatgtctaaatctgatggaaatgtaaagttactcaacgaatatattgaccaatatggaggagaggtagtacgctttttctttttaagggctcactacagaagcccacaagaatttagtcaggatttattagaagaatctaaaaaaacactaaataatattcgagaatatacgaaaggtaccgaatcagatccagttgatccaaaagttttagagatttttgaagcttgtatgaatgatgatatgaatacaccaaaacttttaggtgaaattttccaaatgataaaggaatcgaataaccttaatgattttgaaggaaatcaaagaaaacaaacgattaaatatatttttgaaatattgggctttcagcttaagttgacagatcaaagtaataaagatgaaaaattattatctgaatttttttcgatgtatgatattaaatttactgaaattgacaccgcaatgaatgattttatttcaattagaaataaattaaggaatgaaaaaaaatatggagaagcagacgaaatgagagattctattttgaaaataggaatcgttattaatgatggtgaaaatgttggatggtattggaaaaatagttgaa

SEQ ID NO: 299597 - DNA, 1170 bp, Unknown
  Bacterial polypeptide expressing nucleotide sequence isolated from the Sargasso Sea
tacgcgaaggtgaggttggagtgtatgtctgtggaatgacagtctatgataattgtcatttaggtcatgcaagagcaatgatggcttttgacattcttgcccgctatctccgatatcaaaattataaagtaaattttactcgtaatattactgatatagatgacaaaattattgaaagagccaatgaaaataaagagacaatagatgctctcacagatcgaacgattgcgagcatgcaagaagatttttttaagctcggactggagcttcccacaaatgagcctcgcgcaaccgaccatattgaaggcatgattaaaatgattagcacgcttattgataaaggacatgcttatcattctgaaggtggagatgttttttttgccgtgcggacatttcctgagtatggaaaactgtcaaataaaaatatcgatgatttgaatccaggctctagaattgaagaggatggctctaaaaaagatccattggattttgtgctatggaaaagtgccaaagcaaatgaaccatcatgggactctccttggggtcttggaagacctggctggcatattgaatgttcagtaatgtcactagaaaatttaggtgagcattttgacatccacgggggaggtccagatttacttttccctcatcatgaaaatgaaattgctcaatctgaatgtgcctctgatcataaatttgcaaactactggatgcattcaggattgctaaaaattaatggtgaaaagatgtcaaagtctttgggtaattttgcaatgctaaaagatttatttgcttcttatcatcctgaagtcattcgatattacttaatctctagtcactacagaagttctttaaattttgataacgactctcttgatcaagcgcgatcagctttaacaagactttatcaggctttatcgtttgcaccatcagaagagtcagatttgcatgatgacagtgttaaggaatttaaagattcaatgaatgatgatttaaatactcctgaggcactaagtactctctttggattagcaaaatcaattaatagcagtcaggatactcaagatcagagcatgtatgcatcaaccatgagagaattaggcaaagtcttagggctgcttaatgatagctctgaagctttttttcagtatggtgcaaaatttaactgat

SEQ ID NO: 299598 - DNA, 1294 bp, Unknown
  Bacterial polypeptide expressing nucleotide sequence isolated from the Sargasso Sea
tgtttacaattatgcccatatcggcaatgcgcggatggcagtggttaatgatttattaatacgttttttaaaaatattatatccaaaagtaacttatgtttctaatattacagatattgatgataaaataattgcagcctcaaaagaatcggcaatcccaatcatagaattaacacaaaaatttacaaaaatatataatgaagacatggctatgttgggagtaagcttgccagatatacagccaaaggcaactgaatacataactgaaatgattcaaataattaaaagattaattaacaatgattttgcttatgtaaaagatggtcatgttctatttcatgttccagcatttaaaaaatacggatcattatcgggcagaaatcgagatgaacaaattataggtagtagagttgaggtagctccctataaaaaagatccgactgattttgttttgtggaaacctagcgcagtttcattacctggatgggaatcgccttggggctttggaaggcctggttggcatttggagtgctctgctatgtcagaaaaaactttgggacttccttttgatattcacagtggtggagcagatttaatttttcctcatcatgaaaatgagattgctcaatcttgtgctgtacataataagttggatgacttatgtgctttttcaaaatattggtttcacaacggctttgtaaatgtagagggagaaaaaatgtctaaatctattggcaatattaaattggttcatgatttagtaaaagaatataagggcgaagtactaagattaactcttttatctgctcactaccgtcaacctctcaattggacaagagatattattaagcaaaatagtaccatgctagatagattgtatagaactttaaaggatctagaaaagattgatgcctatgcagaaaacaatgaaatagaagaaagaattataactggattatatgatgatctaaatacacccaaagttatagctgagctaaatatgctaactaatagtattaacactgctgatataagaacaaaacaaaaaattaagtttaatcttttagaaataggaaaaatatttggaattctccaggaaaatccagatacttggcttggttatggacaatcaaaaaatattgatcaagatgctatagaagtgttgataaaagaacgtaatgaagctagacgcaacaaaaattttgatatggcagatgaaattagaaaaaaacttaaagaaaaaggagttgaaattgaagacacttctgaaggtactgtttggagaagtatttaa

SEQ ID NO: 299599 - DNA, 887 bp, Unknown
  Bacterial polypeptide expressing nucleotide sequence isolated from the Sargasso Sea
aggtgcaagaataggcgttgacgaagaaaaacaaaatcctgctgactttgttctttggaaacaagccgaagaaggactgacttgggattctccttggggaaggggaagacccggatggcatatagaatgctctgcaatgagtatggatgctttagggaaaacctttgatatacatgggggcggaatagatcttaaatttccgcatcatgaaaatgaaattgctcagtccgtctgtgctacaggggaagattttgcaaaatgttggatgcatacaggccctttaaggatagataaagagaagatgtctaaatctttagataactttataactataaaagaagccataaatacatttccgccagaggttattagattcttcttaatttcaaatcattacagaagtccaattaattactccgaagaaggagtgcttgaagctaagaactctttagaccgtttatacacttccttggttgatttagatttaactggagaaaaacccacagatcaggcaaaagttgtgtctcctttcacagaggctatgcaagatgactttaatgtaccttctgctattgcagcactttttgaaattgcaaaatcaattaatcttgccaaagaaaacggagatataaaacaagcaaatattttaggagccacgttagtaaacttatcagaacctttagggattcttcaacaaaagacagaagaatatttcagaatcggcgccactttaagcgatgaagaaatccaaaatttgatcgatgcaaggaacaaagctagagaggataaaaattttgagctatcagatcaaataagagattccttgttggaaagaggaatagttttagaggatacagataaaggaactacatggaaagttcgataga

SEQ ID NO: 299600 - DNA, 913 bp, Unknown
  Bacterial polypeptide expressing nucleotide sequence isolated from the Sargasso Sea
tagagaatacggaaaactctctggcaagaatttagatgaaatggttgctggttcgcgtgtaggtgtagaaagttataaaaaagaagaatctgactttgtattatggaaaccttcaaaagaagatgagcccagttggaaaagtccatggggagatgggagacctggctggcacattgaatgctctgcaatgagtgaaaaacttttaggggaaaattttgatattcatggaggaggccaagatttaatatttccacatcatgagaatgaaattgctcaaagtgagtgtgcaaataataacaaatttgcaaattattgggttcacaatggctttgttactgttgagggtaataaaatgtcaaagtctgatggtaattttgtaactgtaaatgagttaaaagacagtttccaaggggaagttattaggcttaccatgatatcaactcactacagacaacctctgaattggaccaaggataacctcaatgaaagtaaaaaaacattagataaatggtacacattcttgagcaattttaatggtgatgaattaaaagatgcaaataatgataatgaaattatggaaacattattggatgatatgaatacacctaaagctattagcgtgcttcatcaaaaatttaaagactgccaatcaggggataaagacttagtaagcaattttttatattcagcaaatatgcttggacttttaaatgaaaaaccatctgaatggctttcctggaaaaaggaaaatttaaatattaataccgctcaagttgagttacttattgctcaaagaaatgaggcacgatcaaacaagaactttgatgatgctgataggatccgagatgagttagacaaaatgggagttatccttgaagatcaaggtggcgaaacaacttggaaagttaagtaa

SEQ ID NO: 299601 - DNA, 988 bp, Unknown
  Bacterial polypeptide expressing nucleotide sequence isolated from the Sargasso Sea
gggcatgcgtatgtttcagaaaatcatgtcttatttaacgtcatgtcttattcatcctatgggagattgtcgcacagaaaaattgaagatatggaagccggctcaaggattgaagttgcttcgtataagaaatctccttttgattttgtgctatggaaaccatccacaaaagatcttccaggttgggattcaccttggggaagaggtaggccaggttggcatttagaatgctcagcaatgataaagaaattccttggggaaacaatagatattcatgcaggcggtcaagatctgatctttcctcatcatgaaaatgaaattgctcagagcacttgtgctaatgatggaaaagtctttgccaactattggttgcataatggttttctcagtattggcgatgaaaaaatgtcgaaatcactgggtaatatgcaactggtcagggatttattgcaagattattcaggagaggttattagaatggctttactgagtgcacaatacagacaacccatagaatggtctcaaaatacactaaaatcagcaaaaaaaatgctagatcggatatatggttcaataagagggattgagttttctcaaaaaactgatgatactgcaaatattgctcagtcagtacttgaagcactctgtgatgatttaaacacacccaaagctattgcagaaatctttgagttagtgaagaagctcaataaagaaaaggatttatatcaaaaaaaactcatcacaaaacaaatatatgcttcaggaaggttactgggatttttgcaatcagacccagagacttggttctcagatataacaggcagggatgtaagcgaggacgaaataaagagattgattgagatgagaaatcaagctcgtttgaaaaaagacttcaaagaagctgattcggtaagaaaaaagctcgaggatatggatataataattgaagacacaccctcaggtgtgagatggagttttaaaagttgat

SEQ ID NO: 299602 - DNA, 1054 bp, Unknown
  Bacterial polypeptide expressing nucleotide sequence isolated from the Sargasso Sea
aggtcatattatagaacaaatacaaatgataaaaaaaatcattgaaaatggatttgcatatgaaaaaaatggttcagtatattttgatttaaaacaattcaataaaaaatataaatatggaagtttaagcaatagaaacttagaagaattaattaatgaatcaagagaactaaaaggatctgaggaaaaaaagaatcctcaggattttgctctatggaaaaaagccggaaaaaaacatatcatgaagtggcaatctccatggggagatggtttcccagggtggcatattgaatgttcagcaatggggcataaatatttaggagaaaaatttgacatccatggtggtggtattgatttgaaatttcctcatcatgattgtgaaattgctcaatcagagtcagtttatggtcacaacccagcaaattattggattcataccaatatgctaactctaaatgggaaaaaaatgtctaaatcaataggcaactcagtttttccggatgaaatttttgatggaagtaataaaattttttcaaaaaaatttaatcccatgacgttaaaatttttcatgtaccaagcacactatagaaacactttagatatttctaatgatgcattaattgcagctgaaaaaggatttgaaaaaatcataaaactaaagaatgatataaacggattagttgaaagtgatgaaagtgattttaacgctgatgaatgggttaaccaatgttatgatgccttaaatgatgacttcaactcaccaagattgattgccaaattatttgacctgtataaaattgttcaagatattaagattagaaataaacacattaattcaaaaaatcttaaaattttaaaaaagttttttccaatattttactctgaaattttaggtctagatgataatacatcaagtaatgtaaaatatgatgcaattcttaatttaatcctggaattaagagaaaaagaaaggttaaataaaaattacaaaacctctgactatataagagatcaactgcaagaatttggagtaaacattaatgataaaaaatga

SEQ ID NO: 299603 - DNA, 1229 bp, Unknown
  Bacterial polypeptide expressing nucleotide sequence isolated from the Sargasso Sea
tattgtcagatatttaagaagtattaactacgaagtgcactacataagaaatataactgatgtagatgacaaaattattgcgagagcagaagagctgaatatttctccaaaagaattgacagaaaaatatatacattcaatgaatgaggattttatgtcattgggtatgatcgaacctgattcagaacctagggcaactgacaatattgactctattatttctcttatcgagattctcatagagaaaggacacgcttacgaaggtgattcagatgtttatttctcagccgagtcttttaattcttatgggaaactatcgagaagaaacttagaagatatgttggctggcgccagagttgatattgatacagataagaaaaatcctgctgattttgtcctttggaaaaaaaatactgagggactgaagtgggattcaccttggggtgctggcagaccaggttggcacattgaatgctcagcaatgagcatggatgcattgggtgaaacttttgatattcatggaggagggtctgatcttaagtttcctcatcacgaaaatgagattgctcagtctgaatgtgtaactggtaaagagtttgccaaagtttggatgcatacgggatctttaaggattgataaagagaaaatgtctaaatctcttaagaattttgtaacaataaaagacgctttagagattaattcaccggaggtcttgcgtctctttttgatatctagtcactacaggagccctcttaattattcggaagttggattgaacgaagcaaagaattctttagataggctttataattctttgcaagatcttgagtatgaaacaaaagaatattttcaaacaaaatattcagataaatttcataaagctatgggagatgactttaatacaccctcagctatatcagttttattcgaaattgcacgacaaattaatactctcaagaaaaaaaataaatttgaagaagcatctttattggctaaagaattggttagtctctctaatattttgggactacttcaagacaaagctaaaaattactttagacaaggaattggtatcagtgacgaagaaattgaaggttatattttgaagagaaatcaagcaagaaaagaaaaagattttgaactatcagacaagataagagatgagcttttagagaagggcataattcttgaagataaagaatccggaactacctggaaaaaagcttaat

SEQ ID NO: 299604 - DNA, 1193 bp, Unknown
  Bacterial polypeptide expressing nucleotide sequence isolated from the Sargasso Sea
tgataaaataattaatcgtgcaaaagaacagggcgaatcagcaagtggattatcaactaaatatattcaaacatattttgaagattcagataggttaaacattagaagagcaacaaattacccaaaagcaactgaacatatcgatgatatgataaatctaattcaaaatttagtggataaagaatctgcatatgtgtctaaaaatggagtatatttccgtgtttcaaaattttcagaatatggaaaattatcaaaaaagaaaacagaagatctggaaagtggtgccagaatagaagttgatgaatcaaaagagagtcctttagattttgccctgtggaaattttcagatggacaaccaaattgggaaagtccatggggtaaaggcaggccaggatggcatatcgaatgctctgcaatgagtatcaagtatcttggtaaaaattttgagatacatggaggtggaagagatttgatttttcctcatcatgaaaatgaaattgcacaatcagaatcatttacttcagaacaatttgcaaaaatttggatgcatgcaggaatgattaccataaacggagaaaaaatgtcaaaatcagttggaaatgttaaatcaataaatcatgttttggaatcatggggtccaaatgtagcaagactattctgtatttcaggacattattcaaaaccaattgattatacagaagatctgttaaaagaaaatttgatcagattaagacagattgaaacatgttattatgaattgagattggcagaagaatcacaagaaacagaagatatttcatcactacttgaagaatcaagagaaaaatttgatgcagcactaaatgatgattttaacacatcattaggattatctgtattttttaacatgataaaaacaataaacagtcttgcagcagaggagaaaattactaaaaaaattgcagagcaagcattaccagtattagaatacatgttagaagtattaggaattgagattcaaacagtttcagatgaagaaatagaatctgtttttgagttaattaacaagagagaaaccctaagaggagaaaaacagtttgaagaggcagacaagattagagaccaaattgcaggattgggaatatcattaattgaccataaaaataaaacattatggatgaaaaaagaagcaatcaaatcagaaaaacaataag

SEQ ID NO: 299605 - DNA, 1384 bp, Unknown
  Bacterial polypeptide expressing nucleotide sequence isolated from the Sargasso Sea
ctgtattttaagtatatttctaaaattatgagtaatgatatttttttaacaaacaatctcacgaacaagaaagaaaaatttgttccaatagatgaacaaaatgtaagaatgtatgtttgtggaccaactgtttatgatgatcctcatattggaaatgcaagaccaatagttgtatttgacatactttataaaatttttaaaaaaaattatcctaaagttacttatgttagaaatattacagatgtagatgataaaattatcaaatcttcaaaagaaaataatatttcaatttcagaactaacaaataaagtaaccaaaagttttagtgaggattgcagttatttaaattgcgaaagaccatctcatcaacctaaagcaacagataatattgatttgatgattgaaatggtttctgaattaattaaaaaaggttttgcttatgaaaataataaccatgtttattttgaggtgaaaaagtttaaggattatggtcaactttcaaataaaaaattagaagatttaattgctgggtcaagaattgaagtaagtgaaaataaaaaaaattcagaagattttgttttatggaaaccatcagcaagtgatgaacccttttgggattctccatggggcaaaggaagacctggatggcatttagaatgctcagcgatgtcaaaaaaatttttaggtcatgagtttgatgttcatggaggtggtattgatttaatatttcctcatcatgaaaatgaaatagcacagtcaagatgtgctaatggtacaaaggtatttgctaatttttggttacacaatgcttttataaccatgtccaatgagaagatggcaaaatcccaaggtaatattttaaaaattaaagattttagaaacaagatcagtggtcaagttttaagactcgccttaatgagtgcgcattacaaacaaccattagattggaatgataaacttttagaagattgtcaaaatacaataaacaaatggtacaatgtttatgtagaaagcaaaaacaatacagatatctctaatgaaattcttaaaccactttatgatgatttaaataccccaggctacattgcaaatttgcacgaattatatgagaaggctcaaaaaggagatgacaatgataaagctgcatttgtttctgcttgtcagtttgtaggtttgttaaatcaaaatcaagaagagtggttaagtttcaaaattagtaaagcttctatttcagaagaagaaatctcacagaaaataaatgaaagaaatcaagcaagagagaacaaaaattacgaagaagccgataaaattagaaatgagcttttagacaaaggtgttttaatagaagataaagatggtaaaacgacttggaaattaaaatgag

SEQ ID NO: 299606 - DNA, 481 bp, Unknown
  Bacterial polypeptide expressing nucleotide sequence isolated from the Sargasso Sea
tatgattagaacaagatttgcaccaagtccaacaggatggttacatatcggaggcgcgagaaccgctctttatgcatggctcttcgcaaagagaaattctggtgaattttacatcagaattgatgacacagatactacaagaagcactagagaatattgtgaatctatcattaattcattgagcattttaggcattcaatctgatatggaattattataccaatcatcaagatttgataaatatattgattctatcgagaaattattatcagcaaacatggcttactatgacaaagttgaagttaatgaaaaaacaaaggacactaatcttgaaattcaatatgagaataaattgaatcgagacggacatgttataagatttagaaatccagagaaaaaatcaattatcatcaatgatataattcatggatctattacttttgaaaataaatcatttcatgacgtagttatacttagatca

SEQ ID NO: 299607 - DNA, 221 bp, Unknown
  Bacterial polypeptide expressing nucleotide sequence isolated from the Sargasso Sea
tatgaagtgtaggttcgctcctagccctacaggaaaaatacatatcggtaatgctagatcagcaattttgaattggattttttgtcaaaaaaatcaaggtgagtttgtattaagaattgatgatactgatgccaataggagttctaaagaatttgagacaagtatcaaagatgatcttaaatggcttggattaaattggagttacactttttatcagtcct

SEQ ID NO: 299608 - DNA, 806 bp, Unknown
  Bacterial polypeptide expressing nucleotide sequence isolated from the Sargasso Sea
agatcatattagcaatacacctagacaaatccatattcaaaatgctttaggctaccctgagcttgaatatgctcaccttccattagtacttggccctgataaaaaaagactatccaagagacatgctgcaactagtttagaagaatacagagaagcagggtatctagatacggcaattattaataccttatcaaggctaggttggtctaaaggagatgatgaggttttttatttagatgatcttataaataattttaatcttagcgaagttcaaaaagcaggagcaatttttgatatcacaaaacttgattggctaaattctcaacatctagcaaatttatcacttcaagattttaaatcacatttaaaaccatttcttgaagatatatcaattgatattaataaccacgacaatgttgaattactaatagagtctatgcgaacctctgaaaatactctaaaaggtatcgctgaatcacttagaccgtattatgaggaagtttcagattataacgaaaaagcaattgagaaatttttagaccaagaaggcaaagcaattttgattgaattaaaaggattattatccaatattaatgattggaaagaagattctatagataaagttcttaaagaatatcagcaagaaaataattgccctgtacctaaggtaaatcaaccaataagaattgctttaacaggatcaactaaatcaccatcaatgggcttaacattaagcttttttagtaaagatgaatcactaaaacgaatagacaatcttctctctaagagttgcataaatcagtaag

SEQ ID NO: 299609 - DNA, 524 bp, Unknown
  Bacterial polypeptide expressing nucleotide sequence isolated from the Sargasso Sea
catgaagataataactaggtttgctccaagcccaactggacatttacatgtggggggtgctcgaactgcattatttgcttggcttcaagcaaaggctgctgacggtaaatttcttttgagatttgaagatactgatcaagaaagatctagcagtgagtttataacttctattaatgacagtttggcttggcttggaattgaaccagatgaacctccaatttttcaaagtaaaaatttaaaaaaccataaaaaaattgcatttgaattacttgaatctggaaatgcttattcttgtgattgttctcaagaacgacttgaagaagtcaggaaagcacaaattgcaaaaaaattaaaaccaaaatacgatggtttgaatagagacaaaaacttatctcatgaagagggtaatgtcattagatttaaaatgccccagactggcacgacatcatttcaagacgaaatcttgggcaatatttctgttgaaaataaagaattggatgattttataattttaagatcagatg

SEQ ID NO: 299610 - DNA, 151 bp, Unknown
  Bacterial polypeptide expressing nucleotide sequence isolated from the Sargasso Sea
atgaaaaaagtagcaactagatttgctccatcacctactggacctttgcacattggtggcgtgagaacagctttatttaattggttatactctaaaaaccaaaaaggtaatttttatttaagagttgaagatactgacaaagaaagatcaa

SEQ ID NO: 299611 - DNA, 145 bp, Unknown
  Bacterial polypeptide expressing nucleotide sequence isolated from the Sargasso Sea
atgatagccgtgactcgatttgctcccagtcccaccggacatctacacttgggccacgcctattcggccctgtttgccaaagcccaaggcacccggttcttggtccgaatggaggatattgatgccggcagatgccgaccagaat

SEQ ID NO: 299612 - DNA, 785 bp, Unknown
  Bacterial polypeptide expressing nucleotide sequence isolated from the Sargasso Sea
aaaatagaaaagcttaaaaaagatggtcgtttatacccatgttttgaaactgcagaggaattatctctaaaaaagaaatctttattatcttctggaaaaccacctatctatgatagatcttctttagaacttactaagagtaaaattaatgaaaatataaatttaggtttaaagccacattggagatttaaacttgaggataatataataaattggaaagatttaattaaagatgaggtaagatttgatcctaaatatttgagtgacccaatattaattagagaggatggatctcttctttatcatttaccttctgtaattgatgatattgaagaagagattacacatattattagaggtgaagatcatattactaatacagcttttcatatacaaatatataaagcattgaattctcaatctcctaagtttgcccaccatccatttttaactgatcaaaaaggaaaaggatttggaaaaagaattggcagcttatcaattgagaatttgaaagatgaaggttatgaagaagtttctatattaaactatttaataaatataggatcaagtgaagatattaagcctgaaaaaaaagtagacttcattattcaaaattttgatataaaaaatatttcaaattcatctgctaaattttcagacagtattcttaggtctcttaattccgatattttgaaaacttataattttgaagaaataaattcaaaaataaaaatatcaaataacagagttgatttaaaaaagctttggatattttctcagaacaa

SEQ ID NO: 299613 - DNA, 796 bp, Unknown
  Bacterial polypeptide expressing nucleotide sequence isolated from the Sargasso Sea
ttataccatttaccttccgtgatagatgatattgaagaagacataactcatattattagaggtgaagatcatattgttaatacagcttatcatattcaaatttttgaagctttggaatcaaatgtgccaatatttgcacatcatccctttcttgttgatgatcaaggaaaaggttttagtaaaagaatgggtagtttatcaatatctagttttaaagatcaaggttttgagaatattgtattgctgaattattttctttttattggatcaagtagtaatattgttccaatgaaagatttaaaagaagttataaataaatttgatataaataatgtatctaagtcttcagctaaattttcaaaagaaaccttattgtctcttaatgaaaacaccctaaagttatttagttttgatgaaatcaaaaataaattaataaatcttcaaacaaatttacaaaaggagtctttttggcgttttgtaaaaaataatattacttatatccatgaagtaagtatttgggaaaaggtaattaaaacaataaataattataaagattttaatattgataaaaattttttagatatagcggcaaatgaattacctaatgacccttacgattataatacatgggatatttggactacaaagattaaggataaaactggtattaaaggtaaagatctatttatgcctttaaggcttatattgactggaaaatcacacggtcctgaattaaaatattttattcccctgtttgataaaaagggaattttgcaaaaacttggaaaaatctagt

SEQ ID NO: 299614 - DNA, 103 bp, Unknown
  Bacterial polypeptide expressing nucleotide sequence isolated from the Sargasso Sea
aatgtcaaaagtagcaacaagatttgctccctcacctactggtccactacatatcggaggagtaagaacagcattatttaattggttatattcaaagaataaa

SEQ ID NO: 299615 - DNA, 169 bp, Unknown
  Bacterial polypeptide expressing nucleotide sequence isolated from the Sargasso Sea
tatgaaatgtaggtttgcaccaagccctacaggaaaaattcatataggaaacgccagatcagcaatattaaattgggttttttgtaagcaaaataatggagaattcattttaagaatagatgatactgacctaactagaagtttaaaagaatttgaaagaaaatattaa

SEQ ID NO: 299616 - DNA, 99 bp, Unknown
  Bacterial polypeptide expressing nucleotide sequence isolated from the Sargasso Sea
tatggataattcaagcgtcaaggttcgttttgccctcagtccaacaggtgagcttcatttgggtggtgctcgcactgcactctttaattggttgttcgc

SEQ ID NO: 299617 - DNA, 361 bp, Unknown
  Bacterial polypeptide expressing nucleotide sequence isolated from the Sargasso Sea
catgtcacacagagtacatgaaattttattagtggctagcccctatgatggatttattcttgaagaggatggtgggttgacggaacaaattatgacagaatatattgggatgaattttaattatgctccaagagtaacaagagcatctacagctacagattcaatgtcttatttagctaaagataagtttgaccttgttatcgttatgttaaggattgaagacactgatcccatctcccttgggaaatctatcaaaaaaacattccctcatatgcctgtaattttgttagcattcgatgaaaccgaaataaaacaactctcacaaaaattatcaccaagtttcaatagatcgtgttttcat

SEQ ID NO: 299618 - DNA, 256 bp, Unknown
  Bacterial polypeptide expressing nucleotide sequence isolated from the Sargasso Sea
gatgactggtattaaagttcgatttgcccccagcccaacgggcagacttcatgttggcaacttacggacggctttagtgaactacctgtttgcgcgcaaaatgggtggcgagtttatgcttcggattgatgatactgatacggaacggtcaaccgctgcgtttgagactgatatcagggctgatctagaatggatgagcatggtctgggattgcgaagataggcaatcatcaaggtttgcgcgatatgatgatgcc

SEQ ID NO: 299619 - DNA, 753 bp, Unknown
  Bacterial polypeptide expressing nucleotide sequence isolated from the Sargasso Sea
ccgatgaggtgaaagcctgtctgggcgccggctttggttcactgggccctgttggcgcccccgtcagggttgtggtggatcataccgcggcgcaaatgcccagtttcgtatgtggcgccaatgaggacggctaccacgtcaagggcgccacctggcgccgcgacgtccccgatgccgagtttgccgatattcgtgagattgtgagcggcgacccgagcccctgcggcgagggcgctctggagattcgccggggcattgaggtcggccatatttttcagttgggcaccaagtactccgagtccatgaatgcttccgtgctggatgaacagggccgcagccagcccatggtcatgggctgttacggcattggtattacacgcatcgtcgcggccgccattgagcaaaaccatgacgacaacggcatcatctggccctccgcgatggcgcctttcgacgtagccatcgtcccgctgggcatggacaagtcagaagtggtgcgggaggccaccgagcagctctacgctgcctgtgcggatgcaggcgtcagcgtgttgcttgacgaccggtcggagcggccgggggtcaagttcgcagaaatggagcttttgggcatgccgctgagggtgaccgtgggagaacggtcgctggccgagggtcatcttgagctcacccagcgccgcggcggcgagaccgagatggtctcgcccgccgacatcatcggccgcctacagcggctgcttgccggcggctgat

SEQ ID NO: 299620 - DNA, 778 bp, Unknown
  Bacterial polypeptide expressing nucleotide sequence isolated from the Sargasso Sea
acattcagttctgctgtagatgatgtgatttacaatattactaatgtaattagaggggatgatcacactagcaataccgctgtacaaatgaaaatcataaatgcattggatgaaaataaaatttcatttgcacatcatgcccttttaaaggcatctacaggggacaaactatcaaaaagagacaatgtaatatcaatcgatagtttcagaaaagataatattgagcccatctcaattctcagcttactagcaacgattggaacttcaaattcaattgaactaaagagtgggataaaacaaatcattgaagaatttaaacttgagacaatttcaacatcaccaggacgtatcgaaattgatgtcctaaaggcgcttaataaaaaacaagtccaaaaatttgattatgaggaaattcaatcaagacttactgagattgatgaaaatgttgataaaaagttttgggacaccataaaaggtaatctggaaactgttgaagaaatatcttcttggactgacattgtgtttaacagcaagcctgctgagtctgatgataaagattatataaaattagcattagagttaatgccagaggaaccgtgggatgatgatacttggaccacttggacgaatgccataaaagaaaaaacaggacgtaagggcaaagaattgtttcttccattgcgagtagcattcacaggactgacacatggtccagaaatgaagcttctcatacaactaattggtagagataaaattgttgagaggatacagacttaaa

SEQ ID NO: 299621 - DNA, 631 bp, Unknown
  Bacterial polypeptide expressing nucleotide sequence isolated from the Sargasso Sea
aatgtttaattatctctgcctacttggctggtcaccaggtgatgatattgagctctttgatagtgattttgcaattagtaaatttgatttaaataaagtacttccaaattcagctacttttgatgaaaaaaaactcctctggttaaatggacagtatataagatcatcatctccagataaatttgaagaggaatcactgcaaaatattgagaatcaacttagtagagaattatttcatgaagaaaaagatagattgttaagaatatttccctctgtacaggaaagaattgaaacgatgaacgatctttttggccaagttaagtttctaattgatgagccatttgttatagacaaggaagattgggagtctgtaaattctaaggaggctcaaaaatatttagacgctattagaaataagtttattgcattagatgactttaatttaaatattattgaggatacgatgagagcgactttagaagaattagatataaagactaaagtagggtttcagtctacaagagtagccgtaactggtaccaaaattagtcctccattgtttgagtcaatatttgcacttggtaaagagacatctattgccagattggcagaaagtatcgaaaaattataa

SEQ ID NO: 299622 - DNA, 527 bp, Unknown
  Bacterial polypeptide expressing nucleotide sequence isolated from the Sargasso Sea
aatgattaaagttcgatttgcaccaagcccaacgggatatttacatatcggaaattttagaactgctttagttaacttcttatttgctaagagtaagaatggtcactttatgcttagaattgatgatactgacgatgagagatcatctaaagaatatgaagacgctattaaagaagatttaacttggatgaatataaattgggatagtgtagaaaggcaatcttctagacttttatcttataatgaagctttagaaactttattagaaaaaaaacgtgcatatccttgttttgagacggcggaagaattatccttaaaaagaaaaagccaactatcttccgggaaaccacctatttatgataggtctgcattgaaattatcagactcagatattgctgatttgaagtctaaagggaaaaaaccacattatagatttttactcaatcgtgaagacgtaaattggattgatctcgtaaagggtgagagtaaatataatatgtctaatttgtcagatccagttatattaa

SEQ ID NO: 299623 - DNA, 912 bp, Unknown
  Bacterial polypeptide expressing nucleotide sequence isolated from the Sargasso Sea
atagaatgacaatttacaatttaaaaatagaacaattaaaaaaggacgaacgtttgtatccttgttttgaaacagctgaagagttatcattaaaaaagaaatctcttctttcagctggaaagcccccaatttatgatagatcttcgttattattaacagcagaagatattgatgaaaaaatcaagtctggtcaaaaacctcattggcgatttaaactcaatgacctaataatcgaatggaacgatttaattaagggaaaggttaagtttgatccaaaaaatttaagtgatcctatattaataagagaagatggatcacttctatatcatttaccttctgtgattgatgatattgaagagggaattactcatattattagaggtgaagatcatatttcaaatactgcttttcatattcaaatatttcaagccatagaaggttcaatacctgaatttgctcatcatccttttttaacagatcagcatggaaaaggttttggaaaaagacttggcagtctctcaattgaaaatttaaaagctgaaggctatgaagatgtttcaattattaattatttaataaatatagggtctagtgaggacattaagccagaaactataaaggataaaattttagaaaattttgatattaaaaatatatcaacttcatctgctaaattttccgaagttgttctaaaatcattaaatgcagatattctaaagaattataaatttgagcaagtgagtaaaagaattaattttataagttctgatatagatttagaaaaattatggattttttcccataataatattttttttataaaagatattattttttggtctaaaataattagagaaatatttgatattaatgagttcgatattcctcaggattttttcaaactgcagtgaa

SEQ ID NO: 299624 - DNA, 157 bp, Unknown
  Bacterial polypeptide expressing nucleotide sequence isolated from the Sargasso Sea
atgaaaaaagtagcaactagatttgctccatcaccaacaggaccattgcatataggtggggttagaacagctttgtttaattggctatattctaaaaatcagaaaggtgatttttatctaagagttgaagatactgataaagaaagatcaaaagaag

SEQ ID NO: 299625 - DNA, 418 bp, Unknown
  Bacterial polypeptide expressing nucleotide sequence isolated from the Sargasso Sea
catgatagttactagatttgcaccttccccgacaggaccccttcatttaggccatgtttactcattactttattcatataattactcaaaagttaatagaggtaaatttttattgagaattgaagatatagattttacaagatgcaaaaaaaaatatgttaaagaaattattgatgacataaattggttaaaaattccttttataaaaactaaaaaccaatcacttagaaggaaatattatacccaagcactaaataaattaaagagtatggacttagtttatccttgttggttatctagaaaagaagcgctagatgctctttctgcacctcataataatacattagaaaaaactaacgtacttttaagtgaaaaggcaattatcaaaaggcaaacaataggtataacacctgctgag

SEQ ID NO: 299626 - DNA, 571 bp, Unknown
  Bacterial polypeptide expressing nucleotide sequence isolated from the Sargasso Sea
atccttagatattttaaaaaaaactaatgcactattagagggccattttgttttatcatcaggattacattccacaaaatacatacaatgtgctaaattattaagttatcctcacctagcagaaaaaatttgtaaatcattagcaaataagattaaaaataaatttaaaaaatttgatgtaattttatcacctgcaataggtggtattataattggatatgaaataggtagaattctaaaaaaagaaactattttttgtgaaagagtaaagggtaaatttatcttaagaaggggttttaaaattagaaaaggatctaaagttttaattatggaagatgtaataactactggtaaatcaagtatggaatgtgtgaaattaataaaaaaatcaaaatcaaaagtcataggttttgcatctataattgatagatcttcaagaaaaaccttaaagataaaaaaaacaattatctcacatctcaaaattaatgtgccaacttataaaaaaaacaatctcccaaaaaaattgaaattaatacctataagtacaccaggaagtagatttttaaagtga

SEQ ID NO: 299627 - DNA, 258 bp, Unknown
  Bacterial polypeptide expressing nucleotide sequence isolated from the Sargasso Sea
aatgaaaaaagtagcaacaagatttgctccatcccctactgggcctttgcatattggtggtattagaacagctttatttaattggctttattctaaaaaccaaaaaggcgatttttatttaagggtagaagatactgataaggaaagatcaaaaaatgaatacaaaaaacaaataatacaatctcttaaatggattggcatcaattatgatggagaagaatatatccaatctaaaaaaattaatgatcacataaaagt

SEQ ID NO: 299628 - DNA, 265 bp, Unknown
  Bacterial polypeptide expressing nucleotide sequence isolated from the Sargasso Sea
aatggttaagactcgttttgccccaagcccaagcggataccttcatattggaggtgtcaggactgcactctatgcatggttatttgcaagaaatcagggtggtaaattcttgctaaggattgaggacacggatatagaaagatcctctgaagagtcgaaattatcaattcttgagggaatgaaatggctcggtttagaacatgatgaggaaatcattcatcaatctgaaagatttgaggtttataaagatagagccgatgaattg

SEQ ID NO: 299629 - DNA, 712 bp, Unknown
  Bacterial polypeptide expressing nucleotide sequence isolated from the Sargasso Sea
atgataaagtctatagttggttttattttaagaatattgccaagaccttttcttcagctgattagcaaacctatttttaaacttatttcaatattttacagaggaaaaaatgtagaatgtccaatctgtaattcaagattttctaaattttttccttatggaagagattcgagagataacgctctctgtacaaattgtttatcactagaaagacatagacttttatatatttatttgtttgagaagagtgatttattaaaaaaggtaataaatgtattacatattgctcctgaagaatgttttattaaaattttcaaaaaccataataagataatctataccactgcagatttagaatcacctctagctgaaataaagatggatatacatgatatgccatttgaagataatatgtatgattttattttatgcaatcacgttttagaacatgttcaggatgatataaaggctttaagcgaaataaaaagagtacttaaaaaaggaggaaaaggcatagttcaagttcctttttataaaccaataccaaaatatactatagaggataagaatattaagtcaaaaaaagatagagaaaaatattatggtcaatctgatcatgtaagaaaatatggggaagattataaacaaagattagaatcaactggactaaaagttgaaatcataaatccttctgattttttgagtaaaagtg

SEQ ID NO: 299630 - DNA, 646 bp, Unknown
  Bacterial polypeptide expressing nucleotide sequence isolated from the Sargasso Sea
tatggaagttgtcactcgttttgctcctagtccaacaggtaatcttcacctcgggcacgcgtattccgctttaattgcagaacgagaagctcgtttaaataacggtaagtttttgttacgcatagaggatattgacgtagaaagatgtaactccgcttttgaaaaatccattttagaagatttatcatggttaaagctcaaatggcctgaaccagttcgaaaacagtcaaaccatatggctgattatacgaagggattagaaaaactccacaatctcggccttctttatcgctgtaccttaacacgcaaagagctagcagaagcaatgtccgctccccacgaaaacgatgctgcgaaaataaatcagagttctcctaggaacacgttgcgttacatctcaacgagagaaaatgaacgacggttggaaaaaggcgcgccttacgcaattcggctacgtatggaagctgccgcaagtttggctggtaaattaaaatggtttgacaccaagcatggtgagcaatcggcagaaccagaaacatttggagatatcgtattagccagaaaagacatagcgacaagttatcatttgtcggtgacaatagatgatgcagtgcaaggtgtaacacgggtcacacgaggagatgat

SEQ ID NO: 299631 - DNA, 133 bp, Unknown
  Bacterial polypeptide expressing nucleotide sequence isolated from the Sargasso Sea
aatgaaaaaagtagcaactagatttgctccatcacctacaggccccttgcatataggtggagttagaacagctttgtttaattggttatattctaaaaaccataaaggtgatttttatctaagagttgaagat

SEQ ID NO: 299632 - DNA, 637 bp, Unknown
  Bacterial polypeptide expressing nucleotide sequence isolated from the Sargasso Sea
aatgctaagatttgctccgagcccaaccggctatctacatattggcaatgctagagttgcgaccctaaattatatttattctcaaaatactaataaagacttttttttgagaattgatgacactgataaagagagatcgtctgaaaaatacactgaagctattattgaagatttgtcttggctgggaattaaattttctaaaattgtaaaacaatcagaaagagaaaaatcatacagagaaatctttgagttattgaagaaaaaagaacttatatatccttgttttgaatctccagaagaactttcattaaaaagaaaaattcttttaaaacaaggaaagcccccaatttatgatagagaatctttaaagctcaaaaaagatcaggtaaaatcttttatttcttctggaaaacttcctcactggagacttaaattagataatgatccaatttcttggaatgatgaaatttttggaaacgtaaaattcgataatttatcaatttctgacccggttctttttagatcagatgaattaccactttttacaataacatcagttgttgatgatattgaatttaatgttactaacatattgagaggagaggatcacttgacgaatacagcggcacagataaag

SEQ ID NO: 299633 - DNA, 132 bp, Unknown
  Bacterial polypeptide expressing nucleotide sequence isolated from the Sargasso Sea
tttggaaaaacgattaagactagccccgagtccaacgggtttatttcatattgggacagcgcgaacagcattattcaactggttgtatgcaaaaaagataggcggaaagttcctcatcaggatagaagatac

SEQ ID NO: 299634 - DNA, 256 bp, Unknown
  Bacterial polypeptide expressing nucleotide sequence isolated from the Sargasso Sea
cctgttttatttcgagaaagatggtgttccactttatacattcagttcagctgtagatgatgttgattacaacattactaatgtaatcagaggggatgatcacactagcaataccgctgtacaaattgaaatcataaatgcattggatgaaaataaaatttcatttgcacatcatgcccttttaaaggcatctacaggagacaaactatcaaaaagagacaatgtaatatcaatcgatagtttcagaaaagataat

SEQ ID NO: 299635 - DNA, 910 bp, Unknown
  Bacterial polypeptide expressing nucleotide sequence isolated from the Sargasso Sea
aaaaaagctcattggagatttttattagataaaaaaaagatttgttggaatgataagattataggcaatgtgtctattgatcttgaatcgctttccgatcccgtgttcgttaaagaagatggtcaatttctatatacattagcatctgtatgtgatgatgtagatttttgcattacccatgtcataagaggatcagaccatcttactaatacagcgacacaaattcagttaatacaagatttaggatttgatgttccaatttatggtcatcattcattattaattgattcatccggtgataatttatcaaaaaggcttggatcattatctattcgtgaaatcagaaattctggtattgaaccaatagcattgatcaatttaatgtctgcattaggatcttcaaaatcacctaaattactacactctcttgatgaaatctttgaattttttgatatttccttatttggatctgcacccaccaaatttgatttaaaacttttaaattcaatgtcagcaaaatttttaagagctactccatattatcttattaagaatgaacttactaatattggagtacctaataatgctcaaaaaaatttttgggaggctatcaaggaaaatttaaattcacgtgatgaaatatcaaaattatgggatttatgtactaatggtatttcccctattatagataagcaagatttagagtttgtaagaacagcactagaaacattgcctgaagctccatataataaagatagctggaaaatatggactagtgaggtttctgacaaaactggtagaaaaggaaaaagtctttttttacccttgagaaaagctttaacaggtaacagtgaagggccggatatggggaagttattgccttttttaagtaagattcccaaaatatagt

SEQ ID NO: 299636 - DNA, 697 bp, Unknown
  Bacterial polypeptide expressing nucleotide sequence isolated from the Sargasso Sea
gaagatggaacaaaattatcaaaaagacatggagccgttaatattttagatttgaaagataaaggatatttaaaggaagctataattaataatcttatacttttaggctggtcaaataataacgagaagtcagaagctattgaattagatgaaataattaaaaattttgaaatatctaatttatctaaatcatctagtatatttagttttaataaattagattttttcaataatttttatttaagaaaagaaaacgggattaaacaattcatgaatttttgtgagagtgatgtagaattaaataaattactacaaaaagataatacaaaaatgaaaaatatttttaatgttcataaaaaagatataaaaaaactaagtgatttgaatgatttaattaaagtttattttgatgaaaattataaaattaataagaaagaaaaattgacctcagaatttgatagtttttttaaagaatttttaaatttaattgcagaaatagttgattggaatagagataatattcaaaatgtcattaatgattttttaaaaaataataaaattaaattccccgttttaggtaaaccagttagatttttattaataaattcctatcaagggccttcaatttctgatattttagtaatattaggtaaaaaagatactattgatagattaaatcaatatagagataattaaa

SEQ ID NO: 299637 - DNA, 778 bp, Unknown
  Bacterial polypeptide expressing nucleotide sequence isolated from the Sargasso Sea
atatattcttctcttggtttttctatacctaactttgctcatttgcctatgatattaggttctgataaaaagcgtttaagtaaacgtcatggcgctgctggaattgaggactttaaaaaagagggttattcaatagatgcattgttgaattatattgcaatgttgggttggaatcctggaactgaagaagagttatttacattagaaaacttaatttcaaaatttgatttaaataaaattcaaaaaaaaggtgcagtttatgatgagaaaaaactgcattgggtggctggtcaacatatgatgcttaaatctgagaaaagcttattgaatgaaatacgaacagatgatccatcctggcaaaaacattctaaagaaacatatatttttagcgttttaaaattgatgaaaataagagttcatacattaaatgaattaaaagattcatgtacttattttttttctgatcctacagacttcgatagagatgctgctattaaacgatggaaagataaatctgttaataaattgattgtaagttatataagacgtttagaaaaacttactaattggtcactagatgaattagatttatctttacgggatacggctcaagaaatggctgtttctgcagctaaactaattcatccagttcgtttagctgtttcagggcaatcatatggccctggtctatttgaattgattcagttattaggtaagatgacaactattcgtagattaaaaaaagcattagatatatttccattaagagatgactaaa

SEQ ID NO: 299638 - DNA, 931 bp, Unknown
  Bacterial polypeptide expressing nucleotide sequence isolated from the Sargasso Sea
gcgattcgtgctgaagtagagatggtttttccgtctcttcctccgaccacagacattcgcatcacgtcggatcagtcagaggagatcgaggctatggtttccagcctcgaaaacaacatcatatcaggcctaatcctcatcgtgggagtgctgttcttcttccttggtgccggaacctcagcattcgtggcgatttcaatacccgcatcgatgtccctctcgtttatggtgctgaaggccatgggcgtctcgatgaatatgatcgtcctcttcagcctgatcctagcattggggatgctggtggataacgcgatagtggtcgtcgagaacatatataggtacatcgaagagggttgggatcgcctcaccgctgcaaaaaaggctaccggggaggtggcgctgccgatcatcgcagccacggcaacgacgctggcagcattcgcaccacttcttttctggccgggagaggtgggtgaatttatgggttatcttccacgtactttgatcatcactctgactagttcactcttcgtcgctttggtgatcattccgaccctgtgcggaatgtttatgcggctagatggaaggccgaggtcaccactaacacctacggctcgcaggacgctgctcggaggtgtcgcactcatactgctcggaacagcgagggcgaacccgctgacagcagccatgcttacagccacggtctttgcagtctggttcctgcatcgttttgtgttacgtgctgccgggcgctcttttcaagagtcgcttctgccgaggacgatggaccggtatgagcgtggcttgcgttggtcactaaataacagggctagactcatcggatcgacggtcgctctgttcatcgcgacattcgtgacgtatctagcgactccactggggtcaggtctagagtatttcccggaggatatgc

SEQ ID NO: 299639 - DNA, 442 bp, Unknown
  Bacterial polypeptide expressing nucleotide sequence isolated from the Sargasso Sea
ctggaagatcgggatgcggttcgtaagtatgcattacagaacgctatagagtacagcggcaaagggcagtctggaagcgttctaggtagagttcttgcagagagggaacaactgagaactcgtgtaaagagcctactatcgttagtagagaaagaggtcacaagagctaattctatagctcgtgaagatggaatcgaaggggttcgtaaagagttggagagtttagctccagaggctctagatagggagaggcataagaaaaatgagggtttgagggatcttccaggaaatacatcagaagtaatcctgagattcgcccctaatcccaatggccctttatccataggacattcaagaggagtggctatcaattccctgtacgcagataaataccaaggcaaaatagtactcaggtttgatgacaccgatactaaggtaaaac

SEQ ID NO: 299640 - DNA, 598 bp, Unknown
  Bacterial polypeptide expressing nucleotide sequence isolated from the Sargasso Sea
tatgaaaacagatccatttgaaataaaaattaataatagctttaataatctcatgtcaaatagagtacatgaaattttattggtagctagcccctatgatgcatttattcttgaagaggatggtggtttaacggaacaaattatgacagaatacataggaatgaattttaattatgctcccagagttacaagagcatctactgcctcagattcaatgtcatatttagctaaagataagtttgacctagttattgttatgctaagaattgaggacactgatcccatatctctgggaaaatctatcaaaaaaacatacccttacatgcctgtcattttattagcatttgatgaaaccgaaataaaacaactatcacaaaaattatcaccaagctcaatagatcgcgttttcatttggtcaggagatgcatcagtctttccagcaataattaaatatgttgaagatagaaaaaatgcagaacaagacattgttaagggtgatgtacgagcaattatattgattgaggattctccaagaatgtattctttaatattaccaaagatttacagagaaatcatttatctaactaaaaacttaaaa

SEQ ID NO: 299641 - DNA, 190 bp, Unknown
  Bacterial polypeptide expressing nucleotide sequence isolated from the Sargasso Sea
tgttttaccaacagagcctttcgatgagttcacttggtcgaaatggaccgaagaggtgaaacaactcactggacgtaaaggcaagcagcttttcatgccacttcggcttgctcttactggaaaagagcgggggccagatatggcgaaggttttaccactcttacaaaatattaaagcaaaacaaatttaa

SEQ ID NO: 299642 - DNA, 772 bp, Unknown
  Bacterial polypeptide expressing nucleotide sequence isolated from the Sargasso Sea
atgcacattgaaagatttgcaccctcaccaacaggaaaactgcacctcggtcatgcattctctgcaattttagtggctctatcagctagaaaaaataaaggtcattttatattacgaattgaagatcttgattttaatcggtgcctaagaagatatgaagaatcaatcctctacgatttagaatggctaggcataagatggaaaaaacatcccatacggcaatctgaaagatttcatctatataatgacgccattaataagctttgggaaatgggtgttttatataagtgcgaatgtactagagagcaaatcgtaaaagcacaaaagaaattgtcagaatttgtttatccaggcatatgtaagaaaaaaaaaatattacatgataattattcccttagattagatataactaaagccttggaaatggttaatgattcaagcttgtctttttttggtaaaaaagaaatagatcaaaaatttgaattaaattcgattcaaccggaggcaatgataaaaaaatatggtgatgtagtaatatctagaagagatattagaacaagctatcacattgctgtagtcgtagatgatcattttcaaaaaattacccaaatcactcgaggttttgatttatatgaatccacattttgtcatgttcttctacagaaattactgaaatttcataccccaaattattttcatcacaaaattttatatgataaagatggtaaaaagttagcgaagcggacacaatctacgacactgaacatctgag

SEQ ID NO: 299643 - DNA, 478 bp, Unknown
  Bacterial polypeptide expressing nucleotide sequence isolated from the Sargasso Sea
tgctgcaggtttgggttgggaagtacagtgtaacggaatggaaattagtcagtttacttattttcagcaggttggagggattgaatgcaaacctgttagtttagaaattacgtatggattagaaagacttgcaacgtatgttcaaaatatcgataatatttatgatataaaatgggataaaaatggtactacttacggagatatttttcttcgtaatgaaaaagagcaatcagattataattttaatcatgcttcctccgattatttatttagtacatttaatgattatgaaaaaactaccaaaagtttaattgataagaaattagtaataccagcatatgaacagtgtataaaggcaagtcactgctttaatcttttggattctagaggccttatatctgcaaaagaaaggcaagcatttatcttaagaattagaacactagtatataactgttgtagtttattaaatgatgaatga

SEQ ID NO: 299644 - DNA, 553 bp, Unknown
  Bacterial polypeptide expressing nucleotide sequence isolated from the Sargasso Sea
tttggaaaaaattgaacctttttttacaaatgagttaaaacagaaaatttttaggaaaaatggatggcgaacaagatttgcgcctagtccgactggttttttacatattggacatgcctttgcagccttaataggatggcaaatagccaatcaaaaccctgaaaaatttttattgcgaattgacgatttagatttcactcgttgttcgggggaatatgttaatcagctcatatcagatttaaagtggctagatataaattggacagcaaatgagctgtatcaaactcagcgtctttcacactattcgcgggcattaaaatatttagttgataaagacctcatttatccttgttacttatctcgttcggaattaactgagttcttatctccacctattgagggaatatctaaacagccaaacactcgccattctttaagcagtcaagtaattgcaaaaagacaacaaaaaggcattaagcccgtgctaaggttagatatgaaaaaggctatacagaaggtgggaactataagttggtgtagtattgatggaact

SEQ ID NO: 299645 - DNA, 889 bp, Unknown
  Bacterial polypeptide expressing nucleotide sequence isolated from the Sargasso Sea
cggctggtccaagctggtcgtgcctacgcttgttacgaaacgccagatgaattatcacttaaacgcaagtcccaactgtcggctggacggccgcctgtttatgaccgtgctggattgaaattaaccaatgaagacaaagcaaaattagaagctgaagggcggcagcctcattggcgtttcttattgaacgatgaagaggttagttggcatgatattgtgcgaggcgatgttgcctataatatgacttctctgtcagatcctgtgttgatgcgcgaagacgggcgggtgatttatacgctggcatcggtggttgatgatattgaccacggcatcacccacatcatccgcggcgaagaccatgtcaccaattcagccgcgcaaatacagctttttgaagctcttggtagcgccgctccaattatggggcatgtggcgttgcttgccggtgccgatggtggaggcttatcaaaacggcttgggagcttgtcgattggcgcgttgcggcaagacgggatagagccggtagccattgccagtttgctggcacgtataggcaccgccgatccggtgatcccacaacgtcacatgacgactgttatcgaaggttttgatcttggtaaatttggtcgtgcgacagcaaaatttgacccatctgaacttgccagactcaacagtcaaattattcaggaacttgaatttgtagatgttgagtcgcgacttgctgatatcggcgtgactagcggtgctgaattttggctggcggtgcggggcaatcttggaacagtagatgaggcacgggtttggtgggatatttgcacgcaaccgattacaccggtcatcgaggcaccggcggtcacaaatgcggcggtggcattgctaccaactagtg

SEQ ID NO: 299646 - DNA, 130 bp, Unknown
  Bacterial polypeptide expressing nucleotide sequence isolated from the Sargasso Sea
catgacatttatttgtaggtttgccccttctccaacaggacctcttcatattggtggtgttagaacagctttgtttaattggttgatggcaaaaaaaaacaaaggaaagttttatctaagaatagaagat

SEQ ID NO: 299647 - DNA, 244 bp, Unknown
  Bacterial polypeptide expressing nucleotide sequence isolated from the Sargasso Sea
cgatgacgttctccgggcggccgaggcggccctcgctggactcgatgagtggaccacggaggtgatcgagcgtgccttgcgggcagcgctgatcgaggaacgtggattgaagccgaaggtggcgttcgggccggtccgtctggcgatcacagggcgtcgggtgtctccaccactattcgaatcgatggaattgctgggcgccgatcgctcgctctcccggattcggtcgctccacgcgtcatga

SEQ ID NO: 299648 - DNA, 225 bp, Unknown
  Bacterial polypeptide expressing nucleotide sequence isolated from the Sargasso Sea
tatgataaagacaagatttgcaccaagccctactggatggcttcatattggaggtgttagaacagctctattttcttggctatttgctaaaagtcagggtggtgaatttattattagaattgatgatactgatacaagtcgtagtacccaggaattttgcgactcaataataagcgccctaaacactctcggactaaaatcagataaggatcttatatttcaatc

SEQ ID NO: 299649 - DNA, 250 bp, Unknown
  Bacterial polypeptide expressing nucleotide sequence isolated from the Sargasso Sea
cctggagattgcaaaaaaaaaattatcaaaaagagacttagataaaaataaacagtcaaaatcctcaattggacaagcatttaaaatgagtacagaattagtatcagctgtggcagttgggacaattattgggtttattttagataagacctttggtactaaaccttggttaatattaattttttttttcgtaggtgttgctgcaggaattataaatgtagttaaatcagcgaaaaaaatgcaaaagtaa

SEQ ID NO: 299650 - DNA, 157 bp, Unknown
  Bacterial polypeptide expressing nucleotide sequence isolated from the Sargasso Sea
gtggacatctaaaataagtgaaaaaactaagagaactggtaaaaatttatatatgcctttaagacttgctttaactggccttgaaaaaggacctgaacttagatatttgatgccactacttaataaagatttgataaaaaagaagttagggttttaa

SEQ ID NO: 299651 - DNA, 88 bp, Unknown
  Bacterial polypeptide expressing nucleotide sequence isolated from the Sargasso Sea
atgaaaaaagttgcaactcgttttgcaccttcgcctacaggtcctttgcatataggtggtgttagaacggctctatttaattggttat

SEQ ID NO: 299652 - DNA, 628 bp, Unknown
  Bacterial polypeptide expressing nucleotide sequence isolated from the Sargasso Sea
gccgcccagggccatgcccgcgagaggcatgccgcgctgccttaccccggcacctgccgccatgggctgcacggccgcacggggcgctcctggcgattcaatgtgaccgatttcaagccaaaacagcctattgcgctagtgggtcatgcccacagcgctacatattcaatagcagatggcgtgctgcagtggtacgaccgccgcctggggcgccagcagcaacaggtggcgaccgcagtaggcgactttgtgctgcgccgcgcagacgggctgtgggcttaccagctggccgtggtggtggacgatgccgaccagggcatcaccgacgtggtccggggggaagacctgtctgacaacacgccccgccagatcctgctgcagcaggcgctagggctgcccacgccgcgctatctgcacaccccactggtgtgcggggaaaacggcgaaaagctctccaaacaaaacggcgcgcgcgcgctggacctggacaacccgttactggccttgtcgcacgccgcgctggccctgggcttgcccgctgtggcaaatctgcacaacatttgcatagccgacgcactggcacagtgggtcgcggcgtggcgacgaaactacaatggcccaccgtgac

SEQ ID NO: 299653 - DNA, 876 bp, Unknown
  Bacterial polypeptide expressing nucleotide sequence isolated from the Sargasso Sea
aaatttttcgtgtacctcaaaaattcagaaatttatcttctgaaaaagagaaagcattaattgaagagggaaaatcttttactgtaagacttaaagttccaaaaggagaaactgaatttaatgatttagtctacggttctataaaggttcaaaataaggatctagatgattttattattgcgcgttctgatggatcgccaacttacaactttgttgtagcggttgatgatgcagatatgaaaatttctcatgtagttagaggtgatgatcacttagcaaatactcctaagcaaatactagtttatagggcattagggttagatgttccaatttttgcacacttgccaatgattttaggttctgataaaaaaagattaagcaaaaggcatgcagcaactaatgtgcaagagtataaagaaaaaggatttacttccaaggtgattttaaactatttatctcttttaggatggaatccagattctgataaagaaattttcgatgaaaatgaactaattaatagctttcaattcaaccaagtgcaaaaaaaatcagctgtttttgatgaaaaaaaattattatggatttctcaacaacatttatcacaaatgagcgtgagagatttaatgaatgaaatttatgctttaaacccaagttggggagatggtttagaatgggattatttaaaggaagtcgtaaaattaattaaagacagatctaaaacaattgcggaaataacatctatgtctgaaatattttttacagacaaactagaatacgattctgatttattgatcaaaatctacaatgataagtctattgcaataattaaagattttaaatccgctttaacttcaattcaagattgtcgagggtaga

SEQ ID NO: 299654 - DNA, 103 bp, Unknown
  Bacterial polypeptide expressing nucleotide sequence isolated from the Sargasso Sea
gatgtctgctgttcgaacccgatttgcccccagccctaccggttatctccatattggcggggtccgaacggctctgttctgctggctgtatgcccgaccatca

SEQ ID NO: 299655 - DNA, 199 bp, Unknown
  Bacterial polypeptide expressing nucleotide sequence isolated from the Sargasso Sea
attaataggtgtaaagaattgctacctccgctgcctcgcgataaaacgagttggcgaatttggacggaccatattaaaattgaaactaatagatctggtaagagtttgtttttacctctcaggctggccttgactggtaaaccggatggtccagatatgaacaaattatttccgttattgcaaaaaataaaaatataaa

SEQ ID NO: 299656 - DNA, 628 bp, Unknown
  Bacterial polypeptide expressing nucleotide sequence isolated from the Sargasso Sea
aatgattaaaacgagatttgcaccaagtccaaccggatggttacatattggaggagttagaacagctctttatgcatggttatttgcaaagagaaatgctggtgaattttatattagaattgacgacacggatacttcaagaagctctaaagaatattgcgaatctatcattaactcattaaacaccttaggcatccaatctgatgcagaattgttatatcaatcctcaagatttgatgtttatatcgatgttatagaaaaattgttatccgatgatatggcatactatgacaaggttgaaattaatgaaaaaacaaaggataccaatcttgagattcaatatgagaataaattaaatcgtgatggatatgttataagatttagaaacccaaataaaagcaccattgtaatcaatgatattatccatgggtcaatcacttttgaaaataaatcatttcatgatgtcgtgattcttagatcaaatggagttcctacttataatttgacgtccgtagtcgatgacatttatatgaagataagtcatattatccgaggtgatgatcatcttagcaatacacctgttcaagcaaatttatttgaagctttagaagcagatattccctctttt

SEQ ID NO: 299657 - DNA, 238 bp, Unknown
  Bacterial polypeptide expressing nucleotide sequence isolated from the Sargasso Sea
gatgaaaaaagtagcaactagatttgctccatcccctactggacctttgcatattggtggcgtgagaacagctttatttaattggttatactctaaaaaccaaaaaggtaatttttatttaagagttgaagatactgacaaagaaagatcaaaagatgaatataaagatcaaatagttaaatctctgaagtggattggtattaattatgatggagaagaatatatacaatccaaataa

SEQ ID NO: 299658 - DNA, 448 bp, Unknown
  Bacterial polypeptide expressing nucleotide sequence isolated from the Sargasso Sea
aatgaattctttatccaggtttgcccctagtccaactggtttaattcatattggaaacgctagatcagcagttttaaattgggcttatataaataataaaaaaggaaattttatcttaagaattgatgataccgacatagaaagaagcaagaaagaatatgaagaaaaaataaaaagagatttaagttggcttggaattagttggaataaatcatttaatcaatctgatagaaaaaaaatatatgatcaaagtatagaaaaattaaaaaaggataatagactttacccatgctttgaaagccaagaagaactatcacttaaaaaaaaatcacaacttacttctggtaaaccacctatttatgatagaagctctcttaatctaactgaaattgaaattaaaaatcttttgcaatcaggtaaaaagccacattgggagattcaaacttga

SEQ ID NO: 299659 - DNA, 109 bp, Unknown
  Bacterial polypeptide expressing nucleotide sequence isolated from the Sargasso Sea
taaatatttcttaagaattgaagatacagataaagaaagatcaaaagacgaatttaaaaaacaaattatttcatcattgtcttggttgggaattgagcatgatggatga

SEQ ID NO: 299660 - DNA, 770 bp, Unknown
  Bacterial polypeptide expressing nucleotide sequence isolated from the Sargasso Sea
gatgaactaccgaggcagaattgccccaacccccactggttacctgcatttaggccacgcaagaactttctggatcgcccacgagcgctgcaaggcggcaaatggcaccttattgtaccgaaatgaggatttagatgtcgatcgctgcaaagaggagtatcaaaaagctgccatcgaagattgtcgctggctcggcattgaatgggagggtgatactattaaccaatcagcccggatagattattaccaaaaagccttcaagaaattgcaccttgcaggtcatctttacccgtgcatttgttctagaaaagatatccaagaagcatcggcagctcctcatggtgaagatggagaaactatatatcccggcacttgccgaaatagcgacacatccacgataaaccaacatgcaaactggcgctttcgcatccccgagggaagaaaaattgagtttgaggatggttttttagggtctcaaagttttacctgtggggttgattttggagattttccaatatggcaaaaaaacggtatgccttcctaccaactcgcagtagtcgtggatgatgcagatatgaagataaccgaggttgtccgaggtgctgacctattggtttcaacagctcggcaattactactgtatgaagctctcggcctaacaccaccttcttattaccactgcgaattaatgtgcgatgggaacgggaaacgtcttgctaaacgccatgactcactaagcctgcaaacgttgcgcagaaaaggaaaaacac

SEQ ID NO: 299661 - DNA, 956 bp, Unknown
  Bacterial polypeptide expressing nucleotide sequence isolated from the Sargasso Sea
gaaagaaactcaatatatgaaagtttctatgacaagttgcttgagcaggatttaatttatccatgctttactagcgatgaagaattgaaaattataagaagaaatcagatggccgctggtgaacctccaagatacacaggtatttgggccaacgcttctcaggaagatatagaaaaagaattagagaaaggtacacaacctgtatatagatttagactacctaaagacagaacaatagcttttcaagatttagttaaaggagagcagtcttttcataccagtgatttagatgatttcatagtaagaaaaaaagatttaagcccaactttcatgtttgctaatgctatagatgattctttgatgggggtaaacgtggttttaagaggagatgatcatctaagtaacacgcctagacaaatcgccttgctagaagctttaaatctacagattccagaatttattcatgtagctttatttactggagatgacggtgctcccttatctaaaagaaatggaagcctttctgtaaaagagctaaaagaaataggatactttcctcaggctgttattaactatctttctagagtggggcacgttattccggataatgagttaagagatttagaaggactatctacagtattcgatgtagataatatttcgacttctccgagtaggattgaccatgatcaattaacgttttggcaaaaaaatgtcattgaatctaaatctattgaagagctaagttcttggttagaatctcacctaaagaatctacctaaagatatagatcaagaaagttttgtagagcttattaaagataatattatctttccaaatgatgcagttgagtatttagataatctttttgtaaattccttaagctcaattaaagaggtagaagatctaatcaagcaatctggttctgacttctttaaactggctgaaaaaattgt

SEQ ID NO: 299662 - DNA, 583 bp, Unknown
  Bacterial polypeptide expressing nucleotide sequence isolated from the Sargasso Sea
atgtttgttactagattcgcaccttcaccaactggtctcttgcatttgggtcatgcctattcagcattattatcttatgaaatggcagttaaaagaaaaggcttatttaaattaaggatagaaaatattgactttacaaggtgtaaaaaagtttatgaagatagaatttatgaggatctatattggttaggaataaattgggaagaagatgtaataatacagtccgatcgaattcaactatatgaaagttatttgaaatttctaaatgataaaggttttatttatggatgtagatgttctagatctgatataaagaatgctttatctgcattaagcttacctgaaaatactttaaatacgtttatttatcctggaacatgtaaagaaaaaaaattaaatatttggggaaataatgtgagaattgatattgataaaattaaaaattactttggaaacatagttctttcatttaaagaaatcggttttggaccaaatggtgaaactggattacaaagttttaacataaattggttaaaaaaaaaatttggtgattttgttatagctagaaaagatataagaacat

SEQ ID NO: 299663 - DNA, 883 bp, Unknown
  Bacterial polypeptide expressing nucleotide sequence isolated from the Sargasso Sea
ctgaaaaattgcagcctatacctagagttaaaacaaaaagtggacttaataaagaaacttagtaaaagagatgacgtagggtcgctaattaatgcttgtgatgctgggagagaaggtgagctaatttatcatcaggttattagctaccttaaaataaaaaaaccatcaaagagattatggcttcaatcaatgacgaaagacggtatatctaaagcatttacttccatcaaaccagatagcgcttttaaaggtcttaaagattctgcacttgctagaacacatgctgattgggtaatagggatgaatggaacaagagctataactggttggtcaagcaaagcatataacgttggattcaataagcaagttgtaggaagagtcaagactcctaccttggcattggtagttaaaagagatattgaaattgaagattttatttcccaggaatattttcaaataattgctaagttcaaaacagatagtggagaatatgaagcaacttattttgatccagaatttaataataaaaattttgatgacgaagataaaagaataaaaaaaagtgatagaatatttgatttagagattgcaaaatctatagtttcattgtgcaaaaataagcgaggaaacattaccgaaaacaagaaggaaagaaaagagtattctgaggccctttttgatttaacgagcctgcaaagagaagcgaacagcagatttgggtttagagcccaacaaacacttcagattacccaaggactttatcaacctagaagcggcgaaggatacattacttaccctcgaacggactccaggaggctccctgatgattatcctaatcaagtacttgagatactaaacaaatttaaggcgtctaaatattcgc

SEQ ID NO: 299664 - DNA, 388 bp, Unknown
  Bacterial polypeptide expressing nucleotide sequence isolated from the Sargasso Sea
aaggaaagaatatattttctcaattaaagaggatttaatttggctaggcataaattttgaaaattattatcttcagtcaaaaagaattaaaatgtattacgagatctctgaaaaacttaaaaaatcaggaaaattatatgcttgttatgaaacttcggaggaattagaactaaaaagaaaaattctcttaaaatctggaaaacctccaatttatgataggggtgctttaaacctaacaaaaaaacaaatcaaggaatatgagagtgaagggagaaaacctcattggcgattacttttagatgaaaatattatagaatggaatgatttgattcataaaagtatgaagtttgagaatctatctatttccgatccagtgttaattcgttca

SEQ ID NO: 299665 - DNA, 120 bp, Unknown
  Bacterial polypeptide expressing nucleotide sequence isolated from the Sargasso Sea
tatgttaaaaacacgatttgcaccctctcctactggcaatcttcatcttggaggtgctagaactgctttaattaattatattgtaagtaaaaaatcagcatcatctaaattttacttgag

SEQ ID NO: 299666 - DNA, 982 bp, Unknown
  Bacterial polypeptide expressing nucleotide sequence isolated from the Sargasso Sea
atgaagttagggtctatttctgataattctcgcgacggttgtccggtgctggtggatcgctgtcttaggtatatgattcctgtcaacaacgtaataaacaattggcagctcgcaattgaaaactggtccgcagtatcaccaaaacttgagaaaatatatgaaaaacttgataaaggactagctgaaggcgcgagtccttatgacagaagcaagctcgctgctccatttcctagagcatatcagtggttggatggttctgcttacgtaactcatgtggagttattgcgaaaagcacgtggcgttgaacttccagcaaacttttgggtagatcctttgatgtaccaagggggttcagatcactttctaggaccatgtgaaacaataaaaataaaagatataaattggggtgtggactttgagggtgaactggcagtagtggtcgatgatgttccgctagggatttcggaaaataaggccgagcagcacattaagttgattatgttagtgaacgatatcagtctccgaaatttaataccagacgagttgaacaaaggttttgggttcgtccatggtaaacctccaagcgcattcggtccgttggcaataactcctgacacaattggccaaagctggaaggatggaaaagtccatctcccgctgttgatcaaattgaatggaaaagaagtgggatttgcgaatgctggtgtggatatgacattcagttttccagaactagttgcccacgccgcgaaaacacggccactccgtgctggtacgatcattggttctggcacaatttcaaattctgatcagcagcatggttattcatgcattgctgaaatcagaatgattgagactattaatgaaggtgctcctcataccccgtttttacaatatggtgataaaatttcgatggaaatgttagattctgatggtcaatcaatatttggctctcttgagcagaccgtggagaaatgctgat

SEQ ID NO: 299667 - DNA, 1003 bp, Unknown
  Bacterial polypeptide expressing nucleotide sequence isolated from the Sargasso Sea
aatgaataagctacgatttgcccctagtccgactggtaatttacatgttggaaattttagaaccgcattgataaattatctattggcaaaaaaattatcaggccattttatgttgagaattgacgatactgataacgagagatctaatttgatttatgaagagcaaataaaaaaagatctcatttgggcaggtatgaattgggatagtgaagttaaacaaagtcaaagaattaataaatatacagaagttttagatttgttaataagcaaacaattagtttatccatgttttgaagatcctgaagaattaaatcttaaaagaaaagctcaattgtcatctggaaaacctccaatttatgacagaaaatcattaaatttaacggataaagagatagaagaaaaaatatcaaatggaaaaaaacctcattatagatttttcttgaaaagtgaaaaaattatttggaatgatttaattcgtggtgaatgtgtattagacacatcatctgtttctgatccgattgttgtaagagaagatggtagatttatttatactttagcatctgttatagatgacagtgattttaaaattactcatataattcgtggagaagaccatgttacaaattcagcagtgcaaattcagatttttaaagctttaaactcacaaattcctcaaatgggacatttatcattaatgactgatattgatggaggaggattatctaagagaataggaagtctgtctattgatgaattaaaaaaacaaaatatagaacctcaggctttaactagttatttggctaaaattggttcctctcaaaatgttgaattacataattctataaatcaacttgttaatgaatttgatatcaattcatttaataaagcacctacaaagtttgatcatgaatttttaaaaaattttaatattaaattttttcaatttattaattttaataaaataaaagagagaataactgagaataaagcttattcacagaag

SEQ ID NO: 299668 - DNA, 439 bp, Unknown
  Bacterial polypeptide expressing nucleotide sequence isolated from the Sargasso Sea
ttgatccaatcctctgatataaaaaaactttcaaaaagagattttgttgtagcctctaaaattagaccgaataaagaaacttttgaatcgttaatgtttgcatttaacgtctgtagacatgtaaattcaaacgcaattgttttagcagccggaaattcaactgttggtattggatctggccaaccaagcagaattgacagttgtgaaatagctataaaaaaaatgaataagtttcaaagattaagtgataaacaagaaatttgtgccgcatcagatgcttttttcccttttgttgatggtattgaaaaactcgtacagtcaggtgtttctgcagttatccaaccgagtggatcagttcgtgataaagaaataataaaatttgctaacaaagcaggtattgttttaattttttcaaaaacaagacattttaaacattaat

SEQ ID NO: 299669 - DNA, 341 bp, Unknown
  Bacterial polypeptide expressing nucleotide sequence isolated from the Sargasso Sea
gaaacgaattgcaggagttgattttggagattttgttgtctggaggcgagacaatcttgccgcatacgaacttgctgttgttgtagatgatcaccacatggagattggtgaagtggttcgtggaaaagatctcctcacgagcaccgcgagacaacttctcttatacgaagcacttggctgggaacctccgcagttctttcacacgaatcttattgttggtcctgattcgaagcgattagccaaacgaacgaacgggctcatgattcgagaattacggagaaagggattttctcccgaaaccgtgttgagcgggtccgtagacggaacgttctggaaatgaa

SEQ ID NO: 299670 - DNA, 2371 bp, Unknown
  Bacterial polypeptide expressing nucleotide sequence isolated from the Sargasso Sea
tctggttgatgatgcacccataccagatataaaaagtacaagaattgacacattccatgttcccatgatacttgtagagttccctgatgcaaacgcaacatattctcctgagcaattcgatcttattatgaaccaagagggctatacacatcttaactatgagaacactggaagctttcgtgacttttaccaggaaatttcgtacggtcaatttttaccaattgctgaagtttcagaatggttcactgcaccttatgagcatgaccattattcttataacaatggatatgcagttgtgcgtcagctagttagagctatggttgattctttagaagcctcagggtttgattggtcaggatacgataatgatggggatggctatgtggatgcacttaatcttgttcaccagggtcccggtgcagaagaaggtgattattcaaatatctggtctcataagtctagccttggaaatctagcagtaacctatgacggtgtaacaataaacagttataacatgaatcctgaaacacagcttgggactatttgcagtataggagttttagctcatgagtttggtcacgcactcggccttccagatctatatgacactgattattcatcaagtggatctggtaaactcgcgctaatggcttctggcacttggggtacgagtggtacctcaccctggtatccagcaacaatggttgggtggtgtaaaaatgaattaggttgggtagatattgttgagattacggatgaccagggtggtgtatcaattgagcaaacctattccagcaacacaatttttcgagtaaatcactctcaagttgaagaagaatattggcttattgagaacagacaaaatattggctctgataccctaatgccatcaagtggacttaccatatggcatataaatgatgatattgcgcaaagtggtggctgggctccaaataataatgaaccctattacggagtaggtctggaacaggccgatggaatgtttgcgttagaaaatgggggaccaagtgacggcaatgatgttttccctggaaacactgataatcgggagttcagtcattcatcttctccaaatacaacaagtctttatggtgagccctcaatgctacgaattgataacatttcagacccaggtgaattcatgacatttgatgttcagtataatgaaattattcttgctacagcttcaattgaagatggaagcggctctgcatataatcaaggatctatttctatagggttggataatgaaatggctcttggggaatttgaatttgaattggattttaacccttcatttgttgaaataacaggtgtcacacccactgagagaacaagctatgattctgttattattgagaattcaactgtcaccttgatcaacccaactatttctccaggcactggcactatattaaatctccaactattcaataatgtaggtatcgaagctgatgttgtagtgagctatgatctatgtttaggctatactaccgatggtagtgaagtaggtatcacaatacaggatgtagcagattatcatattcaggctgttgaacagttctataacatacaaaatggaacaggcgctgttggtggtggcgcatcatatattgcttctttgatcaataccgtacctattgctctcactgtttttcaattatctaatgacccagaaatacttacacctagcgctgagccttatgaagacctaaatgaaaatggagaatatgatgatggcgaacctttcacggactggaaccaaaacggacaatggtccccggttgttgaaccgatctccttatcggaagattgggaaatagatgtgaccgtttctggaacagatataacggtagggatatcaaactgggcagaaccactcgaacctgcacctcatgaattatttagggtgaactgttttgtcagtgatgaagcagaactaaatgatataaccactgtaaatactaacgtattattagttcttgatgcatggggtaatagtggagtaccgtttgtaaatggtgacggaactgttactattgaccagatattatcaaatgatataagcgaaaatcagcctactgtctattcattggataaagtgtatccaaacccatttaatccaataaccactattgaattttctgttcctgaaaacaataatgataaagtcaggttgcgtgtgtttgatattggcggtagaatggttgagaatctgacgaacaagcaatatgcaagtggcgtttacaaactaaattgggatgcatcaaaattaggttcaggaatctatttcttagagttcaaggtaggctctttgagggacatcagaaagttaagcctgttaaaatag

SEQ ID NO: 299671 - DNA, 2518 bp, Unknown
  Bacterial polypeptide expressing nucleotide sequence isolated from the Sargasso Sea
gatgaattttaattatgccccaagagtaacaagagcatctacagctacagattcaatgtcatatttagctaaagataagtttgacctagttattgttatgttaaggattgaagatactgatcccatttcacttggaaaatctatcaaaaaaacatactctcatatgcctgtcattctattagcattcgatgaaaccgaaataaaacaactttcacaaaaattatcaccaagtgcaatagatcgtgtttttatttggtcaggagatgcatcagtatttccagcaataattaaatatgttgaagatagaaagaatgctgagcaggacattgttaaaggtgatgtgcgcgcaattatattgattgaggattctccgagaatgtattcggtactattaccaatgatttacagagaaatcatttatttaactaaaaacttaatgaacaaaacactgaatagtacttacaagtcattacatctaagaggtcgtttaaaagttcttctaacaccaaactatgaaactgcagttcatttctcagaaaaatatggtgataatatcattggcataatttccgatgtaaaattcctcaacaaaggaaaaaaagattctcacgcagggatgaaacttgcaaaagctatcagagaaaaacatccttcaatgccaatcattctacaatccacagaaaaagataactacagattagctaaacttattggagcagattttttacataaaaattcaaatacactactacaagatttaagaaattttatgattttaaattttggttttggtgatttcatatttaaggacaaaaaaggaaatgagatacaaaaagcaaccaatatagaagaattaattaaagctgttgaaactgtaccaattgaatcaatcatctaccatggaaaaagtaatcatttttctaattggcttgccgcaagatctgaatttagcttggcaacaaaactaagaaaaatcaatgtgaatcagttcaaggaaaaagagaaaatcagacaatccattattgagcaaataaactctccaaatacaaaattaagatttggcgaggtaatagattattcaataagtggaggtaaagcttcaaagttttatagaatgtgtggagggtctttgggcggtaaagcaagaggtctagcatttgcaaaggatatgataaagcaatctggacttagccataggttctcgaacgtcagaataaaaatacctaatacagcaataattgggactgatgagtttgatcgatttatgaaggacaataaactttgggaagatgcattgaaagcacaaaatgataaagaaatagtaaaattatttttagatggcagactttctatggacttgattctcaaactagaatcttttttgaaagagtgcagttatcctatagctgtaaggtcatcaagtctcttagaagactcacaatatcagcctctttctggtgcttattcaacttttatgctagcaaataatcaatcatcaattaaagatagaatcaaagaacttactaatgcaataaaactagtatttgcgtcaatattttataaagaatccaggtctcattttgctcagtcagctcatagaacagaagaggagaaaatggctgttatgatgatggaaattgctggtcagaaatattcaagtggtagattctatccctcatttagcggtgttttaaagagcattaatttctaccctgtttcttatatgaagcgcgatgaaggagttgcttacctctctcttggttttggaaaaactattgttgatggtggaaaatgtcttggaatatcaccaaaatatccagcaataaaaccacaattttctacaattaaatcaactttaacaaattctcagtctaacttttattccctcaatttaaaaagtgatagtcccaacctctttaatgatttaagatcagataatttatcacaagctgaattagatggctcattaaaatgggtaggtggtgtggttacatctgaggataatatattaaggaattcattatcttataaaggtacaagggtagttaatttttccccagtactagaatggaaaattttaccattatgtgatattctaaatgagcttctttttcttggaaaaaaggcattaggttgcccagtcgaaattgagtttgctgttaatatttttcaaaaaaagaataaaccttcagagttttatctacttcaaataaaaccaatggttctaacaactaccaaaataatttcatttgataaaataaaaaaagaagagatttttgcacaaagtcatataacgcttggtaatgggacaactgataacatcaaaaatttattatatcttcgcccaaataaatatgatccttctcaatcaaaaacaattgctaaagaaatagaaaagttcaataaaagtataaatatcgaaggcaaatatatcctagccggacctggccgatggggctcagcagatccatggctaggagtaccattaagttggcaacaaatttcaaatgcaaagttt

SEQ ID NO: 299672 - DNA, 141 bp, Unknown
  Bacterial polypeptide expressing nucleotide sequence isolated from the Sargasso Sea
aatgactaaaaaagttatcactaggtttgcaccaagtccaactggacatttgcatttaggtggagcaaggacagctctattcgcctggttgttttcgaaaagtaataaaggtaaatgtttattgaggattgagatacagat

SEQ ID NO: 299673 - DNA, 239 bp, Unknown
  Bacterial polypeptide expressing nucleotide sequence isolated from the Sargasso Sea
aatgaaaaaagtagcaactagatttgctccctctcctactggacctttgcatataggtggggttagaactgcgctatttaattggttatattccaaaaatcaaaatggtaaattctatttaagggttgaggatacagataaagaaaggtcaaaagaagagtataaaaaccaaataataaaatcgctcaaatggattggcatcaactatgatgaaaaagaatatatacaatcaaataaaa

SEQ ID NO: 299674 - DNA, 262 bp, Unknown
  Bacterial polypeptide expressing nucleotide sequence isolated from the Sargasso Sea
aatgaaatgtagatttgcacctagtcctactggtttattacatgttggtaatgtaagatctgcattattaaactgggcatacgcaaaaaaaaataatggagagtttatattaagaattgatgatactgatgaatcaagatctacaaaagaatttgaaaataaaataaaagaaaatcttacttggttaggtgtacaatggaataagacatttaaccaatcagatagaattgacaattacaattttaaaatagaacaattaaaa

SEQ ID NO: 299675 - DNA, 733 bp, Unknown
  Bacterial polypeptide expressing nucleotide sequence isolated from the Sargasso Sea
gtcattagaggagatgaccatacaagcaatacggctgttcaagtagaaattattaatgcgttggatcaaaataaaataacctttgcccatcacgccttactaaaagcatcaagtggagataaattatcaaaacgagacaatgtcatatccattagtagtttcagggaggcgaatatggagcctatatcaatactaagtttattggcgactatcggcacgtctaattctatcgaattaaaagacaatatagatcaaataaaaagtgaatttaaattgagtacaatttcaacgtcacctggtcgaattgaaattgatgtattgaatgctctcaataaaaaacaggttcaaaaatacaattttagtgaaatcgaagagagattggaaaagattgatgaaaaaattgatcaaaagttttgggaaacaatcagaggcaatctgaatgttgttgaagatataaaacaatggacggacattgtatttaatagtgagacaattaagccttctgataaagattatattaagattgcaatggaattgatccctgatgatccatggaatgatgaaacatggggactatggacttcggccataaaagagaaaactggcagaaaaggaaaagagttattcttacctcttagagaagcctttacaggacttaatcatggtccagaaatgaaactacttattcaattactgggcagagaaaaaatcatagaaagagttgagttataaa

SEQ ID NO: 299676 - DNA, 780 bp, Unknown
  Bacterial polypeptide expressing nucleotide sequence isolated from the Sargasso Sea
attgatagtgactaacataaaggctgaaaaacaaaccagctatattgggcgtttcgctccatcaccaaccggccccctgcactttggttctttagttgcagcgcttgctagctacctggatgctaaatttaacaaagggttgtggttggtccgcatagaagatttagatccacctcgcgagcaaagtggcgctactagtttaatcttagaccaacttttatccctaggattagaatgggataatgatgtgttatttcaaagcacgcgtttaaacgcctatcaatctgctctgcataaaatgtctcaaaaatctttaacctataggtgtgactgtacccgcgcttcgattaaagaaagaagctctatttatgatggctactgcagaacgagaaatagagcacccaaacatagttttgctatcagaatcaaaacgtcgaatagaaagatcggttttcaggatgagatcagaggggatttcaaacaagacatcggaaaagaagtaggagatttcatagttctgagaaaagataaactttttgcttaccatctagctgtggtggttgatgatgagtatcaaaagatatcgcatgtggttaggggaggcgatttacttagctcgacacctcgtcaaatttacctacaacaattactcgatttcaagacccccaggtatgctcatatcccgatagctgtgaacgaccaggatgtaaagctcagcaaacaaaatttttcaccaggaatagagatagagaatgcgtcatatttactttttcaggctct

SEQ ID NO: 299677 - DNA, 1191 bp, Unknown
  Bacterial polypeptide expressing nucleotide sequence isolated from the Sargasso Sea
gtggttttatggatggtgaagctagcgtacctaccttatgggctgtggcgaatggtcactatattcgtgataatgctgatcaattccgcacaatgtatggcatgaacaagctgaatttacagcgttcttttgatattgacgccactacgttatctttgtatttgcagagcaaatttgaaactgaagtggctggccgtgtgttaaacggtgaaattggtgcccgttatactggcatagacacagattcaatgttctggcaggaaagcgcgccaggtgcagttcagccgtcgactgcaggcgagagtaaaacccgtaaaattttgccaagcttgtctgcccgttatcagttaactgacgatgtccaggcacgtgtggcttatactgaaacactgcgttatccgggctttggtgatttaaatcctttgatcatctacaacgaagacgtaacaggtattggttatggtacagcgggtggcggtaaccctgacttaaaaccaactgaatcacaaaactatgatttttcactggaatggtattttgctgatgccagctcgttatacggcacagtgttcagacgtgatattgatggttttgtggtcggcttccgccgttcagtaacagcaccaaaatctgcaactgatccaacgccttacaaattcgtattaacacagccatacaacgcttctaatggcgagttgtcaggtgctgaaattggtttagtctggttccctgactatttaccacaagcattggatggttttggtgtgcaggccagttatacccgcctgtcgtcgcaacaaactacacctgataccaatagtgaaggcgaaatcaccggctacagagacaccgatctgtttggcgtgtctgattcgtcttacagcatagtgctggcctatgacaaaaacgatctgaatatgagattgtcttatgcatggcgtaaagggttcctggctaactatgaagcggctctatttgctaacccgctggaaatgcgtcgtaaagacgaagccagtatggacttccagttaagctacaagctgacagaacagtttgagctgacgctggacggcaccaacctgaccaacgaactgtatcagagctactatggcaatgatgcaaccacagggaactttggtactgccttgtacagccgtactttcgccttgggtgtgcgttacagcatgtaat

SEQ ID NO: 299678 - DNA, 175 bp, Unknown
  Bacterial polypeptide expressing nucleotide sequence isolated from the Sargasso Sea
catggttaaaactcgatttgctccaagcccaagcggataccttcatattggaggtgtcaggaccgctctatatgcatggctttatgccagaaatcaaggcggaaagtttctacttcggattgaggacacagatatagaaagatcttctgaagagtcgaaattatcaattctttga

SEQ ID NO: 299679 - DNA, 1168 bp, Unknown
  Bacterial polypeptide expressing nucleotide sequence isolated from the Sargasso Sea
tatgttcttcaagcaaatcttaaattttgactttagtaaactagattatttattaatatctttattcatattactaagctttatcggactaattgttttaacaaccgcttcagttcatctatccgattctttatacggcaatcccacacatattttgaacaaacaactattccatctttcattaggtttagttttttttataactattttcttaatacctttaacgttctgggaacagtttgatagattgttactaacttttggtatttttctattgatgcttgttttcattccgggagtgggggtagaagttaatggtgctaatagatggattagattattcgggtttagtcttcaaccatctgaaatcatgaaatttttaagcattctgtacatttcagcctattgcgttagaagaattgaaaaagttcaaaatgatttactaagttttataagaccttccattttgctagttagtattatttctttaattcttatacagcctgatttaggcacttcagctgttatttttgcctccgctttgggtgtattgtttgttgcgggtgtcccaaaaagacaatttgttttggtcttcttaattggtttgataggcatagctttattaataatttatgttccatggagatgggaaaggataatttcttttgttgatccttggagtgctccagagaagcaaggatatcaactcactgtatctctaatgtcgataggaagaggcgattggtttggagttggtttaggtcaaagtttgatgaagatgggttatttaccggaagcgcacacagattttattttttctatcctcatcgaggaattgggtttactgacaggaattttgatagttgctatgttattcggtatctcttttagaatattttttataggaagacagtctcttcaaagaaaaaatcattttggtttctttttttgttttggagcagcaattctaataggattgcatatattcattaatgtgggagttgcggtcgggattttaccaacaaaaggacttacattgcctttatttagcgctggaggaaccaatttattaataatgttctctattattgggcttatacttaggattgattatgagaacaagatatctatgccaattgcgagtataaaaaagagagtaaatttttaa

SEQ ID NO: 299680 - DNA, 2759 bp, Unknown
  Bacterial polypeptide expressing nucleotide sequence isolated from the Sargasso Sea
gttataagtcagtggaaagatataagcggtaatgagaaccatgcaaaaaaagtatggggtaatgtggccttcaattctacatcaggtctcaagagtcttgtttttgatggtgatgattcatttaagttgactcaattacccagtcagatgggaattcaaaacagtgactatgaaatcttcatggtcatcaggaatcaggattctgatccaggattcgtttttgctggtggacttgagtcttatgagatccacacaacgattggttcggataaggatggcatccgtttcattcctgcagactctaccgttggaggggatgactatgttgatttatctgttagcaacatggtttatgaaaaaacttcgatcttgaatgctcgcgttaatgatgatgaaggattcatacaaatcaatggtgagaattcaggtgatacggttacaaatgcacgttcggatgataattcaatacttcatataggatttagatcaggtggaacctttacttacaaagggcacatctctgagatattggtttttaataaaaaacttacaaacttcacccgaaataaagttaatcattatctgtcagaaaaatggaatctgaaatcgacggttgacagtgatgatgatgatcttgtggatgcatctgacaattatccggtaggattgattagtgaacctagaccggtttctttcaaaatttcattcacagacctcgcaggtaattcaggagtttccattgacaatacttcaagtggaaacatcatagggattgacacaagcatacctgttttgacctctgttaaagtctcttccaataatttagataacactagcctcgccaaagccgatgacaatgtgaccctgaccgttcagtcttccgaaaccctgcaagcattggaattggtcaagtccgatggttccagagaatccttggtggcaacagatgactcgaaaacctcctggcagtattcgaggatggtccaggcaggtgagagcggagtgttcggtttccagttagagtacagtgacctagtcggcaatcagggaactgttatcaccacgtccactgatggaagcatagtcactttagacaccatagctccggacctaacgagttatggggttaaggtcaatgacgtcagcagcttcactgcaaagtcaggagataccctcaaagttgaattctcgaccactgaaaccataaggactccattggtcagaattggtggagaggatgccaccgttaccggttctggaagtagttggatcgctgaaaaacagttaggaagcagttctactgaaggacaagtcacggtggaaatgatcatcaccgatgcttcagggaatcagcgaaccctttccaaccatcaaagcacagatccattggcatcttactccttcatcggcaacgccaatgacaactccagccataacaaccatctgacggtccatggagcaactttgacttcagaccgtttcggcatgtcggattccgcgtacagatttgatggcaatgacgattatctgaccgggggtgatgttaacgatctgggaaccgagactgtgaccttctcagcatggtttaagaccagtatgcagggttggggttctggaaataaaatccttaacaagggactgaccagttcaggaaattatgctgggtaccacttcagattggggtcagacaatcatctgcaacttggaattaatgaaggaaataatgactggagtgattgggttggaattcgttccatcaacattgtcaatgacggttattggcaccatgccgttggagtaattgatcggggaacatcaaacatcaagctgtaccttgatggtgaattgcagggagaggctaatatttctgcagttggctcgcttgatacgcaaattccattctctattggcaacttggatcgtggtagttatggggaagaaacagaatattttaatggattgattgatgatgttcggattgaatcggaggccttgagcgcggctacagtgatgatgcgttccaacacggtgaggttggatcgaactctgcctactttgactgatgtatctatcgtttcggacaatgatcataatcgtgctctggccaaagttggggatgtaatagctctcacctttgaagtcagtgaggaggtcgattcgctgaatgcctacatcaatagcagcccagcggcgattaccggatcaggcacgacctggacggccagaaaaacgatggaccatcatactgatcctgaaggtcaggtgaccttttccgtcaacttctctgatcaaagcggcaaccagggggactccgtaacctccacatcggacaacagcagtgtccgctttgacaagacttcgcctactgcggctctcagttattcggctcccggtccttacaggcagggtgaaacggtgacgatcactgccgattacaatgagtcgatgctgaccacatctacgccaaggttcaaagtgatcctggaggatggtacccaggtttcagaaaaaatgaactgggtatcgggtatggataaccgttccagtttcgatctccagatgcgacccggaaatggaattgccgaagtgaaactcgatgacgccatggatctagccggtaacgaagtgatagcagatcctacggaaggtggacaattcgaactggataacattcctccctctgcattcattagctttcaggatggtacaggcagtccttatcctggtccctacagacaagggggagacaacgtcacctg

SEQ ID NO: 299681 - DNA, 821 bp, Unknown
  Bacterial polypeptide expressing nucleotide sequence isolated from the Sargasso Sea
tttacacactttatggtatgaagcaatgggttgggaagcacctcaatttgcgcatctttctttaattttaaaacctgaaggaaaaggaaaattaagcaaaagagacggcgacaagttcggatttcctgtatttcctttgaattttacagatcctgtaacaggaaatgtttctaaagggtatagagaaagcggttatcttcctgaagcattcatcaatatggtggcacttttgggttggtctcctgcagacgataaagaaattttatctttggatgaaatggcaaaagaatttgatcttaataaagttcataaagccggagcaagattcagcaaagaaaaagcagaatggttcaaccatcagtatattcagaaaacttcggatgaagcactgttgaatattcttaaaaattcaaacttacatttaacactttcagacgagaaactgttaaaagtaatcaagctgatgaaagaaagagctaccttcccgaaagatatctacgaaagcggaaaatttttcttcgaagctcccacttcctatgacgaaaaagcatctaaaaaagcatggaatgacgaaacttcggcaattttaggagaattatcctcaagtcttcaggaagcagattttaatgctgaaaatctaaagcagatcgttcatgattttgcggaaaacagaggtttgggaatgggtaaagtaatgatgccgctgcgtttgtctttagtaggagaacttaaaggaccggatgttccggacatcatggaacttcttggaaaagaggaaactacctccagaataaacaatgcaataaataattttaaataga

SEQ ID NO: 299682 - DNA, 419 bp, Unknown
  Bacterial polypeptide expressing nucleotide sequence isolated from the Sargasso Sea
aatgacagagagaactagatttgcgccaagtccaactggccatctgcatattggtggcgccagaacagcgttgttttcatggctatttgcaaaatctaaaggcggtcaattccttcttaggttcgaggatactgatacagagagatctaaagatgaattcaaagactcaattttaaaatcattagaatggcttaatttaaatccagacgaggagccagtacatcagtcaagaaatttagagagacataaatttttagccttatctctatttgagaaaggcgcagcttattattgtgattgttccattgaggagctagaagaacttcgtgctactcagataaaaaataaacaaaaaccaatgtatgacgggcgaagcagagagaaaaatttagatacgaaggaaaaatgttctcgctata

SEQ ID NO: 299683 - DNA, 424 bp, Unknown
  Bacterial polypeptide expressing nucleotide sequence isolated from the Sargasso Sea
atgataataacaaggtttgccccctcacctactggaaattttcatatgggtagtttaaggaccgcaatttataattatttatatgctaaaaagaacaaaggaaaatttttgttaagaattgaggacactgataaagaaagatcaaataaaatttatgaagacgaaatcttaaaaatatttgatatttttaatcttcaatatgaaaatctaatttatcaatcaaaaaatttaagtgttcatcaagaatatttagagaaactgatatctactgattttgcttatcagtcagatgatggaccatataagtttagaataataaaaaataatgaattttttaaatatgatgatttaattttaggagaggtaaaaataccttcaaatacaatagaagatttctcgatagctagatctgataaaactccca

SEQ ID NO: 299684 - DNA, 466 bp, Unknown
  Bacterial polypeptide expressing nucleotide sequence isolated from the Sargasso Sea
aatgtcagataatcaggttcgtgtccgttttgcaccatccccaacaggcccattacatatgggaggagttagaacagctctttataattatttatttgcaaaaaaaaacaaaggaaaattcattattcgtattgaagataccgatcaaacaagatttgtagatggagcacaagactacatcttagattctttaaagtggtgtggtatttttccggatgaaggtcctggcattggtggagattttggtccatatgttcagtcaaaacgaaaagatagatataaagaatatgcagatttattaattgaaaatgggaacgcgtattatgcctttgattcttctgaagatctcgaaaaaatgcgaagtcaggccaaaaaaatggggatgcctaattggcaatacaatggggttagtaggtcaagcatgaagaattcattaactctcccaaaagatgaagtggatcggctt

SEQ ID NO: 299685 - DNA, 719 bp, Unknown
  Bacterial polypeptide expressing nucleotide sequence isolated from the Sargasso Sea
tgctcatatacctttaattcatagtgagaaaggtaaaaaactttccaagagagataatgcctcaacaataaatgattatattaaaattggtatcataccagaggctttaagaaattatttgttaagattaggatggtcttacaaagataaagagatatttaatcttaaagaaagtatcgatttatttgattttcaagggattggaaaatcaccatcaaagcttgatatgtctagaatactctcaataaacgaaacttatttaaaaatgactgaagataagacgctgtttaattttttgaaagaatatgtatcaaattttaaggaacccatagataaagcaaaagaaactattctcatgaaatctatgaaatttttaaaaaataaggcaaaaactttagaagatatttgggaaaacgctcaatatatcattaaagaaaaaattgtaattaatagtgaggatattaaacttattgatgatttatcaaaaaaaataataagggactttattactgagtacgaaaaaataagttctttaacaagagaggcattggaaccagtcataaaatcgttaatagaaaagcacaaaactaatttcaagggtgttggccaaccattgagaatagcgttagttggttcaaaatttggtcctggtttatacgacgtaattttatccttggataaagaagaggttttaaaaagattaaaactaattatttaag

SEQ ID NO: 299686 - DNA, 802 bp, Unknown
  Bacterial polypeptide expressing nucleotide sequence isolated from the Sargasso Sea
taatagaaaatggagagacaaaagagaatctgatgcaccaaaagatataaaaccagttataagatttaagagtaaaattgatggatcaactgtattaaaagatttagtacaaggggatgtgcaaattgaaaataatactattgaagattttattattcttagaaacgacggaacaccaacatataatctatctgcagcagtagatgataaagaaatgaaagtatcgcatataattagaggagatgatcataaaatcaatacatttaagcaaatgcaaatatatatggctatgaaatgggaacttccatcttttgcacatattccattaattcacactacagaaggaaaaaaactatctaaaagagataaagcatcaactcttgatgactattcgaaaattggaattatgcctgaagcattaagaaattatttattaagattaggttggtcttttaaggataaggaaatatttactttagatgaaagtattaaacattttaatttagaaggaataggaaaatcaccatcaaaattagatttcagtcgtattttatcaatgaatgaacactatataaaaaacatggatgagaataatctgtacgaccaattagatgaatattgcaatgtctacaaaaaaaaaattgaaataaataaaaaagataaaataaaaaaatcactaccatttcttaaaaataaagcaaaaactttagaggatatttataataattctaaatatatattatttgatgaagtaaagtttgatgagaatgatttaaaactcatagatgaaaatgcaaaaaaa

SEQ ID NO: 299687 - DNA, 667 bp, Unknown
  Bacterial polypeptide expressing nucleotide sequence isolated from the Sargasso Sea
aatgaagtgtaggtttgcacccagccctacaggaaaaattcatattggtaatgctagatcagcaatattgaattggatatattgcaaaaaaaacaatggtgaatttgtattaagaattgatgatactgatagtataagaagttcaaaagaatttgagttaagcattaaaaatgatcttgagtggattggtttaaattgggattattcatttaatcagtctactagaaatactatttacaataaaaaaattcaaattttaaaagataaaaaaagactttatccttgttttgaaacagaggaagaacttgctttaaagaaaaaagcattactctcgtcaggcaagccacctatttatgacagatcatcattaagtttgactgctcaagatatagaacaaaaaatcaaatctggagccaagccttattggagatttaaattagaagatgaaacgattaattggcacgatattattaaaggggatgtatcatttgattctaaaaatttaagtgaccctgttttaattagagctgatggaactttgttatatcatttgccatcagtaatagatgatatagaagaacagattacacatataattagaggtgaagatcatatagctaatactgcttatcacattcaaatctttaaagcacttgaagcatcaatt

SEQ ID NO: 299688 - DNA, 559 bp, Unknown
  Bacterial polypeptide expressing nucleotide sequence isolated from the Sargasso Sea
atgaaaaaagtagcaactagatttgctccgtcacctactggtgcgttgcatataggtggtgttagaacagctttatttaattggttatactccaaaaatcataatggtaaattttatttgagggtggaagatacagataaagaaagatctaaaaatgaatataaagaccaaataatacaatcacttaaatggattggtatcaattatgatggagaagaatatatccaatcagagaaagtagacgatcatataaaagttgtaaatgagcttattaaaaatggtcatgcatataaatgttactgttcaagtgaagaaatagaagaacaaaaaaaaaaagcaaggcaaaaaaaaattccgtatatttacaatagaaaatggagagataaaagtgaaaatgatactcccaaagatattaaacctgttataagatttaaaagtaagattgatggaacatcagtattgaaagatttggttcaaggtgatgtagaaattgaaaataatacaattgaggattttattattttaagaaatgatggaactccaacatataatttataag

SEQ ID NO: 299689 - DNA, 877 bp, Unknown
  Bacterial polypeptide expressing nucleotide sequence isolated from the Sargasso Sea
caaatttctgggaattctattataaatgatcttgttcagggtaaggttaatattgcaaattcaatcatagaagattttattattctaagacaagacggatcacctacctatcaattgtctgccacagttgatgaccatttaatgaaaatctcacatgttattaggggcgatgatcataaaataaatacttttaaacaaaaacaaatttatgaatcaatgaaatgggatcttcctaactttgctcatattcctcttattcatagcgaaaaaggttccaaactctcaaaaagagatatggcatcaactataggagattatattaaaaaaggaattttatctgatgctcttagaaattatcttttacgccttggttgggcccacaaagataaggagatttttactttagaagaaagtatacagttattcgatttgagtggggttggaaaatcaccatcaaaacttgatttaaccagaatactatccttaaatgagtattatattaaacacatggatgaagagaaactatttgaattattcaaaggtttcgctgaaaaatttagagagaaaatagacccttccaaagaaaattctcttcttaaatctatgaattttttaaaaaataaagctaaaacgcttgacgacatatactgtaattctgaatacattttaaaagacaatattaaaatttctcctgaagactcaaggcttttagactctacttcaaaaaatattataaaagactttcttatcaagtttgaaaaagtatctaaaataaccaaagaaaatcttgaaaaagctgttaatgaattaattactaagcacaaaacaaattttaaaggagtaggacagccattaagaatagctttggttggatcta

SEQ ID NO: 299690 - DNA, 87 bp, Unknown
  Bacterial polypeptide expressing nucleotide sequence isolated from the Sargasso Sea
catgaacgtcgttacacgttttgccccgtcgccgacgggttttcttcatatcggcggtgcccggacggcgctgttcaactggcttta

SEQ ID NO: 299691 - DNA, 820 bp, Unknown
  Bacterial polypeptide expressing nucleotide sequence isolated from the Sargasso Sea
ggctggagagaagagcgtcgttcggatgaaagtccttcagactggcgagtgtgtctttgaagatcggttgagaggatcgatatctataggttatgaccagatcgatatgcaggtcattttaaaggctgatggtatgccaacgtatcatttggcggtcgttgtcgatgatcatttgatgggaattactcacatcttgaggggagaggagtggcttaactcggttcccaaacataaattactgtttgagtattttggttggaacatgcctgagttaacacatctgccacttctcaggaacgaggacaaaagcaaactctcaaagcgaaaaaaccccacaagtttgaattattacaaggatatgggcgtacttccggaagctttgctcaactttctcgggttgatgggttggtctatgccagatgagagggagattttcgatatacaggaccttatagaggcctttgatctggacagaatcactacaagcggaccagtttttgatcagacgaaattgaaatggttgaatggactatatctgaggaaacttgatgactccgattaccagctgaagttcgtccgctggttggaaagtctggggggtatagaacgacttctgcctctggttaaagatcgcgtagaaacgttctccgagctggcgccaattacgaactacctgatcggaaaccgggctgaattgtctcttgctgattttaacgggcttcgtgtggagatcgatttgaccaagaaaatcttgcaccacctgttggcagcgcttgatgcgcagattgaatgggataaagattccttgctcgagacatgc

SEQ ID NO: 299692 - DNA, 193 bp, Unknown
  Bacterial polypeptide expressing nucleotide sequence isolated from the Sargasso Sea
aatgactggatatattactagatttgccccctcacctactggtaaccttcatattggaagtgccagaactgctcttataaattttatttttaaatcccaacacctagactctaaattatatttacgaattgaagacacagataaaaaaagatcaactgaagaatataagtataatattataagcagtctaagg

SEQ ID NO: 299693 - DNA, 622 bp, Unknown
  Bacterial polypeptide expressing nucleotide sequence isolated from the Sargasso Sea
gttggaaaaacgattaagattagctccaagtccaacaggtttatttcatattggtacagcacgaactgcactattcaactggttatatgcacaaaaaattggtgggaaatttcttattagaattgaagatacagattttcttcgatctaagtctgaatacacaaaaaatattttagagggattaaattggcttggacttaaatgggatgaagaacctgtaaagcaaagtgaaagaatttcgattcacaaaagttatatcaaaaaactattggaatgtggagctgcatataggtgctttacatcagaagatgaaatatctgaattaagagaagaacaaaaaaagaaaggattacctccaaagcatgataatagacacagaagtctttcaaaagaagaaatagaaacattcatatcccaagggcggacttcagtaataagatttaagattgatgaaaaaattgatattaaatgggtagatcagataagaggcgaaatcaaatggcaagggaaggatttgggcggtgatttagttttatcaagaagggctcagggatatgagattggtgatcctttgtataatcttgcagttgtagttgatgataatttcatgaatattactcac

SEQ ID NO: 299694 - DNA, 439 bp, Unknown
  Bacterial polypeptide expressing nucleotide sequence isolated from the Sargasso Sea
atgactagatacattactaggttcgccccttcccctacaggcaatctccatattggaagtgcaagaacagctttaataaattacatttttcaagcccaacatccagactctaaattatatcttagaattgaagatacagatagaattagatcaaccgaagaattcaaagaaaatataattagtggtcttaagtggttaggcataaaatgggataatgatccacaaattcaatcatcgaatattaaccgacatctagaaatagctaagaatttgttaaaaaacaaaaaagcttacaaatgtatttgtactgaggatcaattaacagaaagaagaaaaaaaataaatagtggtgaaattagttcaaaaaaaatatgtatttcttgtgaaaggaataatgaggttcaatctcttgaaaaaggcatatgctataagaattaaa

SEQ ID NO: 299695 - DNA, 220 bp, Unknown
  Bacterial polypeptide expressing nucleotide sequence isolated from the Sargasso Sea
atgtcaaaagtagcaactcgttttgctccctctcctactggggctcttcatattggtggtgttagaactgctttgtttaattggctatattcaagaaatcaaaaaggcacttttcatttaagaattgaagatactgacaaagaaagatcgaaagaggaacacaaaatacaaataattaaatccttaaattggttaggaataaatcacgatggtgaagaat

SEQ ID NO: 299696 - DNA, 505 bp, Unknown
  Bacterial polypeptide expressing nucleotide sequence isolated from the Sargasso Sea
aatgactaaaaaagttatcactaggtttgcaccaagtccaactggacatttgcatttaggtggagcaaggacagctctattcgcctggttattttcgaaaagtaataaaggtaaatgtttattgaggattgaagatacagataaagacagatcaaaagaggaatacacaaactccatacttaaaagctttagttggatgggtattgaatttgatgaagaacctgtctatcaatctaaaaatatttctttgcatcttaaggctatagaaaaattgatagaagagggacatgcttattattgtcattgctcacaagaaagattagataaattaagaaaggatcagcaaaaggcaggagaaaagccaaaatacgatggtaaatgtagagaacttaacttagaaaaatctgattcttcagttgttcgttttaagaactctcgagaaggagctgttacatttaatgatttggttagaggagaaattacattttctataatgaatagatga

SEQ ID NO: 299697 - DNA, 463 bp, Unknown
  Bacterial polypeptide expressing nucleotide sequence isolated from the Sargasso Sea
atgtcaaaagtagcaacaagatttgctccatctcctactggtccattacatattggtggggttaggaccgccttatttaattggttatattctaaaaaacaaaacggtaaattctacttaagagtagaagatacagacaaagaaagatctaaagacgaatataaagatcaaataatacaatcgcttaaatggattggtataaattatgatggagaagaatatattcaatcagagaaagtaaaatatcatattaaaattgcaaatgagcttcttaaaaatggtcatgcatataaatgttattgttcaagcgaagaaattgaggaacaaaaaaaaagagcaagacaaaaaaaaattccttatatttatgatagaaaatggagagataaaaaagaatctgatgctccagaagatatcaagccagttataaggtttaaaagtaagatagatggaacatcagtataaa

SEQ ID NO: 299698 - DNA, 929 bp, Unknown
  Bacterial polypeptide expressing nucleotide sequence isolated from the Sargasso Sea
acttagaagagatgcgcaaagaccaggggctgctttgggtaaaaaaccaatgtatgacggtcgaagtagagatctaggacttaaaaaatctgaaaatacagttctaaggcttgcaacaccgcttgaaggtgaaactatagtaaatgatttaatccgtggtgaaataatttttagtaatagcgaattagatgatcttattttgctaagaagtgatggaactccaacatatcatttctgcaatgttgttgatgattacgatcaaggagtaacaacagtaattcgtggagaggatcatattagcaatacaccaagacagattcatatccaaaaagcattagattacccagagcttgagtacgcacacttgccattagttttaggtgaagataagaaaagactttctaaaagacatgctgcaactagtctaaatgcttacaaagaaatgggatttactaaagaaacaatcataaatgcattagcattacttggatggtcaacagagaatgaaatttttttaatgaatgaattaattgaatcatttaagctacaaaatgtacaaaaagcatctgcagtatttgatcttaaaagatttaattggattagctctcaacaattagcaaaacttgatgatgaagcctttttcgatgtgattaaaccattcatgaaggctgagggtatcaatgaagactcaacaaactataaaaaaattcttcttgcaatgagaacatcaaaaactaatcttaaagatatagctcatgcaacaagacctttcttttttgaattagatggatacgatgaaaaaggtgtaaataagtttttaaatgaatctcttgagactcttaattttgcttataagctactttcaaaaattccagaatggaatgaaacagaattagatattgcattaataaatgttcgcgattatttta

SEQ ID NO: 299699 - DNA, 598 bp, Unknown
  Bacterial polypeptide expressing nucleotide sequence isolated from the Sargasso Sea
gatgacaaatattattactagatttgcaccctctccgactggaaaacttcatgttggaagcgcgaggacagctcttttaaattttatagtaagtcagcaagattcttcatcaaaattttatttaagaattgaagacacagataaactgagatcaaaaccagaatatatacaaaacatatttaatggattaaactggcttggtattagatgggaagaagatatacaaattcaatccaaacaaatatctagacacaaagaggtagcaaatattttattagaaaaaaattatgcttataaatgtgtatgttctgaagagaagctaaataaaagaagagatttaattaaaaaaaataaagacatatcaaaaaaaatttgtaccgaatgtaaaaatgactctgatattcaaaagttaaataaaggatttgttgttagaataaaactacctgatgaaggtgaattaagattgaaagataagatacaaggagaaattgttgttaagaataaagaattagatgattttattttattgagaagagatcaaacacctacgtatatgttatctgtcgtagttgatgataatgatataggtgtaatttaa

SEQ ID NO: 299700 - DNA, 594 bp, Unknown
  Bacterial polypeptide expressing nucleotide sequence isolated from the Sargasso Sea
tatggtaattacgcgttttgctccttcaccaacgggcttcttgcacataggaaatgttagagcagctctaatgaactaccttcttgctaagaagagtaatggtatttttattctcaggattgatgacactgatcaggagagatctaagcaggagtatgtagacgctatcaaaacagatttggattggttaggtctcgaatgggatcgaattgaatatcagtcatctagattagacttatataattccgcgtccgataagcttcgttctattgatttgctctatgaatgttttgagaccccctcagagctggatttaaaacgtaaaaagcaactgaatatgggcaaaccgccagtttacgaccgcgcggcattagctttatcagatcaagaaaagtcaaaacttagaagtgatcgcggtgatggccattggaggtttaagcttgatcaaactcgtattgaatggaatgatggaattctgaaagatctttctatcgacgcggcatcagtttcagatcctgttttaataagagctgacggtcaatatctgtatacacttgcatctgtgggtgacgatatagacatgggaatacaaac

SEQ ID NO: 299701 - DNA, 754 bp, Unknown
  Bacterial polypeptide expressing nucleotide sequence isolated from the Sargasso Sea
gatgattaaaacaagattcgcacctagccctacaggatggcttcatataggtggtgtcagaaccgcactttattcctggctttatgcaagaaagaataatggaaagttttatttaaggatagatgatacagacaccactagaagtacagaagagtataaaaattccataatatttgctctaaatcaacttggccttaactatgatgatgaaataacttatcagtcaaatagattcaatcattatgtagataaaatagaacaacttttaaatgatgatatggcctattacgataaagttgaaataaatgaaaaaactaaagagacagatctttcagtgcaatttgaaaatagactaaataaaaaaggacatgtaattcgatttagaaatcaaaaagaaaatagcataactattaatgattctgtgcatggcgatataatatttgaccctaaagtcttttttgatgtcgtaatactaagatcaagtggtgtcccaacatataaccttacatcagtggtagatgatatagacctgggcataacacatcttataagaggagatgaccatcttagcaatcttcctgttcaggtaaatttatttgaatcttttaaagctaaagttccatctttttcacaccttccaatgattcatggtgtagatggcaaaagactatcaaaaagacatggcgcagttgatatcaatcatttcttaaatgaagggtacagagtggatgcaatattaaattatcttgctaaa

SEQ ID NO: 299702 - DNA, 265 bp, Unknown
  Bacterial polypeptide expressing nucleotide sequence isolated from the Sargasso Sea
atgtcaaaagtagcaacaagatttgctccctcacctactggtccattacatattggaggagttcgaacagctttatttaattggctgtattcaaaaaataaaaaaggaaaattttttttaagaattgaagataccgataaagaaagatcaaaagaagaatttaaactacaaataattaaatcactaaaatggattggtattgaacatgatggcaatgagtacatacaatcaaaaaaaattcaagatcatgtaaatgttgctaatg

SEQ ID NO: 299703 - DNA, 877 bp, Unknown
  Bacterial polypeptide expressing nucleotide sequence isolated from the Sargasso Sea
attttaaattggatattttgtaaacaaaataaaggtgaatttttattaagaattgatgataccgatcaaactagaagttctaaagaatttgaaaatggtattaaagaagatcttaaatggttaggaattgactgggattatactttcaatcaatcttctaggaaagacatttataaagaaaaaataaatattcttaaaaataataaaagactttatccttgttttgaaactgaagaagaactagctttaaagaaaaaatcattattgtcctctggtaaacctccaatatatgacaggtcttcactaaaattatctcaggaagaaattgaacaaaaaattaaatctggaaaaagaccacattggagatttaaattagaaaatgataaaattaattggaaagatttaattaaaggtaatgtttcttttgatactaagaatttaagtgatccggttttaataagagaagatgagactttgttataccatttaccttcagtaatagatgatattaatgaaaaaataactcatattattcgaggtgaagaccatattgctaacacagcttatcatatacaaatttttagagcattagaaacagatgtgccaatatttgctcatcatccatttcttactgatgatcaggggaagggttttagtaaaagaatgaatagtttatcaatagaaaatttcaaaattgatggctttgaaaatattagcctcataaattattttctttttattggatcaagtagtgatatttatccaatgaaagatatagaggaaataataaataaatttgatattaacaaagtatctaaatcttcggcaaaattttcaaaagactccttagtttctcttaatagagatactataaagc

SEQ ID NO: 299704 - DNA, 193 bp, Unknown
  Bacterial polypeptide expressing nucleotide sequence isolated from the Sargasso Sea
aatgtcttttaattgtaggtttgcgccctctcctactgggcctcttcatattggcggagttcgaacagccttatttaattggcttttggctaaaaaaaataagggtaagtactttcttaggatagaggatactgataaagaaagatctaaagaagaattcaaaaaacaaattattacatctttagcttggctt

SEQ ID NO: 299705 - DNA, 554 bp, Unknown
  Bacterial polypeptide expressing nucleotide sequence isolated from the Sargasso Sea
aatgtcatttaattgtaggtttgcgccctctcctactgggcctcttcatatcggcggtgttcgaacagcattatttaactggctgttagccaagaaaaacaaaggtaaatattttttaagaattgaagatacagataaagaaagatcaaaagacgagtttaaaaaacaaataatttcatcattatcatggctaggtatagaacatgatggcgaagaatatattcaatctaaaaacattaataaacacgttgcagttgctgaagaacttgtcaaaaaaggttttgcttatgagtgttattgctcagaaaaagaaataaatgaacaaaaagagaagtgtaaaaaacaaggtataccgtatgtttataatagaaagtggagagatgctaaagaccttaaaattccagaggatgtaaaaccggtgattagatttaagagtaaaatttcaggaaatacaattataaaagatttagttcaaggagaaagaaatatctccaattctacaattgaagattttgtaatattaagaaaagataaatcaccaacatatcaattat

SEQ ID NO: 299706 - DNA, 664 bp, Unknown
  Bacterial polypeptide expressing nucleotide sequence isolated from the Sargasso Sea
ctgccaagcgttgttgatgatattgatatgaatataactcatataattagaggggaagatcatattacaaattctggaatacaaattgaaatatttaatgcccttaattcaaacatacctctttttggacataattctttactggtttcagagaatggtgaacctttttcaaaaagaaatgcagcggcctcaattgaacagcttaaagaaaaagatattgatcctaatgcagtcaattctcttaatgcgtctataggtagttcagttgatattgaagcttttgagtcattagatcttttagctgataaatttgaaattagttcacttagtaaatcacctgctcgttatagtaataatcagttagataaacttaattcgcaattaatttctaattatgattttgaaaaaatatctctacttcttaaagataaaaatgattttttgaatgcagaattttgggattgtattaaacaaaatatctcaactttatcagaggttaatgattggatcaaaatcttaaatgaaccaattgaaggtgattttaatttagaagaaaattatttaactattgctcaggatcttttgcctaatgaaccttgggactcaaaaacatgggatgaatggatatcaagattaaaagaaaaaacacaaaaaaagggtaaag

SEQ ID NO: 299707 - DNA, 562 bp, Unknown
  Bacterial polypeptide expressing nucleotide sequence isolated from the Sargasso Sea
attgaataattcagtaacaagatttgctcctagtccttcgggcttacttcatgtagggaatgtaaggactgcattgcttaattttttggtttcaaaaaaaaataatggaaaatttattttaagaattgatgatactgatcaagaaagaagtaaggataaatatatagatagtattaaagaggatcttagttggcttggcttgaattatgatgaatgttatcagcaatcaaatagaattgaactttatgataaggcatttgatattctgaaaactaaagatctaatttatccttgttttgaaacgcccgatgaattagataaaaaaagaaaaagattaattacaagaaggatgccacctgtttacgatcgagccgccttaaaacttaaacaagatgaaataaaatcattattggattctggaaaaaaaccatattggcgatttaagctttcaagtaaaaaagttaaatttaaagatttaattaggggggatgtaagtgttgatctggcagcccagtctgatcctgttataaaaagggaagatggtaattatttgtataatctt

SEQ ID NO: 299708 - DNA, 226 bp, Unknown
  Bacterial polypeptide expressing nucleotide sequence isolated from the Sargasso Sea
atgtcccaagttgtaactaggatagctccctctcctactggtttcatgcatattgggactgcaagaacagctttatttaactggctatatgcccgcggtagaaatggaaaattttatattcggatagaagatacagatcgaaaacgatcaactgcggaggcaaatgaagtaattataaatggcctaaaatggttgggcttggattatgatggagatatagtaagtc

SEQ ID NO: 299709 - DNA, 283 bp, Unknown
  Bacterial polypeptide expressing nucleotide sequence isolated from the Sargasso Sea
tatgaaaaaagttgcaactcgttttgcaccctcacctacgggaccattacatattggaggcataagaaccgccctgtttaattggctttattcaaaaaataaaaacggatctttttatttaagaattgaagatactgacaaagaaagatcaaaaaatgaatacaaagaacaaattataaaatcacttaagtggattggtgtagaaaatgatggggacgaatatattcaatcaaaaaaaattgataatcatataaatattgcaaacgaattattaaaaaatgga

SEQ ID NO: 299710 - DNA, 826 bp, Unknown
  Bacterial polypeptide expressing nucleotide sequence isolated from the Sargasso Sea
ttgaatgatattgaagattttgtaattttaagatctgataattctccaacttatcacctagcttcaactgtagacgatatagattatgagataacactggttgcaagaggggaagatatattaccttctacacccaagcatattttgttaatgaatgctcttgactctgaacatccagaattttgccacctccctttattatttggcccagatggtaaaaaattaagtaaaaggcatggtgacacatctgtatcagcctataaagataagggaattcttccagagtcattatttaactacatgtgtttactcggatggtcgccaggtagcgatctagaaatatttgatacagaattagcaattgaaaaatttgatttaaagaatgttcttccaaatcctgcaatttttgatactaaaaaacttttatggatgaatggacaatatatacgtgatacaaaagatgaaatatttaaagagctttttattaattcaattcaagaatctatcgctagagatttatttgatgaggaattaaataggattgaaaaaattataaaggcagtccaagagcgattagaaacaatgaatgatattagtgaacaagtaatgtttcttctagatgaaccttttaagattaattcagatgattggaaaaatgttaattctgaagatggtcaacagtatatgaaaaatgtaagaaataaatttatatcagcaagcaattttgaacttaacgacatagaagaaattatgagagaagaacttaaggttttagatattaaacataaaattggatttcaaattacaagagttgctgttactggta

SEQ ID NO: 299711 - DNA, 469 bp, Unknown
  Bacterial polypeptide expressing nucleotide sequence isolated from the Sargasso Sea
aatgtcttttaattgtaggtttgctccgtcccctactggtccacttcatattggaggtgtcagaacagctttatttaattggttgttggctagaaaaaataaaggcaaattttttcttagaatagaagatacagataaagagagatcaaaagatgaatttaaaattcaaattatcaattctttgaagtggttaagtattgattatgacggaaatgaatatgttcaatctaaaaatatttctaagcatgtttctgtagcggaagaacttgttaaaaaaggatttgcatatgaatgttattgttcggaagcagaaataaatgaacaaaaagaaaaatgtaaaaaacaaggtattccttatgtttacaatagaaaatggagagactctaaagatttaaagataccaaaagatattaaaccagtaataagattcaaaagtaaaatttctggaaacagtgctatcagtgatttg

SEQ ID NO: 299712 - DNA, 777 bp, Unknown
  Bacterial polypeptide expressing nucleotide sequence isolated from the Sargasso Sea
aattcaataattgaggattttgttattttaagacaggatggctctccaacatatcaactatccgccacagtagatgacaatgcaatgaaagtatcacatgtaattagaggtgatgatcacaagattaatacatttaaacaaaaacaaatttatgaggctatgaaatggagtattcctgaatttgcacatattcctttaattcatagtgaaaaaggatctaaactttctaaaagagataagtcatcaacaattgatgattatgttaaaattggaattttacctgaagcccttagaaattacctattacgattaggttgggcatataaagataaagaaattttcactttagacgaaagtattcaactctttgacttaaagggtgttggaaaatctccttcaaaacttgacatgtctagaatactctcgctcaacgaacattatattaaaaatatggatgaaaaaattctttttaattttttaaaaaaatatgctcaaaattttaaaaaagctattaattcatctaaagaagactcaattataaagtctataaatttccttaaaaataaagcaaaaacccttgatgatatttaccaaaattcacaatatatacttaacgacgaagtaaagattgcatcagaggatattaagctattagatacaaatgctaaaaaaattaccgttgagtttcttgaagaatttaagaagatgaaagcggtaaataaagaaattcttgaaaaattgatcaataacttaattagtaaacacaaaactaacttt

SEQ ID NO: 299713 - DNA, 316 bp, Unknown
  Bacterial polypeptide expressing nucleotide sequence isolated from the Sargasso Sea
atgacgtttttaactaggtttgctccctctcctacagggtacttgcacgtgggtaatattagaacggcactatttaattttttgctttcaaaaaaaaatggtgggaaatttttacttagaatagatgatactgaccttgaaagatcaaaacaaatttatgaagacgaaattaaaagagatttagagtggctaggaattgaatgggacttatatgagaaacaatccaatagatttgaaaggtatatcgatgtttttgaaaatttaaaaactgaacataaaatctatccttgttatgaaacaaaaagtggagcttaac

SEQ ID NO: 299714 - DNA, 525 bp, Unknown
  Bacterial polypeptide expressing nucleotide sequence isolated from the Sargasso Sea
catgaaaaaagtagcaactagatttgctccttctcctaccggtcctcttcatattggtggagtaagaacagctctatttaattggttatattcaaaaaataaatcaggtaaattttatttaaggatagaagatactgataaagaaagatctaaagaagaacataaaattcaaataattaattctctagaatggatgggaattaaacacgatggtgaagagtatattcaatcaaaaatgattgctgaacacgtagctattgctaaaagattattggaaaatggaaatgcctataaatgcttttgtagtgcagaggaaatagaggaacaaaagaaaaaagctaaacaaaaaaaaattccttatgtgtataatcgaaaatggcgtgatatttctgaagatcaaactccaaaagatataaagccagttataagatttaaaagtaaaatagaaggcacttctctactaaaagacttagttcaaggagacgtagagattgaaaataatactattgaggattttgttatttt

SEQ ID NO: 299715 - DNA, 185 bp, Unknown
  Bacterial polypeptide expressing nucleotide sequence isolated from the Sargasso Sea
catgaaaaaagtagcaactagatttgctccttctcctaccggtcctcttcatattggtggggtaagaacagctctatttaattggttatattcaaaaaataaatcaggtaaattttatttaaggatagaggatactgataaagaaagatccaaggaagaacataaagttcaaataattaactctc

SEQ ID NO: 299716 - DNA, 544 bp, Unknown
  Bacterial polypeptide expressing nucleotide sequence isolated from the Sargasso Sea
catgagttcaatcaaagtccgttttgcgccaagcccgactggccgacttcatgttggtaatttacggacggctatagtgaattacctttttgcgcgcaaaaatgacggcagctttatgttgcgtattgatgataccgatgacgaacgatcatctgccgaatttgagacagctattcgtgaagatttgagctggatgggaatggactgggattatgaagaccggcaatcagcacgtcttggccggtatgatgagacattggcccagctggtccaagctgggcgagcctatgcttgttatgaaacgccagatgaattatcgctgaaacgcaaggcccaactgtcggctggacggccgcctatttatgaccgtgcaggattgaaattaaccgatgaagataaagcaaaattagaagcagatgggcgtcggccccattggcgttttttactgaatgatgcagaggtcagttggcatgacatggtgcgcggtgatgttgcctgtcatatgtctagcttgtcagacccggtggtaatgcgcgaagacggg

SEQ ID NO: 299717 - DNA, 673 bp, Unknown
  Bacterial polypeptide expressing nucleotide sequence isolated from the Sargasso Sea
atgagttcagtcaaagtccgtttcgcgccaagtccgaccggccgacttcatgttggcaatttacggacagctttagtgaattatctttttacgcgcaaaaatggtggcgtatttatgttgcgcattgatgataccgatgaagaacgatcatctaacgaatttgaaacagccattcgtgaagatttgggctggatggggatgggctgggattgtgaagaccggcaatcagcacgccttgaccgatatgatgaggcattgacccagttgatccaagctggtcgtgcctatgcttgttatgaaacttcagatgaattatcgcttaaacgtaaggcccaattgtcggctgggcgcccgcctgtttatgaccgtgccggattgaaattaaccgatgaagaaaaagcaaaattagaagctgacgggcgtcggccccattggcgtttcttactgaatgatgttgaggtcagttggcatgatattgttcgcggtgatgttgcctatcatatgtctagcctgtcagacccggtcttgattcgtgaagacgggcgagtgatttattctctggcgtcggtagttgatgatattgaccacggcatcacccatatcatccgaggggaagaccatgtcacaaattccgccgcgcaaatacagctttttgaagctctcggtagcgccg

SEQ ID NO: 299718 - DNA, 240 bp, Unknown
  Bacterial polypeptide expressing nucleotide sequence isolated from the Sargasso Sea
ccctggcgtgaccggacagaccggcccgatgcggcttttgtcgttcgcatgaagatgccagatgacggcgtcatgaccatcgaggatgccgtgcagggaagcgtgaccgtgcagcacgcaaagctcgacgacatggtaatactgcgtgccgacggcagcccaacctacatgctcgccgtagttgtcgatgaccatgacatgggcgttagccatgtcattcgcggtgatgatcacctgaac

SEQ ID NO: 299719 - DNA, 715 bp, Unknown
  Bacterial polypeptide expressing nucleotide sequence isolated from the Sargasso Sea
ataagagttgaggatactgacagagaaagatcaaagaaggaatatgaagaagacataatatctggattagaatggcttggtatatctcctgataaaacaccaataagacaatcagaaagatcagatatgtatcaaaaagctgctgaaaagctcattgattctggaaatgcctattggtgcgattgttccccagaagatttagaagaaatgcgtgaacagcaagccgccgcaggtaaaaagccaatgtatgatggaagaagcagaaaccttggccttgaaagatcagacaaaactgttcttagattaacaacgccacttgaaggagaaacgatagtaaatgatttaatacgtggcgagataacttttaacaatagtgaattagatgatctaattctattgagaagcgatggtactccgacataccatttctgtaatgttgtcgatgatttcgatcagggtgtaaccacagtaatccgaggggaggatcatattagcaatacaccgagacaaatccatatccagaaagcacttggctatccagatcttgagtatgctcacttacctttggtgctgggtgaagataaaaaaaggctttcaaaaaggcatgctgcaactagcttaaatgcctataaagaaatgggatttacaaaagaaacaattataaatgccttagcattgcttggttggtcaactgaaaatgaaattttttcaattg

SEQ ID NO: 299720 - DNA, 781 bp, Unknown
  Bacterial polypeptide expressing nucleotide sequence isolated from the Sargasso Sea
aaaggggctgaaaataaattgacaagtatgttggaatggtccggcattgaaattgatgaaggtccgcaacatggagggatacatggaccgtaccgtcaatctgagcgcctggatatttacgctcaatatatcaaattattacttgacgagggtaatgcatacaggtgcttttgcacatcagaacgtcttgaaaaactaagaaacgagcaacgcaataaagggaatacctcgcgttatgatggattttgtagaaatctatccaaatcagaagcatccaggcgaactgcatcaggagagaattacgttgtacgtatgaaaattccgaaagttccggaaactatggtactgaatgatttaatccgtggaattgtttccattgaaaccagccagtcagaagatcaggtcatagttaaaagtgatggattccccacatatcacctggcggtggttattgacgactacttgatgaaaataactcatgtagtacgcggcgaagagtggattccatcatttccaaaacatcttttgctttaccgctattttggctgggatcccccgcaattcgcacacctccccttaatattaaatcctgatcgttcaaaactcagcaaacgccagggagatgttgctgtagaagacttcatgaataatggatttcttccggaatcattggtgaattttgtagccatgcttggctggtctcctggagaagataaggagttgtttactctcccagaattgattaaagaattcagctttgaacgggtaaacaaatccggag

SEQ ID NO: 299721 - DNA, 514 bp, Unknown
  Bacterial polypeptide expressing nucleotide sequence isolated from the Sargasso Sea
atgataatcactagattcgcaccctcacctactggaaattttcatatgggaagtttaaggactgcaatttacaattttttatttgcaaaaaaaaataaaggaaaatttcttttaagaatagaagacacagataaggaaagatcaaaaaaaatatatgaagaagaaatattaaaaatatttaatacatttaaacttcaatatgacaatcttagttatcaatctaaaaatttaggtattcatcaagaatatttagaaaaactgatgtcaaatgatatggcgtatcgttcaaaggatggtccttataagttcagagtgaacagagataatgaattttttgagtatgatgatttaatattaggaaaaattaaagtaccatctaatactatagaagatttttcagttgcaagatctgacaaaagcccaacttttatattatcaaacttagttgacgataatttagagaatgtgactaatgttattcgtggaaacgatcatactactaattcaattaaac

SEQ ID NO: 299722 - DNA, 193 bp, Unknown
  Bacterial polypeptide expressing nucleotide sequence isolated from the Sargasso Sea
atgaagccccgtctaagatttgcaccaagcccgacaggacaattacatcttgggggagctaggactgctttatcaaattatttatacgctaagaaaaatggcggacaatttttagtgaggatcgaagatacagatatagaacgctcaaaaaaggaacacatagatcaaatttgtaattcattacagtggctgg

SEQ ID NO: 299723 - DNA, 473 bp, Unknown
  Bacterial polypeptide expressing nucleotide sequence isolated from the Sargasso Sea
attgaataattcagtaacaagatttgctcctagtccttcgggcttacttcatgtagggaatgtaaggactgcattgcttaattttttggtttcaaaaaaaaataatggaaaatttattttaagaattgatgatactgatcaagaaagaagtaaggataaatatatagatagtattaaagaggatcttagttggcttggcttgaattatgatgaatgttatcagcaatcaaatagaattgaactttatgataaggcatttgatattctgaaaactaaagatctaatttatccttgttttgaaacgcccgatgaattagataaaaaaagaaaaagattaattacaagaaggatgccacctgtttacgatcgagccgccttaaaacttaaacaagatgaaataaaatcattattggattctggaaaaaaaccatattggcgatttaagctttcaagtaaaaaagttaaatttaaag

SEQ ID NO: 299724 - DNA, 116 bp, Unknown
  Bacterial polypeptide expressing nucleotide sequence isolated from the Sargasso Sea
tatggaaataagaactagatttgcaccctctcctactggagatttgcatcttggaggagctaggacagctctttttaactatctttttgcaaaaagtatgaagggaaagttccttg

SEQ ID NO: 299725 - DNA, 751 bp, Unknown
  Bacterial polypeptide expressing nucleotide sequence isolated from the Sargasso Sea
atatgaagcactgcaatgggaaaagcctttatttgcacacatacctttaattcatacattggaaggtaaaaaattatcaaaaagagataatgcttcaacaattgatgattacgaaaaaattggaattatgcctgatgccctaagaaattatcttatgagattaggatggtcttataaagataaagaaatattttctctggaagaaagtataaaatattttaatttagaaggtattggaaaatcaccttcaaaacttgatatgtcacgaattttatcaatgaatgagtattatataaaaaataaaagtaacgatgatcttttccaaagtttcgaggaatattgtaaaaattttaaggaaaatattaacaatgaaaaactaaatattataaaaaaatcattaacttttttaaaaaataaagcaaaaacactggaagacatttataacaattcaaaatttattataaatgatgagataattattgaaaaagctgaaatgagtttactaactgaaaatgcaaaaaatataatcaaatctttcatgaaaaaagtaaatgaaatagaagtttttaataaagaaacattagaaccaataataaataatttaatatctgagaatcaaacaaactttaaaggtgtaggacaaccattaagaattattttaacaggttcaaaatttggacctggaatatatgatattataatatctttaggaaaaaaaagagttttagatagattaagtaaggtaggataa

SEQ ID NO: 299726 - DNA, 888 bp, Unknown
  Bacterial polypeptide expressing nucleotide sequence isolated from the Sargasso Sea
aaatactataattaaagatttagtacagggcgacattaatatatcaaattcgattattgaagattttgttatattgagacaagacggatctccaacttatcagttgtccgcaacagttgatgatcattcaatgaaaatttcacatgttattcgaggtgacgatcataaaattaatacttttaaacaaaagcaaatttatgaagcaatgaaatgggatattcctctatttgcgcacatacctttaattcatagtgaaaagggatctaagctctcgaaaagagataaatcctcgactattaatgactatgttaaaattggaattttacccgatgcacttagaaattacctgttgcgactaggttgggcatataaagataaggaaattttttctctagatgaaagtattaaactttttgacttaaaaggtgttggaaaatctccgtcaaaacttgatatgtctagaatactttcacttaatgaacattatattaaaaatatagatgaaaaaattctttttgattttttaaagagttatgctcaaaagtataagaaaactatcgatccatataaggaagatgttgttattaagtgtttaaatttcctaaaaaataaggccaaaactcttgatgatatttaccagaattcacaatacatactaagcaaagaaataactatttcccctgaagatttgaagcttttagatgctaattctaagaaaattattggtgatttcctaaatgaatttaaaaatatcaaaaacccgaataaagaaaatcttgaaaaactagttaatagtctaatcactaagtacaaaactaactttaaaggtgttggtcaaccactaagaatagctttagtgggtttcagatttggtcctggtatttataa

SEQ ID NO: 299727 - DNA, 1003 bp, Unknown
  Bacterial polypeptide expressing nucleotide sequence isolated from the Sargasso Sea
aggcaaaaacaggtaaaacggacaggtttgaaagatttgccaaatgcaatccatggcaacgttgtactaagatttgctccaaatcctaacggtccgttgacactgggtcatgcaagaggagtaacgataaattcagagtatgccaaaatttatgatgggaaagttgttctaagatttgatgatactgactctaaagtcaaacctcctctaaaagatgcataccattggatcgaggaggattacgaatggttaacaggcaaaaaacccgatgtgattgtcagggcttcagaaagaatggatgtatacatggattatgctgtaaggatgttaaaagataactttgggtatgtttgcacttgtcctgcagaagtcttcaaggaattaagagataactcagaggaatgcccctgtagaaataaagaaacaaaggagaatctatctgattgggaaaaaatggaagagggggtacttgaggaaggaatggcggttgtaagagtgaaaacggaaatgaatcttccaaatcctgcacttagagattggcccgcattgagaatacaacatacctctcatccaatggtaggggagaaatacaaagtgtggccattattagatttccaaagtgctatagaagactatgagcaaggagttactcatattattcgaggaaaagacctcatggattcaactagaaaacagaccctgttgtacaaccattttggctgggattatccagaaacattgtattggggtagagtaaaaatacatgaatttggaagattctcgacttctggtatgagaaaagaaatagaaaataagaattattccggttgggatgaccctcgtttgcctactctcagagctcttcggagaaggggttttgattctgaagcaatgaaagatttttggatagatttaggactaactcagaaagatatttcagtatcgctaaagacaatagaatcatttaattcatctaaaattgattcgaattgtgagagaagag

SEQ ID NO: 299728 - DNA, 244 bp, Unknown
  Bacterial polypeptide expressing nucleotide sequence isolated from the Sargasso Sea
catgaaaaaagtagcaactagatttgctccttctcctactggtcctcttcatattggtggagtaagaacagctctatttaattggttatattcaaaaaataaatcaggtaaattttatttaaggatagaagatactgataaagaaagatctaaagaagaacataaaattcaaataattaattctctagaatggatgggaatagaatatgatgggagaggagtatattcaatcaaaaatgattag

SEQ ID NO: 299729 - DNA, 178 bp, Unknown
  Bacterial polypeptide expressing nucleotide sequence isolated from the Sargasso Sea
atgaataaagaaaaagttttaactagatttgctccaagcccaactggtaaattgcatattggaaatatacgatcagcaattttaaattgggcatatgcaaaaaaaaataatggaaaatttatattaagaatcgatgatacagatgcagaaagaagcaaagaagaatttattgtatgat

SEQ ID NO: 299730 - DNA, 170 bp, Unknown
  Bacterial polypeptide expressing nucleotide sequence isolated from the Sargasso Sea
aatgtcccaagttgtaactaggatagctccctctcctactggtttcatgcatattgggactgcaagaacagctttatttaactggctatatgcccgcggtagaaatggtaaattttatattcgcatagaagatacagatcgaaagcgatcaactgcagaggcaaatgaag

SEQ ID NO: 299731 - DNA, 675 bp, Unknown
  Bacterial polypeptide expressing nucleotide sequence isolated from the Sargasso Sea
cagtaggtacacaagcctatcgagatcttggatatcttccaacacatttaattaattatttagctcttttaggatggaacccaggtactgaagacgaggtctttaattttcaatttttaatagataatttttcccttgagaatgttaataagaaagctgctgtttttgataacaaaaagttggattggttaagcggacagcatattatgagaagcgaatcagcggatttactggattcaataagatcaataaaaccagattgggaagttgatggcttatcagatcagtatttctattcaataatttcacatttgaaaggtaggtcaaaaactcttttggatatcataaaccaatctgaatattttttcaaagaccccataaaatatgatcaaaatgcagtcgcaaaatgttggaataaagatacatctgaattattaaaatcatttactgaaaaagtcctagcctacttggattgggaagatgaatcaattgaaacatgtataaatgatttttcagaaaaaaaatgtgttagcaaaggtaaattaatacaaccacttagggtttccttatgtggttctcttactggtccatcaatggctgacctgatgaaacttctgggtaaggaaacatgtatccgaaggataaataacctactaaatattcttagcaaataat

SEQ ID NO: 299732 - DNA, 436 bp, Unknown
  Bacterial polypeptide expressing nucleotide sequence isolated from the Sargasso Sea
atgtcaaaagtagcaactagatttgctccatcccctactggacctttgcatatcggaggtgtaagaacagctttgtttaattggttatattctaaaaatcaaaatggtaaattttttttaagggtagaagatactgataaagaaagatcaaaagataaatataaaaatcagataatacaatctttaaaatggataggtattaattatgatggtgaagaatacatacagtcaaaaaagattgatgatcatataaaagtagcaaacgaattattaaaaaatggtcatgcgtataaatgttattgttcaagtgaagaaatagaggagcaaaaaaaaaggtctaaacaaaaaaaaattccttatatttatgatcgaaaatggagagataagaaagaaagtgatgctcctaaagatattaagcccagttataagatttaaa

SEQ ID NO: 299733 - DNA, 726 bp, Unknown
  Bacterial polypeptide expressing nucleotide sequence isolated from the Sargasso Sea
tcaaggagacgttacagtagcaaatttagagttagatgattttattttactaagaaaagatcaatcacccacttatatgttatctgtagtagtggatgatcatgatttaggagtcaattatattattagaggtgacgatcattttattaatacctttagacaatactacatatataaatttatgaattgggatatacctcaatatgctcatattcctcttatacacggagaagatgggacaaaattatcaaaaagacatggtgccgtaaatattttagatttaaaaaaagacggttatttaaaagaagcaattattaacaatcttatacttttaggttggtcaaataaccaagagaaatcagaaactattgaattagaggaaataattgaaaattttgaaatatcaaatttatctaaatcatcttgtatatttagttttgataaattagatttttttaataatttttatttaagaaaagaaaacggaatagaaaaattcataaacttttgtgaaagtgatgttgaattaaataaatatctacaaaaagatgagacaaaaatgaaaaatatatttaatgtttataaaaaagatattaaaaaactaagtgattttaatgatacaattaaagtttattttgatgaaaattataaaataaataagacagaaaaactgacctcagaatttgatagttttcttaacgaatttttaaatttagttgcagaaat

SEQ ID NO: 299734 - DNA, 626 bp, Unknown
  Bacterial polypeptide expressing nucleotide sequence isolated from the Sargasso Sea
tttggaaaaacgtttaagattagcccctagtccaacaggtttatttcatattggtacagcacgtacagcattattcaactggttgtatgcacaaaaagtaggcggaaaatttcttatcagaatagaagatacagattttcttcgatctaaatctgaatatacagaaaatatattagaaggtttgaaatggcttggacttaaatgggatgaagaacctatcaagcaaagtgaccgaatatcaattcacaaaagttacatcaaaaagcttttggactgtggagctgcatataggtgctttacaacagaagatgaaatctctgaattaagagaagaacaaaaaaagaaaggattacctccaaagcatgataatagacacagaaatctttcaaaagaagaaatagaaacatatatatctcaagggagaacctcagtaataaggtttaagattgatgaaaaaattcaaattacatgggtagatcagataagaggcgaaatcaaatggcaagggaaagacttaggtggtgatttggttttgtcaagaaggtcaaaggattatgagattggagatcctttgtataatttggcagttgtagttgatgataatttcatgaatatcactcatgtag

SEQ ID NO: 299735 - DNA, 403 bp, Unknown
  Bacterial polypeptide expressing nucleotide sequence isolated from the Sargasso Sea
gtcactgccagaggttgtgaccctgctggccgagcgctgcaacaccctggtcgagatggccgcccagagccgctacctgttcgaagagtacgaggccatcgacgaagcggctgccaagaagcacctgcgcggggttgcggctgagccgctgatcctggcaaaaaccaagctggctgccctggatagctggaccaccgaagcgctgcacgagctgattgaagccactgccgccgagctgggtcagggcatgggcaaggtcggcatgccgctgcgcgtggccgtcaccggtctgggtcaatctcctggcatcgacgccgtgatggcgctggtgggcaaggagcgggtactggcccgcatcgatcgcgccctggcatatatcgaagcgcgcatggccgccgagtaa

SEQ ID NO: 299736 - DNA, 721 bp, Unknown
  Bacterial polypeptide expressing nucleotide sequence isolated from the Sargasso Sea
ctcatatttctctaataatggagaagatggttctaagctatctaaaagacacggagcaataaatataattgatttaaagaaaaaaggttatttgcctgaagcaattattaataatttaatcttacttggctggtctcccaaaaatcaacaaaatgaaataatttcattacaagagatcattaacaaatttgacataaaagaaatttcaaaatcatctagtatttttagttttgataaattgaatttttttaataattattatcttagattagaaaaaaatttaaattattttattgattattgtaaaaaaaatgatgagttaaatctttatttaaatgaagatcaaaataaaatgttgagattgtttgaaatatacaaaaaagatctaaattattatgaagaaatattaaaatatacaaagatttattatgatgaaaattatgaaataaaccaagatcatgaggagtttgatataatttttgaaaataattttagtatttttttagatggtttatcaaatcttgaaaattggagtaaatatgaaattgaagaatttgtaaaaaattttttaaaacaaaaaaatataaaatttccaatatttgctaaaccgttaagatttattttaactaattattatcaagggccatcaataagtgatattttttacattttaggtaaaaaaaatacccttagaagactaaatcaatatataaaagattaa

SEQ ID NO: 299737 - DNA, 148 bp, Unknown
  Bacterial polypeptide expressing nucleotide sequence isolated from the Sargasso Sea
gatgtcaaaagtagcaacaagatttgctccgtctccaacaggagctcttcatataggtggggtcagaactgccttatttaattggctatattccaaaaatcaaaaaggaacatttcacctaagaattgaagatactgacaaagaaaga

SEQ ID NO: 299738 - DNA, 188 bp, Unknown
  Bacterial polypeptide expressing nucleotide sequence isolated from the Sargasso Sea
catgagttcagtagcaacaagatttgctccctctcctacaggaccacttcacattggaggtataaggacagctttgtttaattggttgttttcaaaaaataataaaggaaaattttatttaaggattgaagatactgataaagaaagatcaaaagatgaatataaaaatcaaatcattcaatcattaa

SEQ ID NO: 299739 - DNA, 907 bp, Unknown
  Bacterial polypeptide expressing nucleotide sequence isolated from the Sargasso Sea
ctttattcattatattctttgctaagaaacatggctggagaatttttactgcgtgtagaagatactgaccaagagagatctaaagctgaatataccgatgcaattattgaaggtttacattggctaggattaatctttgatggcagtcctacatttcagagccaaagatcagaattatataaacaagagattgataggctcttatcagatggtaaggcttaccgatgttcatgcagtccagagaggctagatgctttacgaaaagaacaagaatctaaaggtttaaagcctatgtatgatggtttatgtcgcgacaaaggcattactgatgaaaatacagtcgtaaggcttaaaacaccaacagaaggatcaactatcgtagatgatgcagtctatgggaagattgagtttcttaacaaagagcttgatgatttgattattcagagatccaatggaacaccaacctaccacctgtgtaatgttgttgatgataatgcacaaggagttactcatattattagaggtgaggatcatctaccaaacacaccaagacaaattcaaattataaaagcactaggatatgatggtttcaattacgcacacctaccgttagtcctgggcgaagataaaaaaagactctcaaaaagacacgctgcaacagacttgatggcgtacaagaaattaggttacttgcctgatgcaatattgaacatgttggctagactcggttggtcaaaaacagaaaaagatatattttcaatggatttcttgatggaaaatttagagctcgaggacattcaaagatctggagctgtgtttgatatagaaagattaaattttattaatcaaaatcatattagcgaacttagtgataaaaaacttttagaagaaattaagcctttttaat

SEQ ID NO: 299740 - DNA, 876 bp, Unknown
  Bacterial polypeptide expressing nucleotide sequence isolated from the Sargasso Sea
cacagataaaaaaagatcaaagcaagaatttgttcagaatatatacaatggtttaaaatggcttggtattgagtgggaaaaaaatattcagatacaatctaaacaaatatcaaggcataaagaaattgcaaataaattattagaaaaaaacctagcttataaatgtatttgttcagaagacaaacttcaacaaaaaagagagcaaataaaaaaaaataaaaatttatccaaaaaaatttgtactggatgtaagaaagatgcccagatacaaaacttgtctgctgattttgttgtaagaataagccttccagatgaaggtgaattagtaattaatgataagattcaaggagaagttcgtgtaaaaaataatgaattagatgattttatattattaagaaaagatcaaacccctacctatatgttgtctgttgttgtggatgataatgatctaggagtaaatttaattattagaggtgatgatcacttgaataacgcctttagacaatactatatttataaatatctaaattggaatattccggaatatgcccatataccattagtacatggagaagatggagctaaattatctaaaagacatggagccgttgatgttttagattttaaaacaaaaggttatttaaaagaagctattattaataatattatattactaggttggtcgccaggaaataaaaatgaaataattagtattaaagaaattataaatttgtttaaaataaacaaattatcaaaatcctctagtatatttagctataaaaaattaaattttttttataactattatctacgtaatgatacaggatttaaaaaatttgaaagtttttgcaaagataatgaagatcttagaacttt

SEQ ID NO: 299741 - DNA, 487 bp, Unknown
  Bacterial polypeptide expressing nucleotide sequence isolated from the Sargasso Sea
atggcaaaagtgattacaagattcgctccaagcccaacaggaactttgcatattggaggtgtgagaaccgcattatttaattatgtttatgcaaagcaaaataatggccagtttttaataagaatagaagatactgacagagaacgttcaacaaaagaatttgaagaaaatatattaagtaatttgaactcgatagggcttaaacctgatcaggagccaattaatcaatctgaaagaaatagtatttatattgctgccgcagataagttaattgattctaaaaaagcatattggtgcgattgttcacctgaaactcttgaacaaatgcgagctgaacaaactgcagctggtaaaaagcctatgtatgatggaagaagtagaaaccttggactagaaagatctgaaaatactgttttaagacttgcaacaccaaatgaaggagaaattattgtaaatgatctaataagaggtgagattaaatttaata

SEQ ID NO: 299742 - DNA, 852 bp, Unknown
  Bacterial polypeptide expressing nucleotide sequence isolated from the Sargasso Sea
ggcataagatttaaaagtaaaattgatggatccactatattaaaagatttagttcaaggagatattgaaatagaaaataatactatagaagattttgttatattgagaaatgatggatcaccaacttataatttgtctgcttctgtcgatgatcatcaaatgaatataagtcatataattagaggtgatgatcataaaattaatacatttaaacaaatgcaaatttatttagctatgaaatgggaactaccttctttcgctcatataccattaatacatacaactgaaggtaaaaagctttctaagagggataaagcatctacattagacgattattcaaagattggtataatgccagaagcattgagaaactatcttctaagactaggatggtcttttaaagataaagaaatttttactgaaaatgaaagcattcaacactttaatttagagggaataggtaaatctccatcaaaacttgatatgagccgaatattatcaatgaatgaacattacattaaaaatatggatgaaaataagctttttaatcaattaacaaaatactgcgaaatttataaagaaaaaatacctagcgaaaaagaagataaaattaagacttcattggtatttcttaagaacaaagcaaagactttagaggatatatataaaaattctaaatatataatttacaataaaattactattaataaagatgacattaaactattagatgataatgcaaaaaatatagtatctgaattttcaaatagtatttcaaatatagaaaaattaaataaagaaaacttagaaccaattattaatcatctcataaaaaaaaacaatacaaacttc

SEQ ID NO: 299743 - DNA, 406 bp, Unknown
  Bacterial polypeptide expressing nucleotide sequence isolated from the Sargasso Sea
gatgaaaaaagtagcaactagatttgctccatctcctactggacctttgcatattggtggtgtgagaacagctttatttaattggttatactctaaaaaccaaaaaggtgatttttatttaagagttgaagatactgacaaggaaagatcaaaagacgagtataaagatcaaatagtaaaatctcttaaatggattggtattaattatgatggagaagaatatatacaatctaaaaaagttgaaaatcatattcaagtcgcaaatgaattacttaaaaatggtaatgcatacaaatgttactgctcaagcgaagaaatagaagaacaaaaaaaaagagcaagacaaaaaaaaattccttatatttatgacagaaagtggagagacaaaaaggaagctgatgcacct

SEQ ID NO: 299744 - DNA, 745 bp, Unknown
  Bacterial polypeptide expressing nucleotide sequence isolated from the Sargasso Sea
gaagcaatgggttgggaggttccaaactttgcacacattcctttaattcatagtgagcaaggaaagaaattgtcaaaaagagataacgcttccactcttgaagattatattaaaataggagttatatcagacgctttaagaaattatttattaagattaggatggtcatacaaagataaagaaatttttactaagcaagaaagtattgatttatttgatttaagtggtgttggaaaatcaccttcaaaattagatatgaataggatttattcaataaatgaaacgtatataaagagtatcgatcagaaagatctttttaatttttttagagaatatgtttcaaaatacaaaaaacctttaaatcaatcaaaagaaacaattcttttaaaatctatgggttttttaaaaaataaggcaaaaactttagaagatatttggaataatgctcaatatattatcaaagataaaattgagattaatgcagatgataaaaaattaattgatgatttatcaaaaaaaataataactgaatttattaacgaatatgaaaaactttcctcattatctagagaaaatttagaacctttaataaagtctctaattgataaacataaaactaattttaaaggtgtaggacaacctttaaggatagcgctagttggctcaagatttgggcctggtctttatgatgttattctctcattagataaagctgaagtgcttaaaagactaaaacaaatttaat

SEQ ID NO: 299745 - DNA, 764 bp, Unknown
  Bacterial polypeptide expressing nucleotide sequence isolated from the Sargasso Sea
aatggctggaaaagaaattttaaaagatgtaattcaggggcaagttgaagttaataatactgaaatagatgactttgttcttgtccgaaaagataacactccaacttatatgttatctgtggtggtagatgatcatgacttaggtgtaaattttattattagaggagatgatcacttaaataattattttcgtcaaaaatttatttaccaacatatggattggaaaattccacaatatgcacatataccattgatacatggggaagacggtaccaaactatctaaaagacatggggctgtaaatttaattgatttaaagaatgctggctatttaccaagtgcaataataaataatttaattttattaggttggtctcctaaaaatcaagataatgaaatcatagaactaaccaatataatttctcaatttaaaatcaaaagtttatcaaaatctgctagtatttttagttacaaaaaacttgatttttttaacaattattttttaagacttgactctaacacaaaattatttgaagaattttgtaaatcaaataaaatattaagagaatactttgccttagataaagaaaaattaatcaaagtgtttaatgtatataaaaaagatatttcaaaatatattgaaataataaatattgcagcaatttatttttctaaaaattttagaaaatattctgatgaaaaatttcaagatgatttcaataatatatatattaaatttttagaactaattattaatattaata

SEQ ID NO: 299746 - DNA, 836 bp, Unknown
  Bacterial polypeptide expressing nucleotide sequence isolated from the Sargasso Sea
caaattaccgatgctctttcttggctaggtcttaattgggatgaagacattgtgcttcaatctaaaaacaaatccagacatcaagaaatggtagaaaaaatgcttgataacggtacagcctaccgttgttttcttcaaaaagaggagcttgataatttgcggttagcatctgaacaaaaaaaagaagtatttcgtgttccgcaaacgtatagagatttatcagaaaacaaagtgcaagaattgcttaatcaaggcaaatcatttactataagattaaaagttccaaaaggtgaaacagaatttactgatttagtatatggtacaatcaaggttcaaaataaagatttagatgactttatcattgcaagatctgatggatcacccacctataattttgtagtagcagttgacgactcagatatgaatatttctcatgttgttagaggagatgaccatttagcaaacacgccaaagcaaattcttgtttatagagccttaggtttaaatgagcctatttttgctcacttaccaatgattctaggttcagataaaaaaagattaagtaaaagacatgccgctaccaatgtgcaagagtataaggataaaggatttactgcaaccgtaattctaaattatttatcgttattaggctggaatcctgattccgataaggaaatattttctaataatgaattaattgaaagttttcaatttgatcaagttcaaaaaaaatcagcagtttttgatgaaaaaaaattattatggatatctcaacagcatttaaccgaaatgagtgttagagatgcaatgaatgaaatttataagctgaatccaga

SEQ ID NO: 299747 - DNA, 685 bp, Unknown
  Bacterial polypeptide expressing nucleotide sequence isolated from the Sargasso Sea
aatgaaggttcgaacgcgttttgcacccagtccgacaggtccagttcatattggaaatatacgtgtagcaatttataattggcttttcgctcgtaatcataatggttcatttttactaagggtggaagatacagatcatgtacgttctactcctgaagcaattcaaatacttttagatacacttaattggctaaatattagtgttgatgaggagcctctttatcaaagtactcgaattaaagatcatttaaatgtggcagaaggtctaattcaaaaaggctttgcatatagatcgaaaaagggggatgcggagaatggtgaatgtatactttttcgtatgtctgataaggcaatctcttttactgattcaattaagggagatttaagtaaaggtgctgatttaatagaagattttgttatagttagatctaatggcacaccagtcttccatttggccaatgttttagatgatatcgagcaaggtataacacatgttattagaggagatgaccatgtcgaaaatacttataagcacattgcgttataccaagcaatgggagcaaaagttccgatatttgctcatttaccaatgattacaaatagtaatgggaagccatattctaagcgtgatggagatgcattcgttggtgattttcgtaaaaatggttttctaagtgatgcgcta

SEQ ID NO: 299748 - DNA, 109 bp, Unknown
  Bacterial polypeptide expressing nucleotide sequence isolated from the Sargasso Sea
atgggaaaatcatctgtcagagttcgattcgcacctagtccaaccggagaactacacttaggtggggccagaaccgctttatttaattggttatttgctaaaaatcaaa

SEQ ID NO: 299749 - DNA, 748 bp, Unknown
  Bacterial polypeptide expressing nucleotide sequence isolated from the Sargasso Sea
aatgaattggaatttgccagcatttgctcacattccactaattcatactatagaaggaaaaaagctctcaaaaagagataatgcttcaactttagatgactattctaaaattggtattatgcctgatgcattaagaaattatttactaagacttgggtggtcttacgaagataaagaaatttttacattagaagaaagtatcaaattatttaatttagagggaataggtaaatctccatcaaaactagatatgagtagaattttatcaatgaatgaacattatataaaatcaatcgatgaaaatgaattatatcaacaacttgttagttattgtgaaaaatacaaagaaaaaattaaatctgaaaaagaagcaaagattaaaccatcattgtcctttcttaaaaataaagcaaaaacactagaggatatatacaataatgcaaaatttataattcatgatgaagttaaatttaatgatgaagatttaaaattaatagatgaaaaagctaaaataataataacagaattcaaaaataaaattttagcaatagatgaatttaagaaagaaacattagaacctgtagtaaacgaattaattaaatcacatggaacaaattttaaaggtgtgggtcaacctttaagagttgcattgacaggatcaaaatttggaccaggtttatatgatattataatttcattaggtaaagaagaagttcaaaaaagattaaatagtcagataattatttaa

SEQ ID NO: 299750 - DNA, 529 bp, Unknown
  Bacterial polypeptide expressing nucleotide sequence isolated from the Sargasso Sea
ttgtttgcaaaaaatacaaaagggaaatttttgttaagaattgaggatacggataaagcaaggtcaacaaaagattccataaataaaatactcgatgggttaaaatggctcgatcttaaatgggatggtgaaattatatatcagtctaaaaaacaaaagagacattctgaaatagctaatgaacttttagataaaggccttgcgtacaaatgtttttgttctgaagacgatttgaataaaatgcgagaagatgcaaaaatattaaaaaaaccgtttcgttataatagaatgtggagagataaaaatcctaatgatgctcctaaaggtgttaatcctgttattagaattaaagctccaactaaaaatgaaactgttataaatgatattattcaaggaactataaaagtttctaatgaagaaatggatgattttattatcatgcgctcagatgggacacccacttacatgttgtcagttgtagtggatgatcatgatatgaatgttactcatattgtaagagagacatgat

SEQ ID NO: 299751 - DNA, 91 bp, Unknown
  Bacterial polypeptide expressing nucleotide sequence isolated from the Sargasso Sea
tatggatgtcgttactcgattcgccccatccccaacgggcatcttacacattggaagcgcgcggactgccttatttaattggctctacgca

SEQ ID NO: 299752 - DNA, 699 bp, Unknown
  Bacterial polypeptide expressing nucleotide sequence isolated from the Sargasso Sea
agagatttaataaaaacaaataaagatatttccaaaaaaatttgtacagaatgtaaaaatgatactgatatccaaaatttatctgaaggttttgtaattagaatcaaacttcctgataatggggaactattaattaaggacaaaattcaaggagatgttattgttaaaaataaagaacttgatgactttattatactaagaaaagatcaaactcccacttatatgttatcagttgttgttgatgataatgatttaggagtcaattttattattagaggtgatgatcatttaaacaatacttttagacaatattatatatacaaatttttaaattggttaattccagaatatgcccatattccactaatacatggcgaagatggttcaaaactatcaaaaagacatggagcagttgatgtattagaatttaaaagaaatggttatttaaaagaagctataattaacaaccttattttacttggttggtctccaaagaatagaaatgaaataattgatataaaagaaattactaatttttttgaaattaaaaaacaatcaaaatcatcgagtatatttaactataaaaaacttaatttctttaataattattatattagaaatgatgatggttttgaaaaatttaaagatttctgcatgaataatgaaaaactaaaaattttaataatgcatcatgaagat

SEQ ID NO: 299753 - DNA, 441 bp, Unknown
  Bacterial polypeptide expressing nucleotide sequence isolated from the Sargasso Sea
gatgactccaataatcacaagatttgccccctcaccaactggaaatctacatataggaagtgcccgaacagcattaattaattatatagtaagtagacaaaattcatcttctaaattttatttaagaattgaagataccgacaaaaaaagatcaaaagttgaatttactaataatattcttaatagtttaaaatggctaggtataagatgggaaaatgaaattcaaattcaatctgatagaataaacaggcatcaagaaattgcacatgaattattaaataaaaaatttgcatataagtgtgcatgttctcaagaagaattaaatacacgaagagaattgataaaatcaaagaataagttatcaaaaaaaatttgtataaattgtaaaaataatgaagaagttcaagaattatcagaaggatttgtaatcaggataaaatt

SEQ ID NO: 299754 - DNA, 490 bp, Unknown
  Bacterial polypeptide expressing nucleotide sequence isolated from the Sargasso Sea
aatgaattctattataacaagatttgcaccttctccgacaggaaacttacatataggaagtataagaacagcattattgaattatattgttgttcaacaagctaaaaaaaatttacctaattcaaaattttatttaaggattgaagatactgataaacaaagatcaaatgaagaatatacaaaagatattttagaaggtttaaattggttaaacattaattatgatgaaaaaccactaattcaatcttcaaatattaaacgacatcaacagattgcaaaaaaattattagcaaataaaaaggcatttaaatgtatttgttcaagtgaaacgttagataggaaaagagaatttaacaaaaaaaataaaattattaataagaagctatgtacaacatgtgaaaatgataatgaaatccaatccaagcaaaataattatacagttagaataaaagttccaaatgatggaaaaaatcattttaatgatattttc

SEQ ID NO: 299755 - DNA, 99 bp, Unknown
  Bacterial polypeptide expressing nucleotide sequence isolated from the Sargasso Sea
tatgacgtttttaactaggtttgctccctctcctaccggttacttacacgtaggtaatattagaacggcactatttaattttttgctttcaaaaaaaaa

SEQ ID NO: 299756 - DNA, 239 bp, Unknown
  Bacterial polypeptide expressing nucleotide sequence isolated from the Sargasso Sea
aatgaaaaaagtagcaactagatttgctccgtcacctactggacctttacatattggtggggtaagaacagccttatttaattggttatattcaaaaaacaaaaatggtaatttttatctaagaatagaagatacagataaagaaagatcaaaagaggaatacaaaaatcaaattataaaatctttgcaatggataggtatcaatcatgatggaacagaatatatacaatctcaaaaaa

SEQ ID NO: 299757 - DNA, 924 bp, Unknown
  Bacterial polypeptide expressing nucleotide sequence isolated from the Sargasso Sea
gccaccaatatatgatagatcatcattaaatttatcagaagaagaaattaatcaaaaaattaaatcaggtcaaagacctcattggagatttaaattagaaaccaaggagataaattggaaagatttaataaaaggtaatgtttcgtttgatccaaaaaatttaagtgatccagttttaattagaaatgatgaaacattattatatcacttaccttcggtaatagatgatattcaagaaaaaatcactcatattataagaggtgaagatcatatagctaatactgcttaccatatccaaatctttgaagcattagagtctgccataccaacatttgctcaccacccttttctaattgatgagcaaggtaagggttttagtaaaagaatgggcagtttatcaattgaaaattttaaaaatgaaggttttgagaatattaccttgcttaattattttctttttattggatcaagtagtaatattgaaccaataaatgatttaacaaaaattataaaaaaatttgatattagtaacatatcaaaatcgtctgcaaaattttcaaaagagtcattggtatcacttaatcaggacacattaaaattatttagctttaatcaaataaaagataaattatcacatcttagcaataatttacaagaagagactttttggaattttgtaaaaaataatattacttattttcatgaagttagtatttgggagaaagttattacatcaataaacaattataaagattttaatatcgataagaactttgttgatattgcagcaaatgaattacctaatgatccttatgatgcaaatacctgggatacttggacatctaaaattaaagacaaaactggttttaaaggcaaagatttatttatgcctttaaggcttatattgacaggaaaatcccatgg

SEQ ID NO: 299758 - DNA, 145 bp, Unknown
  Bacterial polypeptide expressing nucleotide sequence isolated from the Sargasso Sea
gatgaatataagagtaagatttgcgccaagcccaactggatcccttcatttgggtgttgtcagaacggcaatttttaactaccttttctcgaaaagaaatgggggcaagctagttttacgaattgaagatacagatcaagaaagg

SEQ ID NO: 299759 - DNA, 379 bp, Unknown
  Bacterial polypeptide expressing nucleotide sequence isolated from the Sargasso Sea
atgataatcactagatttgccccctctcctactggaaattttcatatgggaagtttaaggactgctatttacaattttttatttgcaagaaaaaataaaggaaaatttcttttaagaatagaagacacagataaggaaagatcaaaaaaaatatatgaagaagaaatattaaaaatatttaatatatttaaacttcaatatgacaatcttagttatcaatctaaaaatttaagtattcatcaagaatatttagaaaaactgatgtcaaatgatatggcgtatcgttcaaaggatggaccttataagttcagagtgaacagagataatgaattttttgagtttgatgatttaattttaggaaaaattaaagtaccatcta

SEQ ID NO: 299760 - DNA, 100 bp, Unknown
  Bacterial polypeptide expressing nucleotide sequence isolated from the Sargasso Sea
atgttaaaagtagcaactagatttgctccatcacctactggagcattgcatattggtggccttagaacagctttatttaattggttatattccaaaaatc

SEQ ID NO: 299761 - DNA, 736 bp, Unknown
  Bacterial polypeptide expressing nucleotide sequence isolated from the Sargasso Sea
tttttaaactggaacaaaccattatatgcccacatcccattaatacacggaagtgacggttctaaattatctaagagacatggagcaatgaaccttattgattatcgtgatatgggttatacaagtcaggcaatgttctcatatttaatgcagttaggatggacatcttatgaaaatgaagatgattataaatttaaaaaggcggcagacttattttctctagataaaattaataaatctcctgctaaatttgataaaaaaaaacttaataacattaattcaaaatatcttaaaaaaattgatgttaataaaatatatgaattattaattgaaagattcgaactagttttaaacattaatcaggaaagaaggttaaaatcactattacctgatcttttaaaaagaattgaagtatatatagacttaaaaaatgattttgaatggataattgaagataattttatttgtagagatgaggaaaaactaaagcaactaaaagaaaataaagtaatgattaatgaaattggtgatttgttaacaaaatgtgaatggaataaagaatgtatagaaaatactttgaaaaaatatatcaaaaaaaaatctctgaaatttaaggatgttggcccaattctaagaattgccttaacaggaaaaactaattctccagaattggtttcaataatttatgaacttggttgtacaatttcattaaatcgattaaaatattcatattgat

SEQ ID NO: 299762 - DNA, 321 bp, Unknown
  Bacterial polypeptide expressing nucleotide sequence isolated from the Sargasso Sea
cagttttatttaactggctatattcaaaaaatcaaaatggtaatttttttttaagaattgaagatactgataaagaaagatccaaagaggaatatagaaaacaaattattaattcactagaatggataggtataatttttgatggggaggaatatgtacaatcaaaaaaaatagatgatcatattaaagttgcccatgaattattaaaaaaaggtaatgcttataaatgctattgttcatctgaggaaattgaggaacaaaaaaagagaggtaaacaaaaaaaaattccatatatttatgatagaaaggtggagagataaa

SEQ ID NO: 299763 - DNA, 191 bp, Unknown
  Bacterial polypeptide expressing nucleotide sequence isolated from the Sargasso Sea
aatgtcaaaagtagcaacaagatttgctccatcgcctacggggccgcttcatataggtggagtaagaacagctttattcaattggttgtttgcaaaaaataagggtggaaattttcttctaagaatagaagatacagataaagaaagatcaaaaaaagaataccaaaatcaaattattcaatccttgaaat

SEQ ID NO: 299764 - DNA, 251 bp, Unknown
  Bacterial polypeptide expressing nucleotide sequence isolated from the Sargasso Sea
gatgtcaaaagtagcaactcgttttgctccctcgcctacaggagctcttcatattggaggtgtgagaacagctttatttaattggttgtactcaaaaaatcaaaaaggcacatttcacctaagaattgaagatactgataaagaaagatctaaagatgaacataaagtacaaattattaaatctttaaaatggcttggaattgaacatgatggtgaagagtatattcaatcaactaaagttaaagaccata

SEQ ID NO: 299765 - DNA, 850 bp, Unknown
  Bacterial polypeptide expressing nucleotide sequence isolated from the Sargasso Sea
tggcgtgatatacctgtaaacaaacaccctaaaaattcatcattttgtattagaataaagtctccaaattctggattctctgaaatatcagatgaaattcaaggaaatgttaaagtaaattgccatgaaatagatgattatataataatcagaagcgatggaactccaacttttttattatcatcagctgttgatgattatgatatgtctatcagtcatataattagaggggatgatcatttgactaattcatttagacaaaaaatactttttgatttttttgattataaacccatttttgcacatatttctttaattcataatgaaagaaacgaaaagttatcaaagagagataatgcttcatctatattagagtttaaggataaaggttatcttcctgaagctattaacaactatctacttagaatgggatggtctcatggtgataaagaatttttttctattcaagaagctgagaaactcttcacactttcaaaaataggaaaatccccatccaaatatgatatcaagaagctagattttttaaataactattatcttaaaaattatgacgataagtgtttagttgaaatgataaaacaaagaaatgatgtagaattattatttaatagttttgataaaaaaaaaatattacttctgcttaatttatttaaagaaagagcattaaatttgaatagtttggtggacgatttaataaatatttgtatagaaaaaaaaaaatttagtaatgatgataatataattattgaaaattttgttaagaataaagagattattgttaaaaattttgataatatagaaatttgggatattcaaaaaatgaagatca

SEQ ID NO: 299766 - DNA, 691 bp, Unknown
  Bacterial polypeptide expressing nucleotide sequence isolated from the Sargasso Sea
agacggcactaaattatctaaaaggcatggagctgtaaatttaattgatttaaaaaatgatggctatttaccaagtgcaataattaataatttaattttacttggatggtcacctaaaaatcaagataatgaaattatagaacttcccgaaataatttcgcaatttgatataaaaagtttatcaaaatctgccagtatttttagttacaaaaaacttgattattttaacaattattttttaagaattgaaactaatgcaaaattatttgaagaatattgtaaatcaaataaaaaattaacagaatacctagaattagataaagaaaaattatttaaagtttttaaagtatataaaaaagatatttcaaaatatattgaaatactaagtattgcagaaatttatttttctaaaagtttttcaaaatattctgatgaaaaatttctagatgatttcaataatatatataatgaatttttagaactaattattaatattaataaatgggaatatgatattataaatttagagattaaagaatttataaaaaaaaataatattaaattcccagttttaggtaaacccgttagatatttacttactaatgattataatggtgcttctattacagatatattcatgatattaggaaaaactgaatcaatagagaggttaaaaaggtataaaatctaa

SEQ ID NO: 299767 - DNA, 781 bp, Unknown
  Bacterial polypeptide expressing nucleotide sequence isolated from the Sargasso Sea
aattttacaatctaacaataataatagacatcaagaaatggtaaacaaaatgcttgaaaatgggacagcatataggtgttttcttcaaaaagatgaattagataaacttagagaagaatcagataaaaaaaaggtaatttttcgtgttcctcaaacgtatagaactttatcttcaatagaacaaaaaaaattaattgatgaaggaaaatcatttactgtaagaataaaagttccagatggagaaactgaatttaatgatatggtttatggttcaattaaagtacaaaataaagatttagatgatttcatcatcgctcgttctgatggttctccaacatacaactttgttgtagcagtagacgatgcagatatgaatatttcacatgttattagaggagatgatcatttagcaaatactccaaaacaaatacttgtatataaggcattaggattaaatactccaacttttgctcatttaccaatgatcttaggttcagacaaaaaaagattaagcaaaagacatgctgcaacaaatgtccaagagtataaagataaaggtttcactcctaaggtcattttgaactatttatctcttttaggttggaatccagattctgaaaaggaaatttttgaccaaaacgaattaataaatagttttcaattcaaacaagttcaaaagaaatcagctgtttttgatgaaaagaaattattatggatctcacaacaacatttatcagaaatgagtgtaagagatttaatgaatgaaatatatactttaaat

SEQ ID NO: 299768 - DNA, 946 bp, Unknown
  Bacterial polypeptide expressing nucleotide sequence isolated from the Sargasso Sea
actgatatctactgatttagcttatcagtcagatgatggaccttataagtttagagtaaacagagataacgaattttttaaatatgatgatttaattttaggagaggtaaaaataccgtcaaatacaatagaagatttctcgatagctagatctgataaaactcccacatttatattatcaaatttaatagatgatgattttgaaaatgttaccaatgtaattagaggaaatgatcatactattaatactgttaagcaaaaaatgttatctaatgctctgaacttcaaagaaatacattatgctcacattccacttatacatgatattcaaggaaaaaaattatctaaaagagataatataactaatgttgaggattacttaaatgatggttacttagcagcatccatatttaattttattatcaaattgggtaataattttaatgatcttgaatacctaaatattgatgaagccattataaattttaatttatctaagacagttttatcacctgcaaaatttgatattgaaaaactaaactttattaatcaatattatttaaaagagttatctttttcagattttaataaatatttagagaaagatattaaaaatcaagtatctagttttaagttagagcctatatataaagatatcttagagagatgtcataaatatacagaaattaatttagaggtagtcaaactttatgatttttttaaaaaaaatttagttcttgagattgataagaatgaaaaagatttgattaaaaaaattcatacaattattaataatttgcatgataatgataatactgtatcaatacttgaaaaaaatggcctacctttaaagaaaattggcaaaataataagaaaaattacagtaaattttgaaactaagataccaattgaaaaatttttatattctttggtattgaaaatataa

SEQ ID NO: 299769 - DNA, 217 bp, Unknown
  Bacterial polypeptide expressing nucleotide sequence isolated from the Sargasso Sea
atgacgaaagtagcaacgagatttgctccttctcccactggccctcttcatataggtggggtaagaacagcactttttaattggttatattccaaaaataatttaggtagattttatttaagaatagaagatacagataaagaaagatccaaagatgaatacaaaaatcaaatccttaaatcactgaaatggatgggaattgaacatgacggaaaaa

SEQ ID NO: 299770 - DNA, 232 bp, Unknown
  Bacterial polypeptide expressing nucleotide sequence isolated from the Sargasso Sea
aatgtctaaagtagcaactagatttgctccatcacccactggtcctttgcacattggcggtataagaacagctctatttaattggttatattcaaaaaatcaaaaaggttctttttatttaagaatagaagatactgatcaagaaagatcaaaagacgaatacaaagatcagattattaaatccttaaaatggataggtattcaatatgatggtagcgaatatatacagtct

SEQ ID NO: 299771 - DNA, 278 bp, Unknown
  Bacterial polypeptide expressing nucleotide sequence isolated from the Sargasso Sea
tatgaaaaaagttgcaactcgttttgcaccctcacctactggaccattacatattggaggcgttagaactgccctgtttaattggctttattcaaaaaataaaaatggatctttttatttgagaatagaagatactgacaaagaaagatcaaaagatgaatacaaaaatcaaattgtaaaatcacttaagtggattggtatagaaaatgacggggaagaatatgttcaatcaaaaaagattgatgatcatataaatattgcaaatgaattattaaaaa

SEQ ID NO: 299772 - DNA, 808 bp, Unknown
  Bacterial polypeptide expressing nucleotide sequence isolated from the Sargasso Sea
atctcatgtaattagaggtgatgaccataaaattaatacttttaaacaaaaacaaatttatgaagttatgaaatggaatattcctgaatttgcacatattccattgatacatagtgaaaagggttccaaactttcaaaaagagataagtcttcaaccatagatgattacgttaaaattggaattttaccagacgcacttagaaattacttattaagattaggttgggcatataaagataaagagatatttactttggatgaaagtatccaactttttgacttaaagggtgtaggaaaatctccatcaaaacttgatatatctagaatactttcacttaatgaacattatataaaaaacatagatgaaaaaattctttttggttttttaaaaaattatgctcagaagtataaaaatgctattaactcatctaaagaagaagctattattaaatctttgaacttccttaaaaataaagcaaaaacccttgatgatatttatcagaattcacaatatattctaaacaatgaagttaagattacccaggaagatgttaagcttctagatgtaaattctaagaaaattataagtgagtttcttgtcgaatttaagaacataaaaactccaaataaagaaaatcttgaaaaactagttaatagtctaatcagcaaacataagactaactttaaaggcgttggtcaaccactaagaatagccttggtgggttctaggtttggtcctggaatttataatatcatcttatctcttacaaaagatgaggtcgtaaaaagaatttctaaaattaattaa

SEQ ID NO: 299773 - DNA, 721 bp, Unknown
  Bacterial polypeptide expressing nucleotide sequence isolated from the Sargasso Sea
actgatagtagaaagatcaaccaaagcttatgaaaaaaatattttagatacactttcttctataggactttcaccagataaaaaaccaattaatcaatcagaaagaaatgatatttatattaaggcagctgagcaaataatcgcatcaggcgatgcatactggtgtgattgctctgaagaagatcttgaagagatgcgtaatcaacagatggctgacgggaaaaaacctatgtacgatggcagaagtagagatcttggattagaacgttcctcgaatacagtgcttagactcgctacaccagaagatggcgaaattgttatgcatgacatgattagaggagagataagatttaataatgctgaattagatgatttgattttactgagaagcgatggaacaccaacatatcatttgtgtaatgtcgtagatgattttgaacagggtgtaacaactgtcataagaggagaagatcatatttcaaacacgccaagacaaatacatatacaaaatgctctgggatatccagccctagaatatgctcatcttccgttagttttgggaccggataaaaaaagattatcaaaaagacatgctgcaaccagtttagaggaatataaagacatgggttatttagattcagcaattcttaattcattagcaagacttggatggtcaggtggtgataaagaggtcttttacatggacgatttgataaaagat

SEQ ID NO: 299774 - DNA, 601 bp, Unknown
  Bacterial polypeptide expressing nucleotide sequence isolated from the Sargasso Sea
caaaatttaatttattctgcattgaattgggcaattccagtttatgcacacattccactgatacatggtgaagatggaaaaaaattatcaaaacgtaacgccgcaacaagcttgattgagtataaaaaaatgggttatccagcagctgcaatgagaaattaccttgcgcgtgtgggctggagccacggcgacgatgagttttttactgatgaacaagcaaaaacatggtttaatttgcaaagtattggcaaaagtccatggaggtttgactttaaaaaattgtccaatatttcaaagttgcatatagccaatacagataatgctgcgctgctgcatgagctaacaggatacttgaaagctatgggtcaaccagccttttcacaagcacagttaaacagccttcttaagtcactagatttcacaaaaaatgctgtgaagagcttttctgaactcattgaaaaaaatagatttattcttcaagaaagaccaatttctctggagccagacattgaggagagaataaaagatttacctttaaatgtcctcaaaatattgacgccgcaactgcaaaatgttagatgggaacggaactatttagaag

SEQ ID NO: 299775 - DNA, 330 bp, Unknown
  Bacterial polypeptide expressing nucleotide sequence isolated from the Sargasso Sea
aatgtcaaaagtagcaacaagatttgctccatctcctactggtccattgcatattggaggggtcaggaccgccttatttaattggttatattccaaaaatcaaaatggtaaattctacttaagagtagaagatacagacaaagaaagatctaaagaagaatataaagatcaaataaaacaatcgcttaaatggattggcataaattatgatggggaagaatatattcaatcagagaaaatggaatatcatattaaaattgcaaatgagcttcttaaaaatggtcatgcatataaatgttattgttcaagcgaagaaattgaggaacagaa

SEQ ID NO: 299776 - DNA, 784 bp, Unknown
  Bacterial polypeptide expressing nucleotide sequence isolated from the Sargasso Sea
catgattattactagatttgctccatctccaactgggcttttgcatataggaaatttaagaacggctatttttaattttttggcgacaagaaaagaaggtggaaaatttatcttacgattagacgatacagattcaagtagatcaaaaaaggaatttgttgatcaggtaaaagaagatctcaattggttaggaattttttgggaccaggaattttctcaatctgaccatataaaacgttatgattctataaagaaagaactcatggaaatggggagagtttatgagtgttttgagacgccagctgaattagatttgaaaagaaagaagcttttaagcatgggtaggcctccagtttatgacagggcttcattgcagctttctgaaaaggagaaagaaaaattaagatccgaaaagcctagttattggagatttaaattgaatagcgaagttgtagagtggagggattcaattctgggcaatcagtctataaatccttcgtcagtttctgatccagttctagttaaagcagatggacaatatctctatactctagcttctgttgtagatgatattgattatggtgttacagatatcatcagaggttctgatcatgtaactaatactgcagttcaaatacaaatctttaaagcattatctaagccagtcccaaatttcgggcaccattcattgcttattgatcttgatggtaaagcactatctaagagagatggatctttaaatttgaaaactttgaaaaatagtgggatagagcctatggctatt

SEQ ID NO: 299777 - DNA, 790 bp, Unknown
  Bacterial polypeptide expressing nucleotide sequence isolated from the Sargasso Sea
atcaaaccagttataagatttaaaagtaaaatcgatggatcctccgtattaaaagatttagtacaaggagatgtacaaattgataataacactattgaagattttattattttgagaaatgatggatcaccaacctataacttgtcagcagctgttgatgacaatcagatgaaagtttcacatataattagaggtgatgatcataaaattaatacatttaaacaaatacaaatatatcttgctatgaaatgggagcttccatcttttgcgcatattccattaattcacaccactgaaggaaaaaaactatctaaaagagataaagcttcaactcttgatgattattctaaaattggaataatgcctgaagcactaagaaattatttattaagattaggatggtcatataaagataaggaaatatttactttagatgaaagtatcaatcattttaatttagaaggaataggtaaatcaccttcaaaattagatattagccgtattttatcaatgaacgagcactatattaaaaatatggatgaaaatgatctctacaagagattcaatgaatactgtggtgaatacaaagaaaaaattgaaactagtaaagaagacaaaataaaaaaatcactaatatttcttaaaaataaagcaaaaactttagaagatatttataataattcaaaatatataatatttgatgaagttatttttaatgaaaatgatttaaaactcattgatgaaaaatcaaaaaaaataatatcagattttaaagcagaaaatatctaaa

SEQ ID NO: 299778 - DNA, 752 bp, Unknown
  Bacterial polypeptide expressing nucleotide sequence isolated from the Sargasso Sea
acaaaatattaacaggcatttagcaatagctaataatttattaaataaaaaaaatgcctacaaatgtgtatgctcagaagatgaactagcaaatagaagaaaaaaaattaacttaggagaaattaattcaaaaaaaatatgtattacttgtgaaaaaaacaaagaagttcaatctcttgaatcaggttttgtaattagaattaggattccaactgatggcagtgaaatcttagatgatgtaattcaaggacgtgtagaggttaaaaataatgaaatagatgactttgttttagtgcgcaaagataatacgccaacatacatgttatctgtagtagtagatgatcatgatttaggagtaaattatatcatcagaggtgacgatcatttaaataattattttcgacaaaaatttatatacaaacatatgaattgggaaactccaaaatatgcacatattcccctaatacatggagaggacggaacaaaattatcaaaaagacacggcgcaataaatttaacagatttaaaaaataagggttatttacctaatgcgataataaataatttaattttacttggatggtctccaaaaaatcataacgatgaaattatacaatttcaagatattatttctaaatttcaaattgatagtttatcaaaatctgcaagtatttttagctacagaaaactcgattactttaataattattatttaaggcttgagtctaatttaaatttatttgaagagtatt

SEQ ID NO: 299779 - DNA, 193 bp, Unknown
  Bacterial polypeptide expressing nucleotide sequence isolated from the Sargasso Sea
atgaaaaaagttgcaactcgttttgcaccctcgcctacaggtcctttgcatataggcggtgttagaacagcattattcaattggctatattcaaaaaataaaagtggatctttttatttgagaattgaagatacagataaagaaagatcaaaaaatgagtacaaatatcaaattataaaatcactaaagtgga

SEQ ID NO: 299780 - DNA, 223 bp, Unknown
  Bacterial polypeptide expressing nucleotide sequence isolated from the Sargasso Sea
aatgtctaaagtagcaacaagatttgctccatctccaacaggccctcttcatataggaggtgttaggaccgcattatttaattggttattttccaaaaaccaaaaaggaaattttcacttgagaatcgaagatacagataaagagagatcaaaagatgagtacaaagatcaaataattaaatctcttaaatggattggagttgagtatgatggaagtgaatac

SEQ ID NO: 299781 - DNA, 283 bp, Unknown
  Bacterial polypeptide expressing nucleotide sequence isolated from the Sargasso Sea
atgaaagaaattgttacaagatttgctccaagtccaactggtactctccatattggaggcgtaaggaccgcattatttaattatgtatatgcaaaacaaaataatggaaaatttttaattagaattgaagataccgacactgagagatctactaaagaatttgaaaaaaatatactagataatcttatttctattggtcttcagcctgatgaagacccaatcaatcaatctgaaagaaatgatatatatttgaaagctgccgaaaaaataatccagtctggta

SEQ ID NO: 299782 - DNA, 436 bp, Unknown
  Bacterial polypeptide expressing nucleotide sequence isolated from the Sargasso Sea
atgaaaaaagtagcaactagatttgctccttctcctaccggtcctcttcatattggtggggtaagaacagctctgtttaactggttatattcaaaaaataaatcaggtaaattttatttaaggatagaagatactgataaagaaagatctaaggaagaacataaaattcaaataattaattctttaaaatggatgggaattgaacacgatggtgaagcgtatattcaatcaaaaatgataggtgaacacgtgactattgctaaaagattattagaaaatggaaatgcctataaatgcttttgcagtgcagaggaaatagaggaacaaaagaaaagagctaaacaaaaaaaaattccttatgtatataatcgaaaatggcgtgatatttctgaagatcaagccccaaggaatataaaacccagttataagatttaaa

SEQ ID NO: 299783 - DNA, 268 bp, Unknown
  Bacterial polypeptide expressing nucleotide sequence isolated from the Sargasso Sea
tttggaaaaacgtttaagactagccccgagtcctacgggattatttcatattgggacagcgcgaacagcactattcaattggttgtatgcacaaaaaataggtggaaaatttcttattagaatagaagatacagatttccttcgatctaaatctgaatatacaaaaaatatattagagggcttgaaatggcttggacttaaatgggatgaagaacctataaagcaaagtgaccgaatttcgattcacaaaagttatatcaaaaaacta

SEQ ID NO: 299784 - DNA, 463 bp, Unknown
  Bacterial polypeptide expressing nucleotide sequence isolated from the Sargasso Sea
tttggaaaaacgtttaagactagcccccagtccaactggtttatttcatatagggacagctcgaacagcattattcaactggttatatgcacaaaaaataggcggaaaatttcttatcagaatagaagatacagattttctacgatctaaatctgaatacacagaaaatatattagaaggcttgaaatggcttggacttaaatgggatgaagaacctataaagcaaagtgaccgaatttcgactcacaaaagttacatcaaaaagctattagaatgtggagctgcatataggtgctttactacagaagatgaaatttctgaattaagaaacgaacaaaaaaagaaaggattacctccaaagcatgataatagacacagaagtctttcaaaaaaagaaatagaaacattcattgcccaagggaggactttcagtataaggtttaagattgatgaaaatattgaa

SEQ ID NO: 299785 - DNA, 316 bp, Unknown
  Bacterial polypeptide expressing nucleotide sequence isolated from the Sargasso Sea
cgaggggaggatcatatcagcaacacaccgagacaaatccatatccagaaagcgcttggctatccagatcttgagtatgctcacttacctttggtgctaggtgaagataaaaaaaggctttcaaaaaggcatgctgcaactagcttaaatgcttataaagaaatgggatttacaaaagaaacaattataaataccttagcattgcttggttggtcaactgaaaatgaaattttttcaattgatgaattgatcgaatcattcaagctagaaaatgttcaaaaagctgcagcggtacccccatctaaaaagatttaat

SEQ ID NO: 299786 - DNA, 89 bp, Unknown
  Bacterial polypeptide expressing nucleotide sequence isolated from the Sargasso Sea
aatgaaggtaactagatttgctccaagtcctacaggcaatctgcatataggaggagttagaactgctttatttaattatgttttttcaa

SEQ ID NO: 299787 - DNA, 325 bp, Unknown
  Bacterial polypeptide expressing nucleotide sequence isolated from the Sargasso Sea
gctgcctgagagaagctgggtctcaagtgtctgtgatggggccctctcgggggagattcgtcgctcacgtgatgctgctggctgcccaaccaccacctcgcagattgttccacgaggattcgttgaatctgtgaggggggagtggagaagacggggcagctttcctcgctctcactcctctcgccctggcatcagcaagatcatcagagcctcgacaatcgtggacgaggaggagatcgtgcgagtccgctttgcgccctcgcccacgggaacgctgcacatcggcggagcgcgaacggcgctcttcaactggctcaaggtgtga

SEQ ID NO: 299788 - DNA, 494 bp, Unknown
  Bacterial polypeptide expressing nucleotide sequence isolated from the Sargasso Sea
tttggagaaacgtttaagactagccccgagtccaacaggtttatttcatattggtactgctagaacagcactatttaactggttgtatgcaaaaaaaataggtggaaaatttcttatcagaatagaagatacagattttcttcgatctaaatctgaatacacagaaaatatcttaaagggattaaaatggcttggacttaaatgggatgaagaacctataaggcaaagtgaccgaatatcaattcacaaaagttacatcaaaaagcttttggaatctggagctgcatatagatgttttacaacagaagatgaaatctctgaattaagagaaaatcaaaaaaagaaaggatcacctccgaagcatgataatagacatagaaatctctcaaaagaagaaatagaaacattcatatcccaaggaaggacatcagtaataaggtttaagattgatgaaaacattcaaattaaatgggtagatcagataagaggcgaaa

SEQ ID NO: 299789 - DNA, 263 bp, Unknown
  Bacterial polypeptide expressing nucleotide sequence isolated from the Sargasso Sea
aatgaaaaaagttatcacaagatttgctccaagcccaacaggaacattgcatattggaggtgtaagaacagcgctttttaattatgtttatgcaaaacagaatgatggattgtttcttataagaattgaagatactgacagagagcgatcaaataaagaatatgaaaaagatattctcgataatttatcgtcaattggactatcgccagatcaaaaacctataaatcaatcagaaagaaatgagatatacacaaaagctgcag

SEQ ID NO: 299790 - DNA, 467 bp, Unknown
  Bacterial polypeptide expressing nucleotide sequence isolated from the Sargasso Sea
atttctgaattaagagaaaaacaaaaaaacaaaggattacctccaaagcatgataatagacacagaaatctttcaaaagaagaaatagaaacattcatatcccaagggaagacttcagtaagaaggtttaaaattagtgaaaaaattgaaattaaatggctagatcaaataagaggtgaaatcaagtggcaagggaaggacttgggtggtgatttagttttgtcgagaagggcaaaaggatatgaaattggagaacctttgtataatcttgcagttgtagttgaagataatttcatgaatattactcatgttgtaagaggtgaagaccatatctcaaacactgcaaaacaaaaattgatttataaagcattaaattttaatttgccgactttttcgcatacacccctaatactaaatagtgaagggaaaaaattatctaagagagattgcgttacttctattgacga

SEQ ID NO: 299791 - DNA, 738 bp, Unknown
  Bacterial polypeptide expressing nucleotide sequence isolated from the Sargasso Sea
tgggttgggaagtcccaaattttgcacacatacctttaattcatagtgaacaaggaaaaaaattatcaaaaagagataatgcttccactcttgaagattatattaaaataggggttatatcagatgcattaagaaattatttattaagattaggatggtcttacaaagataaagaaatttttacaaagcaggaaagcatagatttatttgatctaagcggtgttggaaaatcaccttcaaaattagatatgaataggatttattcaataaatgaaacttacataaaaacaatagatgaaaaagatctttttaatttcttcaaagaatacgtttcgaagtacaaaaagcctatagatcaagttaaagaaaatattcttctaaaatcaatgggtttcttaaagaataaagcaaaaactctagaggatatttggaataatgcccaatatattattaatgataaaattgagattggcgcagatgataaaaaacttattgatgatttatctaagaaagtaataaaagactttactagtgagtatgaaaaactatccgctttatctagagaagctttagagcctataattaaatctttgattgataaacataagactaattttaaaggtgtgggtcaacctataagaatagcactagtgggttcaagatttgggccaggtatttatgatgttattttgtctttagataaatcagaagtaattaaaagacttaaacaaatttaga

SEQ ID NO: 299792 - DNA, 433 bp, Unknown
  Bacterial polypeptide expressing nucleotide sequence isolated from the Sargasso Sea
atgaaaaaagttatcacaagatttgctcccagcccaacaggaacattgcatattggaggagtaagaacagcgctttttaattatgtttatgcaaaacagaaagatggattatttcttataagaattgaggatactgacagagagcgttcaaccaaagaatatgaaaaagatattctcgataatttatcgtcaattggactatccccagatcaaaaacctataaatcaatcagaaagaagtgagatatacataaaagctgcagaaaaaattattgaatcaggtaatgcatactggtgtgattgtactccagaagaattagataaaatgcgaaatgagcaaactgctgctgggattaaacctatgtatgatggaagaagtagaaatataggcttggaaccttcagaaaaaacagtattgaggctggccacacctg

SEQ ID NO: 299793 - DNA, 484 bp, Unknown
  Bacterial polypeptide expressing nucleotide sequence isolated from the Sargasso Sea
aatgtcttttaattgtaggtttgctccatcccctactggtccacttcatattggaggggtcagaacagcattatttaattggttgttagctaagaaaaatagaggaaaatattttttgagaatagaagatactgataaagaacgatctaaggacgagtttaaaaaacaaattatttcatcattagcgtggttaggtattgaacatgagagcgaagaatatattcagtcaaaaaatatttctaaacatgtggctgtagctgaagatcttataaaaaaaggttttgcatatgcatgttattgctcagaggaagaaataaatgaacaaaaagaaaaatgtaaaaaacaaggaataccatatgtatataatagaaaatggagagacgctaaagatcttaaaataccaaaagatgtaaaaccagttataaggttcaagagtaaaatctctggaaatacaattataaaagatttggtcaaggagaaagaa

SEQ ID NO: 299794 - DNA, 391 bp, Unknown
  Bacterial polypeptide expressing nucleotide sequence isolated from the Sargasso Sea
aatgactagatacattactaggttcgccccctccccaactggcaatctccatatcggaagtgccagaacagccttaataaattatatattcaaatctcagtatccagactctaaactatacttacgaattgaggatactgataaaataagatcaacagaagaattcaaggaaaatataataaatggccttaagtggttagggattgaatgggataatgaaccgcaaattcaatcattaaatatcaaccgacatttagaagtagcgcataatttgttaaaaaacaaaaaagcctacaaatgtatttgtagcgaagatcaattaacaattcgcagaaaaaaaattaatactggtgagattagttcaaaaaaaatctgtatttcttgtgaagat

SEQ ID NO: 299795 - DNA, 262 bp, Unknown
  Bacterial polypeptide expressing nucleotide sequence isolated from the Sargasso Sea
gatgtcaaaagtagcaactcgttttgctccctctcccactggagctctacatattggtggtgtaagaactgccttatttaattggttgtattccaaaaatcaaaaaggtacctttcatttaagaattgaagatactgacaaagaaagatcaaaagaagaatacaaaatacaaataattaattcattaaaatggttaggtatagaacatgacagtgaagaatatattcaatcaagaaaaattgatgatcatgtaaaaatagca

SEQ ID NO: 299796 - DNA, 820 bp, Unknown
  Bacterial polypeptide expressing nucleotide sequence isolated from the Sargasso Sea
aaaagaaaaatgtaaaaaacaaggtatcccttatgtttataataggaaatggagagatgctaaagatctccagatcccaaaaggtgcaaaaccagttataaggtttaaaagtaaaatttcaggaaatactgtaattaaagatttggttcaaggagatattaatatttcaaattctattattgaggactttgttatattgagacaagacggatctccaacatatcagttatctgcaacggttgatgatcattcaatgaaagtttcacatgtgattcgaggtgatgaccataagattaatacatttaaacaaaaacaaatttatgaagcaatgaaatgggatattcctcaatttgcacacatacctttaattcatagtgaaaaagggtctaaactctctaaaagggacaaatcttcaactattgatgattatgttaaaattggaattttgcccgatgcacttagaaattatttattacgattaggttggtcatataaagataaagaaatattttctttagatgaaagcattaagctttttgacttaaagggtgttggaaagtctccgtcaaaacttgatatttctagaatactatccctaaatgaacattatattaaaaatatagatgaaaaaatcctttttgaatttttaaagaattatactcaaaaatataaaaaagctattaattcatctaaagaagaaacaattataaaatctatgaattttctaaaaaataaagcaaaaacccttgatgatatttatcaaaatgcacaatatatcctgaaggatgaaataaagattggccctgaagatattaaactt

SEQ ID NO: 299797 - DNA, 844 bp, Unknown
  Bacterial polypeptide expressing nucleotide sequence isolated from the Sargasso Sea
tacgatggcagaagtagaaatcttggaatagagcgttcctcgaatacagtacttagactcgctacaccagaagatggcgaaattgttatgcatgacatgattagaggggaaattagatttaataatgctgaattagatgatttgattttactcagaagcgatggaacaccaacatatcatttatgtaatgttgtagatgattttgaacagggtgtaacaactgtcataagaggagaggatcacatttcaaacacgccaagacaaatacacatacaaaatgctctaggatatccagccctagaatatgctcatcttccattagttttgggaccggataaaaaaagattatcaaaaagacatgcagcaaccagtctagaggaatataaagatatgggttatttggattcagcaattcttaattcattagcaagacttggatggtcaggtggtgataaagaggtcttttatatggatgatttaattaaaggttttgatatcaaagatgtccaaaaagctggggctatttttgatattactaaacttgattggttaaattcacaacatttagcaaatctatcgcttgaaggatttaaagaacacatcaaaccatttgcacataaaattaatattgatatcaacgatcacccaaatacagatttactcattgcctcaatgagaacttttgagaatactttatctgatatagctaaagcactcagtccttatttcatggatgttgttgagtacgataaaaacgctataaataaatttctatcaaatggaagtaaaattcttgaggatattcatgaattactaaaaactgttgctgattggaatgaagaag

SEQ ID NO: 299798 - DNA, 127 bp, Unknown
  Bacterial polypeptide expressing nucleotide sequence isolated from the Sargasso Sea
atgacaacgataacaagatttgcccctagtccaacaggattattgcacttgggtaatatcagaacagccctcataaattggttgtatgctaaaaatagtggtggaaaatttattcttcgaaattgat

SEQ ID NO: 299799 - DNA, 714 bp, Unknown
  Bacterial polypeptide expressing nucleotide sequence isolated from the Sargasso Sea
ctcacatacctttaattcatagtgataaaggcaaaaaactatcaaaaagagataatgcttctacattagaagattatataaaaattggaataatcgctgatgctttaagaaattatcttttaagacttggttggtcttataaagataaagagatatttactaagcaagaaagcattgatctttttgatttaaatggtgttggaaaatctccctcaaaactagatttgtcaagaatacactcaattaacgaaacatatataaagagtattaatgaaaaagatttattcaattttttaaaagaatatgtttcaaaatacaaaaaacctattaatcaatcaaaagaagctgtccttttaaaatctatgacttttttgaaaaataaagcaaaaactttagaagatatatggaataattcacaatatattatcaatgataaagttgaaatagagccagaagataaaaaacttatcgacgatttatctaaaaagattattaaggaatttattgctgaatatgagaaaattaattctttatcgagagaaactctagaaccagtgataaaatccttaatagataaacataagactaactttaaaggcgttgggcaaccactgagaattgcgttagtcggctctagatttgggccaggtttgtatgatgtaatcttatctttagataaagccgaggttataaaaagattaagtaaaatttaat

SEQ ID NO: 299800 - DNA, 155 bp, Unknown
  Bacterial polypeptide expressing nucleotide sequence isolated from the Sargasso Sea
aatgtcaaaagtagcaacaagatttgctccatctccaactggacctctacatataggtggtgtaagaactgctttatttaattggctatatacaaaaaatcacaaaggatctttttttttaagaattgaagatacagataaagaaagatcaaaag

SEQ ID NO: 299801 - DNA, 599 bp, Unknown
  Bacterial polypeptide expressing nucleotide sequence isolated from the Sargasso Sea
cctcttattcatacccatagatggtaaaaaactatcaaaaagagacaatgcctcaacattagaagattactcaaaaattggaattctacctgagtcactcagaaattatctcctaaggttaggatggtcttataaagataaggaaatttttaacttagatgaaagtataaaactttttaatctagaaggaataggtaaatcgccctcaaaacttgatatgagtagaattctttctatgaatgaatattacattaaaaatagtgaagaaagtattttgtacgaaaggttaaaagaatattgcgagaagtataaagataagattaaagaagaaaaagaaaatacaataaagaaatctttaacatttttaaaaaacaaagcaaaaacacttgaggatatatttaacaattctaaatacatattaaatgataaagttatttttaatgataatgataaagcactgataaacaatgaagccagaaaaataatacatttatttaaagagaagatttcagaattagaaatttttgatagagaaagtttagaacaaattgtaaatgggttaatagaattaaataatacaaaatttcaaagggtgttgg

SEQ ID NO: 299802 - DNA, 703 bp, Unknown
  Bacterial polypeptide expressing nucleotide sequence isolated from the Sargasso Sea
atgaaaataggcagattcgcgccctctcctactggccctcttcatatgggctccttaattacagcattagcgagctatttggatataaaatcaaagagggggctctggttaatccgaatcgatgatctagaccctccaagaatagttcctggttctactcaattaattctagaatctctctttgcacacgggttagtgtcagatcgcgcagtaatttatcaaagtgaaaaccttcgaaattacgaaagtcaccttgccaacctattaccccatatttattcatgcgagtgcagcagaaaagtactagcaaggcataaaatctatcctggcacttgtcgtgataaagtcttgtcaaccgatgactttgcattaaggataaaagttcccaataccctaatatcatttaacgacaaaataaggggaaagatcacaacaaatcttcagcaggaagtaggagactttgtagtggttcggcgcgacaaactcttttcttataacttagcaacagcttgtgatgacggcgaccaaggaataacacacgtcctgagaggagaggaccttctttctgcaactaaccttcaaatattcctgatgaatatgctgaagctgaaggcgccagaatattcacacattccagtgctatgcaatgtaaatgggcacaaactatctaagcaaactggcgcgcctccaattaaagattccg

SEQ ID NO: 299803 - DNA, 844 bp, Unknown
  Bacterial polypeptide expressing nucleotide sequence isolated from the Sargasso Sea
ctggctaacgtggtggatgaccatttgatgggcattacccacgtgctgcgtggtgaggagtggatcaactccgcgcccaagcacaagctgctgtaccagtactttggctgggacatgccggagctttgccacctgccgctgctgcgtaacccggacaagagcaagctgtcgaagcgcaagaaccccaccagcatcaacttctatgagcgcatgggctttttgccggaggcggtcaccaactatctgggccgcatgggctggtctatgccggacgagcgcgagaagttcaccctggatgagatgatcgagaacttcgatatccagcgcgtgtccctcggtggcccggtgtttgatgtggagaagctgcgctggctgaacggccagtggattcgtgatgagctgagcgacgagcagttcatggagcggatgcatcagtggtggttcaaccgtgatgacctgcaagcgctggtgccgcacatcaagggcagggcagaggtgttctctgacgttgcccccatggcccagttcatgttcagcggcatgctgaacctgaagccggaagacttcgcccacaacaagctggaagaagcccaggtcaagcgggtgctgcagttcaccctgtggaagctggaggcccagcgccactggagcaaggaaaccatctttgccgacatcaaggccctggccaaggccatggacctgaagatgggggatttcatgttctcgatcttcgtggccattgccggaacgcccaattcctggtcggtaatggactccatggccctgcttggcccggacatgacccgcgcccgtttgcgcaccgcgctggacgtaattggtgggt

SEQ ID NO: 299804 - DNA, 708 bp, Unknown
  Bacterial polypeptide expressing nucleotide sequence isolated from the Sargasso Sea
ctcatataccgctaatccatggcagtgatggcgcgaaattatcgaaacggcatggcgctcttggcgttgatgcctatcgtgaaatgggatttcttccagatgctatgatcaattatctgttacggcttggctggagccacggtgataacgaatttttcacccgtgaacgggctattgaattattttcgctggacaatattggtaagtcaccggcccggtttgaccttgaaaaactccgtggtgtcaatgcccattatctacaacagcttgacaattcggcgatatatgatctgattgcgccgcatatcgccccaaccagcgcttttgccaaatacagattgatcactcttcttccgctatttcaggagcgcgccaaaacatatattgaaattgtatctcaacttggatatttgctgcatgatggtgctcccgaaatgactgaagaggctggcgcacttctgagcgtcgaagctaaaaagcacctattaaagcttgccacgaatttatccggtgcaagttgggaaaaggaaagtttaaacaggattattcaaaaatttttggaagatcatcgtttaaaaatgcgtgatgttggtttgccacttagggcggcaatcaccggtataaagcaatcgccgtccatcgttgatatcatggcagtactcggcgaagccgagaccttagctaggctgcgtgtagcttgcaaataaa

SEQ ID NO: 299805 - DNA, 307 bp, Unknown
  Bacterial polypeptide expressing nucleotide sequence isolated from the Sargasso Sea
atgaccaaagttaccagatttgcacccagtccaacaggagccttgcacataggtggagtacgcactgcattatttaattatgtgtatgccaagcaaaataaaggaagcttcttaatcagaattgaggatacggatgctgaaagatcaacgaaggagtatgaagaaaatattctcaaaggattatctgatattggcattgattcagacgagcctcctgtcaggcaatctgaaagatctgaactatataggttggctgctgaaaaaataatagaatccggcaatgcttattggtgtgattgttcaaaag

SEQ ID NO: 299806 - DNA, 315 bp, Unknown
  Bacterial polypeptide expressing nucleotide sequence isolated from the Sargasso Sea
aatgaaaacaataactagatttgcgccatcacctacaggccttcttcaccttggtggtgtaagaacagctttatttaattttcttcatgctaaatccaacggaggaaaatttaaaattagaattgaagatactgaccaaacaagaaatagtaaagaatctgtaaaatctattttaaacggacttgactggttgggtctaaaatatgatggcgaagtcatttaccaaagtaaaaaaatcaaagaacacaaaaaaattatcaatcaattgattgataataactctgcatacaaatgtttccatactgatggcgaaat

SEQ ID NO: 299807 - DNA, 1164 bp, Unknown
  Bacterial polypeptide expressing nucleotide sequence isolated from the Sargasso Sea
aatgactgcaattaaagtccgatttgcccccagcccaacaggcaggcttcatgttggcaatttacggaccgccctagtgaattatctttttgcgcgtaaaatgggtggccaatttatgcttcgaattgatgataccgacacggaacgatcaactgcagcgtttgaggctgatattagggctgatttagaatggatgaatatgagctgggattgcgaagataggcaatcattaaggcttgcacgatatgatgaagccctgtcgctgttagttgagtcagggcgggcctatgcctgctatgaaacccaagaggaattatctctgaagcgtaaggcccagctatcggcagggcgtccgcccgtttatgatcgtgctgggctaaagctgagtgcggaagaaaaagaaaaattcgaaatacatggaaggcgcccgcattggcggtttttgcttcatgataccgaagtagcctggtgcgatctggtgcgtggcgaagttagctatcatatgagtagcttatccgacccagttttgatgcgcgaggatggccgagttatttatacaatggcgtctgtggtcgatgacgttgatcacggcatcacccatatcctccgtggtgaagatcatgtcacaaactcggccgcacaaattcagctttttgaagctctaggtgcaaaagccccaacgatgggccatatggcattgctagccggagcagatggggagggcttatcaaagcgtctaggtagtctgtcgattggtggattacgcaccaagggttttgagcctatcgcgattgccagcctcctctcacgcattggaaccgctgatccggttcaaatgcagactgacatggcaagtattatcgatagtttcaacattagtcgcttcggccgtgccacagcaaaatttgatcttgctgaactggaaaatatcaatggccaaatcattcaggatatgccttttgatatggtaaaaaaccagctggcagcctcaggtgttggtgggggagcactgttctgggaaacggtgcgcggtaatatcactgttgttcgcgaggcaaaaatatggtgggacatatgcacctgtgaaattttaccgataattgaatcgaaagaagttacaaaagccgcggcggttttattgccggaaggcccggttgatgcctc

SEQ ID NO: 299808 - DNA, 554 bp, Unknown
  Bacterial polypeptide expressing nucleotide sequence isolated from the Sargasso Sea
attggcaccaagtccaactggaacacttcatctaggaacagcgagaacagcactatttaactggctatttgcaaaaaaagaaggtggaacttttctcttaagaattgaagatacagatattgaaagatcaagagaagagtatataaacaacatatatgatggtctccagtggctaggaatcaactgggatgaatccccaacaattcaaagtgaaagagtaaatgaacataaacaaattataaaaactctcgtcgataaaggatttgcatataaatgttatgcatcagaagctgaactagatgaaatgagagaaactcaaaaaagaaatggtttagcgccaaaatatgacaataggcacagaaacttaactcctgaacaagaatcagaatatataaagcttggaagagatcctgttatcagattcaaaatcagtgatgaaaaattaatttcatggaatgacttgattcgtggaaaaatgacttggagtggaaaagatttaggaggtgatatggtcatcgcaagaagagcaccagcgaattcaattggtgatccct

SEQ ID NO: 299809 - DNA, 247 bp, Unknown
  Bacterial polypeptide expressing nucleotide sequence isolated from the Sargasso Sea
tttgcacattggtggtgtgagaacagcattattcaattggctttattcaaaaaataaaggtggtaaattttatctaagaatagaggatacagataaagaaaggtctaaagaagaattcaagaaacaaataattaattccttaaaatggataggaataaattacgaagatagtgaatatattcaatctgataaaataaatgttcatataaatgtagctaatgaattgttaaaaaaaggtttggcttat

SEQ ID NO: 299810 - DNA, 1224 bp, Unknown
  Bacterial polypeptide expressing nucleotide sequence isolated from the Sargasso Sea
attaccgatgccttatcttggctaggacttgattgggatgaagacatcgtacttcaatctaataacaagtcaagacatgaagaaatggtagcaaaaatgcttgataatggtacagcttatcgatgttttcttcaaaaagaagagcttgataagttgcgattagcatctgaacaaaaaaaagaagtttttcgtgtaccgcaaacgtatagagatttatcagaagatgaagtcaaagaattgctcaatcaaggcaaatcatttactgtcagattaaaagttccagaaggcgaaacagaatttactgatttagtgtatggtacaatcaaggttcaaaacaaagatttagatgactttatcattgcgagatcagatggatcgcccacctataattttgtggtagctatagatgattcagatatgaatatttctcatgttgttagaggagatgatcatttagcaaacactccaaaacaaatccttgtatatagagctttgggtctagatgaacctatttttgctcatttaccaatgattttaggttctgataaaaaaagattgagtaaaaggcatgctgcaaccaatgtacaagagtacaaggataaaggatttactgctactgcaatattaaattatttgtcgttattaggatggaatcctgattctgataaagaaatttttaatcaagaagagttgatagaaagttttcaatttgatcaagttcaaaaaaaatcagccgtatttgatgaaaagaaattattgtggatctcacaacagcatttaacagatatgagtgttagagatgctatgaatgaaatttataaactaaatcctgattggggagatggtcttgattggaattatttaaaagaaattgtaaagcttattaaagatagatcaaaaacaattacagaaattgctgagatgtcaggactattttttcaagaatcacttgattatgatcaagatttaatatccgaaacctttaatgaagaagtaattgctattctaaatgactttaaaagcgctttagaaaattgcgatacatggaatagatctgaaatagaacttatttttgacaatttaattgcacagcatgatgtgaagattggaaaagtaatgaagcctataagggttgcacttacaggtattacttttggtcctggtatttttgatctaatactattgctagggaaagatatttgtttaaaacgtgttcgcaagctt

SEQ ID NO: 299811 - DNA, 1687 bp, Unknown
  Bacterial polypeptide expressing nucleotide sequence isolated from the Sargasso Sea
tctggaagatcgggatgcggttcgtaagtatgcattacagaacgccatagagtacagcggcaaagggcagtctggaagcgttctaggtagagttcttgcagagagggaacaactgagaacccgtgtaaagagcctactatcgttagtagagaaagaggtcacaagagctaactccatagctcgtgaagatggaatcgaaggagttcgtaaagagttggagagtttagctccaggggccctagatagggagaggcataagaaaaatgagggtttgagggatcttccaggaaatacatcagaagtaatcctgagattcgcccctaatcccaatggccctttatccataggacattcaagaggagtggctatcaattccctgtacgcagataaataccaaggcaaaatagtactcaggtttgatgacaccgatactaaggtaaaacctccaatggtcgatgcctatgcttggatagaagaagagttcgaatggatgtcaggaaagactgcagatgtggtgattagagctagcgaacggatgccaatctatctccaacacgctgagaagatgttgattgggggttttggctatgtttgcaaatgtactgctgaggattttagtgagttcagagtttcaaagactgaatgtccatgtagagataagtcggtccagcagaacatggacgattggggaaaaatgaactctggagagattgatgagggaggcgctgttgttagggtaaagaccgcaatggatctgccgaatcccgctttgagagactggcccgcactaaggattcagcattccccgcatcctatagtcggcgacacgtacaaggtctggcctctgttagatttccaaagcgccattgaggatcatctgcaaggagtaagccacatcatcagaggaaaggatttgatggacagcactagaaagcagactattctttacgaacacttcggttgggattatcctgagccattgtattggggcagggtgaagatccatgagtttggaggtttctctacctctgggatgtcttcatccattgattcggggaaattctcgggatgggacgatccgaggctccctacactcagagcaatgcggcgtcgcggatttgatcctcggtctctagcagagctttgggaagaagttggccttactcagaaggatatctcaatctcactgaagacattggagtcatttaattctagaataatagacggggattgcgaaagaagggttttcgtctcgaatccgaaaagtctggatcttagtgccgaaaatatcccctcaagagtaatgatggcaagacatccagacggcgaaatagagggtttcagggagtgggaagtcgggatgactgtatcaattcaagatagtgactttgtcgaaggaaagctgaggttgaaggacttcgccgatatcataatctcaggttcatctgcaaccatagagtcggttgataggagcgatgaccggaaaatagtacattggattccagagaagttgtcgttagaagcgatactttcagtacctgatggtgaggagatttctgaggtaaagggggttctagaggactttgaactcacagagggagaagtataccaacttgagcgagtcggttttgctagattcgaagggattcaagaagggattgcaaggctcctatggctacacaattag

SEQ ID NO: 299812 - DNA, 655 bp, Unknown
  Bacterial polypeptide expressing nucleotide sequence isolated from the Sargasso Sea
aatgaaaaaagtagcaactagatttgctccctcacctactggtgcattgcatattggtggtgttagaacagctttatttaattggttatactccaaaaatcacaatggtaaattttatttaagggtggaggatacagataaagaaagatctaaagatgaattcagagatcaaataatacaatcgcttaaatggatcggtatcaactatgatggagaagaatatattcaatcaaaaaaagtagatgatcatataaaagttgcaaatgagctacttaaaaatggtaatgcatataaatgttattgttcaagtgaagaaatagaagaacaaaaaaaaagagctagacaaaaaaagatcgcttatatttacgatagaaaatggagagataaaaaagagtctgatgcacctaaagatattaaacctgttataagatttaaaagcaagattgatggaacatcaatattgaaagatttagttcaaggtgatgttgagattgacaataatacgatcgaagattttattatcttgagaaatgatgggactcccacatataatttatcagcatccgtagacgatcaccaaatgaacatgacacatgttattagaggtgacgatcagaaaataaacaccttcaaacaaatacaaatatatcaagct

SEQ ID NO: 299813 - DNA, 860 bp, Unknown
  Bacterial polypeptide expressing nucleotide sequence isolated from the Sargasso Sea
aacatatcatctgtgtaatgtcgtagatgattttgaacagggtgtaacaactgtcataagaggagaagatcacatttcaaacacgcctagacaaattcatatacaaaatgctctgagatatccagccctagaatatgctcatcttccattagttttgggaccagataaaaaaagattatcaaaacgacatgcagcaaccagtttagaggaatataaagacatgggttatttagattcagcaattcttaattcattagcaagacttggatggtcaggtggcgacaaagaagttttttatatggaagatttaataaaagattttaatatcaaagatgtccaaaaagctggagctatttttgatattactaaactggattggttaaatgcacaacatttagcaaatttatcgcttgaagaatttaaagaacatatcaaaccatttgcaaaaaaaattaacatagatataaacgaccatccaaatacagatttactgattgcatcaatgagaacttttgagaatactttatctgatatagctaaagcactcagaccttatttcatggatgttgttgagtatgataaaaacgctataaataaatttttatcaaatggaactaaaattcttgaggatattcatgaattactaaaaactattactgattggaatgaagaagaaatagatgtaatgttaaaagagtatcaagctagtaatagcttgaaagtaccagaagttaaccaaccaattagaattgctttaacgggttctacaatgtcaccgtctttaggtttaactttatctctatttgataaagaagaatcacttaaaagaattgagaaacttataaattttttaaactaaa

SEQ ID NO: 299814 - DNA, 1366 bp, Unknown
  Bacterial polypeptide expressing nucleotide sequence isolated from the Sargasso Sea
aattaaagaaaagagaatcggactacctgatttaaaaaatgctactcaaggtgacgtagtattaagattcgcacccaatccaaatggccctttgtcatttggacattcacgtgggattgtaataaatagtgaatacgctaaaagatacgaaggaaaatggatcttaagatttgatgatactgatactgtaaggaaaccacctctacatagtgcttacaaatcaatccaagaagaagtagaatggcttacaggaaaacctgctgataaaatagtaattgcctctgacagaattgaaacatattacaaatatgcatcagaattaatcagcaaaggaggtgcatatatttgtactcttagtgcagaagaattcagagaatttaggcaaacaaaatctaattcacctgatagaaatcgttctcccgaagaaaatttaaaattatgggaaaaaatgctaaatggtgattttaaaccaggagaagcagttgtccgaataaaaactgacatgacattgccgaaccctgcattaagagactggccagctctaagaatacaagatactgaaaacaatccgcacccaaggaaaaatataaaatcaaaatacaaagtttggcctttacttgatttccaaagtggtgttgaagatcatttgcaaggagttacacacataattagaggtaaagatctaatggattcaacaagaaaacaaacactactttacgagtattttggttggaaatacccagaaactgtttactggggcagagtaaaaattcatgaatttggaggtttttcaacatctgggatgcgtaatgatattgaacaaggaaaatattcagattgggatgacccaagactacctacactcgcaagtatgcaaaggagaggattttcatcagaagcattacgtaatttctggattgaattagcattaacacaaaaagatatttcggcatcaatggcaacaatatattcacataatgtaaaagtcattgatgaaacatcaccaagattattttttgtaaaaaaccccctccgcttcgaactaagagatggagatgaaaaaataccatctgaattcaaaacacaaattcatcccgaagatgaaagtttaggttatagaatctggaaactaccactaaaaaataataccatttatattgaaagtgatgatttcgaacttgcaaagaaaaataataataaaattagactaaaagatttcgcagatattcaaattaaagatgaaattgcatcgataattagtttaaatccgactgaaaaattaccaataattcattggcttaattcagaaaattcacatggatgcacattagaaattactaatgaaaatgaaatagaattaattaaa

SEQ ID NO: 299815 - DNA, 784 bp, Unknown
  Bacterial polypeptide expressing nucleotide sequence isolated from the Sargasso Sea
atgataattacacgttttgccccaagcccaactggtcacctgcacttaggaaatatgagatcttgctttttaaattgggcatattcgaaaaaaaataatggtaaatttattcttagatatgacgacactgaccaagagagaagcaaagatgaatatgtaaagtccatagcatctgatcttgattggttaaaaataaaatatgatgaaactttttatcaaagcaaaagaattgagagatataatgaacttttcgatcaattaatttctttaaaatttgtttacccatgttttgagtcaagtgaggatttagatataaaaaaaaagttgcagttaaaagcaggaaaacctccaatctacgatagatcctcattaaatttatctaaagaagaaattgaaaaaaaaataattaatggtaatcagccttattggagatttaagctttcacagactaaaattaaatggaatgatttagtaaaaggagagaccgaagtagatctagcttctcaatcagatcctgttttaaggagggctgatggtagctacctctaccattttccaagtgtcgtcgatgatatagatatgaaaatatctcacattattagaggcgaagaccacttaactaattctgcaattcatttagaattatttaaatgtttaaattctgatttaccttcattaggtcacaatccattaatgcttaatgaggatggaacaaaactaagtaagagaaatttggactcaatttcacttaagcaattcagaagacagtggatatacagttaac

SEQ ID NO: 299816 - DNA, 838 bp, Unknown
  Bacterial polypeptide expressing nucleotide sequence isolated from the Sargasso Sea
gttggttagaggtgaagaatggctctcatcgcttcctgttcattatctactttatgagttttttggatggaagcctcctaaattttatcacctccctttaattttaaaaactagtggagcggggaagctttcaaaaagagatgcagacgaacaggggcaccctatttttgctgttaaatgggaagactctaatggatttaaagaacacggtttcattcctgagggtcttaataattacctggcgcttctgggttggagcaacaaagaagaaaaggagaggtatacaatggaagagctggttgagtcttttagttatgaggaaataaacaaatcgggagctcgttttgattttaaaaaagctctatggattaatcacctgcacttaaaagatcttgaatctaaaagaatattagacctctctgagcaaacaaaaaaattgctggttgaaaaatatagcgagtcggaagctatagaggttattgagttagttaaagagagattaaacaccaccaaagacattgataaagagctttcagtttttattaagcagcctaaggagattgatgtgtcagcaattgaaaaaattaacagagaggtaatatttagtgttttaaatttttgtaaattcaatagtgagcttgttaacagtccttttgaacttaaaaatgagcttatgaagtttggagcagaaaacgatatttcttttggaaatattatgaaaacgctaagactttcgttggttggaagtctttctggacctgatttatttaaaattatagattttattggaccagaggaaacacttcaaagaattgaaaacttaattaataaaatttaa

SEQ ID NO: 299817 - DNA, 679 bp, Unknown
  Bacterial polypeptide expressing nucleotide sequence isolated from the Sargasso Sea
atgactttaatcaaagtccgatttgccccgagcccaacaggcaggcttcatgttggcaatttacggactgccttggtgaattacctttttgctcgtaaaatgggtggtcagttcatgcttcggattgatgatactgatgcggaacgctcaactgatgcgtttgagaccgatattcgggctgatctagaatggatgggcatgggatgggattgcgaagataggcaatcattgcggcttgcaaggtatgatgaagcccttgctatactcgttgagtctggacgcgcctatgcatgctatgaaacccaggaagaattatcgctaaagcgcaaggcccagctttcgtcaggtcgcccaccagtttatgatcgcgctgggctaaaacttagcaaaacagaaaaagaaaaattcgaaagagaggggcgccacccgcattggcgctttttattgaatgatgttgaagtaaattggcatgatcttgttcgtggtgatgtagcctatcatatggccagcctgtctgatccagttttgatgcgtgaagatggcagggttatctatacgatggcctctgtagttgatgatattgatcacggcatcacccatattcttcggggcgaagaccatgtcacaaactcggccgcccaaatacagctgttgaagcgttggcgcaaaagctccaata

SEQ ID NO: 299818 - DNA, 643 bp, Unknown
  Bacterial polypeptide expressing nucleotide sequence isolated from the Sargasso Sea
aatgaattctttatccaggtttgcccctagcccaactggtttaattcatattggaaacgctagatcagcagttttaaattgggcttatataaataataaaaaaggaaattttatcttaagaattgatgataccgatctagaaagaagtaagaaagaatatgaagaaaaaataaaaagagatttaaattggcttggaattagttggaataaatcatttaatcaatctgatagaaaaaaaatatatgatcaaagtatagaaaaattaaaaaaggataatagactttacccatgttttgaaagccaagaagaactatcacttaaaaaaaaatcacaacttacttctggcaacccacctatttatgatagaagctctcttcatctaactgaaattgaaattaaaaatcttttgcaatcaggtaaaaaaccacattggaggttcaaacttgaaaataaaactattgaatggaatgatttgataaaaggaaaagtatcatttgaaagtaaaaatttaagtgatcctgtattaattagagaggatgaaactttattatatcatttgccttctgtaatagatgatattgaagaaggagtttcagaaattattagaggtgaggatcatatttcaaatacagcatttcatata

SEQ ID NO: 299819 - DNA, 301 bp, Unknown
  Bacterial polypeptide expressing nucleotide sequence isolated from the Sargasso Sea
tatgaaaaaagttgcaactcgttttgcaccctctcctacaggtcctttgcatataggtggagtcagaactgctttattcaattggctatattcaaaaaataatgatggatcattttatttacgaattgaagacactgataaggaaagatcaaaagatgaatataaacaacaaataataaattctcttaagtggattggggttaaaaatgatggagatgaatatattcagtcaaaaaaaaaagatgatcatataaaagttgctaatgaattacttaaaaatggtcatgcatataaatgcttt

SEQ ID NO: 299820 - DNA, 670 bp, Unknown
  Bacterial polypeptide expressing nucleotide sequence isolated from the Sargasso Sea
catgaatgttcttcattataaagagcagggtttctcatcggaggctttgctcaattatttggtcaggcttgggtggtctaagggcgatcaggaaatattcagcattgaagagatgattgatggctttgatctttcaggcatcaacaaatcaagcgctaaatttgatctcgaaaaacttcaatgggttaatcagcaacacctattgaataccaacgatgaccagttaagacagatgataaaagatgaatcacaaattgctgaaggcttgagtgacgaagtcatactgagttttataaatgcgtataagaatagagcagaaaaaatcaccgatttggttacaagctgtgatcagcttttctccaaagatatcaaatatgatgaggctgctgcaaagaaatttatgacatcggatattctttctcccttagaagatattgccacttctctaagaggatgcgactggaatcaagaatcaatatccgttgcattaaagtcggtttgtgaaaaacatgaaattggttttggcaagattggtcaaccaattcgaattgcagtcacaggaggcactcaatcaccatctattgatcaaactttaatcttgttggatcaagaaacagtaattgataggattgagactgcaatagcatatataaaagaaaagtcagattaa

SEQ ID NO: 299821 - DNA, 204 bp, Unknown
  Bacterial polypeptide expressing nucleotide sequence isolated from the Sargasso Sea
aatgaaagctatcgttacaagatttgcaccaagcccaaccggcactctccacattggaggcgtaaggaccgcattatttaattatgtgtatgcaaaacaaaataatggaaaatttttaataaggattgaagatactgatactgaaagatccactaaagaatatgaaaaaaatatacttgataatctcagatctattggacttaa

SEQ ID NO: 299822 - DNA, 205 bp, Unknown
  Bacterial polypeptide expressing nucleotide sequence isolated from the Sargasso Sea
atgaaaaaagtagcaactagatttgctccatcacctactggtccactgcatattggtggagtaagaactgctctatttaattggttatattctaaaaaccaaaagggtgatttttatttaagaattgaagatacagacaaagaaagatcaaaagatgaatacaaaaaacaaatcatacaatctctaaaatggataggtattactc

SEQ ID NO: 299823 - DNA, 397 bp, Unknown
  Bacterial polypeptide expressing nucleotide sequence isolated from the Sargasso Sea
aatgaagataactagatttgccccaagcccaacaggtaccttgcatattgggggagtaagaacagcattatttaactatattttttctagacaacacaatggattatttctcatcagaattgaagatactgatcaagagaggtcaaaaaaagaatttgaagtagatatcttgcaaggtcttcaatggctggggatagaggcagatcaagaacctgttagacagtctgaaaggtctgaactgtatcgagaggctgctgaaaaattaatcaactctggcagtgcttattggtgtaattgtacaccagaggaacttgatgaaatgcgaaaagctcaaagtgctgcagaaaagaaacctatgtatgatggtagaagtcgaaatttaggattagcacgctca

SEQ ID NO: 299824 - DNA, 137 bp, Unknown
  Bacterial polypeptide expressing nucleotide sequence isolated from the Sargasso Sea
aatggtgcgcgttcgtctggcccccagccccacgggcacgcttcacatcggtactgcgcggacagccgtcttcaataggttgtatgcacggcgccagcaggggtcgttcctgctgagaatcgaagacaccgataaag

SEQ ID NO: 299825 - DNA, 123 bp, Unknown
  Bacterial polypeptide expressing nucleotide sequence isolated from the Sargasso Sea
tatgtctgaagtaaaaactcgatttgccccgtcaccaactggaaccttgcacataggcggggctaggactgctctttttaattggctttacgccatgaataaaaatggtaagttttaccttta

SEQ ID NO: 299826 - DNA, 687 bp, Unknown
  Bacterial polypeptide expressing nucleotide sequence isolated from the Sargasso Sea
aatggttaaaactcgatttgctccaagccccagcggatatcttcacattggaggtgttcggactgctctttatgcatggctattcgccagaaatcagggtggaaagttcttattaaggatcgaagatacagatgtagagcgatctactgaagaatcaaaattatcaattctagaggggttaaaatggctttgcctaaaccacgatgaagagattattcatcaatccgaaagatttgagatttataaagaaaaagccaatgaattgattgctgatgggaaggcttatgaatcagagggcgctattcgatttaaatctgatcgctcttcgaatgtcataatttctgatcacgtgtttggcaatgttgaggtcaatgttgatgaattggatgatttcattatcatgagatcaaatggggctcctacttatcattttgcagttgtgatagatgattatgagtcagggattacacatgtcatgagaggcgatgaccatttaaagaatactgcaagacacattcagcttatggaggcttttaactatccaattcctgattttgttcatctaccaatgattctgggctcagatggctccagactctcaaagagacatggtgccatgaatgttcttcattacaaagagcaaggtttctcaccagaggctttgctcaactattggtcagacttggt

SEQ ID NO: 299827 - DNA, 331 bp, Unknown
  Bacterial polypeptide expressing nucleotide sequence isolated from the Sargasso Sea
atgaaagctatcgttacaagatttgctccaagcccaaccggcactctccacattggaggcgtaaggaccgctttatttaattatgtatatgcaaaacaaaataatggaaaatttttaataaggattgaagatactgatactgaaagatccactaaagaatatgaaaaaaatatacttgataatcttacatctattgggcttaagcctgatgaagatccaatcaatcaatctgaaagaaatgagatatatttgaaagctgctgaaaaaatatttcagtctggcaatgcatattggtgtgattgctctcaagaagaacttgatgaaatgagga

SEQ ID NO: 299828 - DNA, 718 bp, Unknown
  Bacterial polypeptide expressing nucleotide sequence isolated from the Sargasso Sea
aaatgaggaacgggcaaaactcagcaaacgtcatggtgctattgcggtagaagaattccgcgacagaggttatctgcctcagtcattgctgaatttcattgccctattgggttggaatcccggtgatgaccgggaggttttgagtctggaggaaatggtggatgaattccgttttgagagggtgtccaagtcgggagcagtttttgaccgtgaaaaactgaattggatgaatcagcagtacctgctgaagttgccggaagaggaatatttcagaatgattgatgatgtgatccagaaaggggattaccatgatcaggattcgggaaaaatcaggcaggctgcagaaatccttaaaactcgcttagtgaccctttcagacctaaacaataaattaggacttttttttgaagaaaatcctgaaatcaaagatctacaggcgattgaggttttgaaagaagacaattcaaagatggtcttgaaagagttcctccaacaagcggaaaatctagatcagctgacttcggaaaatcttgggcaattggtgaaatcagtgcaaaaaaccacagggatcaagggtcgtggtctctggatgccgcttcgttatgccatcacccgtgaagtcagtggcccagaattacctgcgatgctcgattttttcggaggagaaaaatgtctccacctgattcgccagactctggagaatccttccctcaattaa

SEQ ID NO: 299829 - DNA, 367 bp, Unknown
  Bacterial polypeptide expressing nucleotide sequence isolated from the Sargasso Sea
aatgtcttttaattgtaggtttgcgccctctcctactgggccacttcatattggcggagttcgaacagctttatttaattggttacttgcaaaaaaaaataaaggaaaatattttcttagaattgaagatactgacaaagaaagatctaaagaggagtttaaaaaacagattatttcatctttggcgtggcttggcattgaacatgatggcaaagaatatattcagtccaagaatatttcaaaacatataactattgcagaagaacttcttaaaaaaggttttgcatataattgttattgtacagaagatgaaattaatgaacaaaaggaaaagtgtaagaaacaaggtatccctctatgtttataa

SEQ ID NO: 299830 - DNA, 874 bp, Unknown
  Bacterial polypeptide expressing nucleotide sequence isolated from the Sargasso Sea
atgataacaacaaggtttgctcccagccctactggaaatcttcatttaggaaacttaagatcatgttttttgaattggatatatgccaaaaaaaataatggtaaatttattcttagatatgacgatactgaccaagaaagaagtaaagaggagtttattctttctattgcatcagatttaaaatggttaaatattgatcatgacgaaacttactttcaaagtaaaagagttgatcgatataaccaaatctttgatcaactcatatccaaaaaattagtatatccttgttttgagtccaatgaggatcttgaaattaaaaaaaaattacagttaaaggcaggtaagcctcctatttatgatagagaggccttaaatttaacaaaagaagaaattgaaaaacaaatattatctggcagcagaccttattggaggtttaaattatctcaaaataaagttcaatggactgatttagtgaaaggcaaaactgaggtagatttatcctctcaatctgatcctgttttaagaagagctgatggaagttatttgtatcactttccaagtgttgttgatgatatagatatgaaaatcactcatattataagaggtgaagatcatttatcaaattctgcagtacatgttgaaatttttcaaagtttagatgcacaggtgcctagttttggacataaccctttaatgttaaatgaggatggaacaaagttaagtaaaagaaatgttgactcaatttctattaaaaaatttaaagaagagggatactcaactgaaagtatattatcttatttatattcagttgggttaaatgcagattatagctttaaagaaatatctaaaaaagaatatgttgattttgatttat

SEQ ID NO: 299831 - DNA, 790 bp, Unknown
  Bacterial polypeptide expressing nucleotide sequence isolated from the Sargasso Sea
gatgatcagtaaattaataccttttaaacaaatacagatatatgaagcactaggatgggatattccacaatttgcacatataccacttattcatacactagatggcaagaaactatcaaaaagagacaatgcatcaacattagaagattattcaaaaattgggattctgcctgagtcacttagaaattaccttctcaggttaggatggtcttataaagataaggaaatttttaatttagatgaaagtataaaactttttaatttagagggaataggcaaatcaccatcaaaacttgatatgagtagaattctttctatgaatgaatattacattaaaaatagtgaggaaaatattttatacaaaaagttaaaagaatactgcgagatttacaaagataaaattaaagaagaaaaagaaaacacaataaagagctctttaatattcttaaaaaacaaagcaaaaacacttgaagatatatttaacaattctaaatatatattaaatgataaagtaatttttaatgacaatgataaagaactgataaacgatgaagcaaaaaaaataatacatttgtttaaagagaagatttcagaactagaagtttttgatagagaaaatttagaaaaaatcgtaaatgcgttaataaaattaaataatacaaatttcaagggtgttgggcagccattacgaataatgttaactggatctaaatttggtccaggaatatatgatattatattatctcttgggaaaaaagaggtaataaaaagattagggaatataggataa

SEQ ID NO: 299832 - DNA, 1030 bp, Unknown
  Bacterial polypeptide expressing nucleotide sequence isolated from the Sargasso Sea
aatgtatgacggtagaagtagaaatcttagattagaacgatctaataagactgttttaagattagcaactcctgaagacggtgagattgttgtaaatgatttaataagaggaaaaattaaatttaacaacaatgaattagatgatctaatattgctcagaagcgatggctctccaacatatcatttatgcaatgttgttgatgattacgagcaaaaagtcactacagttataagaggagaagatcatataagtaacactccgagacaaattcatattcaaaatgcattaggttatccagaattagagtatgctcatttacctctggtacttggaactgataaaaaaagactatctaaaagaaatgctgctacaagtttagaagaatatcgtgacaaaggatatcttgattcagccatcttgaatactttagccagactaggatggtctcagggtgaaaatgatgttttttatatgaatgaacttataaaagaatttaatataaaagatgtccagaaagcaggagcaatttttgatattactaagttagattggttgaattcacaacatcttgcaaatttgtccattgaaagttttaaagaacaattacaaccattcttacaacaattggatattgatattgaggatcatgaaaattctaacaaactaattgaggctatgagaacttgtgataatacattttcaggaatagcaaaatcattgataccttactataaagatattatagaatacgacgaaaaagcaattgaaaagtttattaatgataaaaacatactaattgaattaagagatttgctagacaaaatagataattggagtcaagaggttattgatagcgttttaaaagagtatcaattgaaaaatgaacttagtgtgcctgcagtaaatcaaccaattagaatttcattaacaggttcaacaaaatcgcccggattagggctaactttgagtatttttacaaaaaatagagctatagagaggataaataagcttttagataaactttcgtga

SEQ ID NO: 299833 - DNA, 445 bp, Unknown
  Bacterial polypeptide expressing nucleotide sequence isolated from the Sargasso Sea
attgaataattcagtaacaagatttgctcctagtccttcgggcttacttcatgtagggaatgtaaggactgcattgcttaattttttggtttcaaaaaaaagtaatggaaaatttattttaagaattgatgatactgatcaagagagaagtaaggataaatatatagatagcattaaagaggatcttagttggcttggcttgaattatgatgaatgttatcagcaatcaaatagaattaaactttatgataaggcatttgatattctgaaagctaaagatttaatttatccttgttttgaaacgcccgatgaattagataaaaaaagaaaaagattaattacaagaaggatgccacctgtttacgatcgagctgccttaaaacttaaacaagatgaaataaaatcattattggattctggaaaaaaaccatattggcgatttaag

SEQ ID NO: 299834 - DNA, 1330 bp, Unknown
  Bacterial polypeptide expressing nucleotide sequence isolated from the Sargasso Sea
gatgataaaattaagatttgcacctagccccacaggtaatcttcatgttggtaattttagaacagcattaataaattttctttatgctaaaaagcataacggtcattttttacttagattagatgatacagatactgaaaggtctaaattaaaatttgaagaaagtataaaagaagatttaacttgggcaaatatcaattgggatagtgaagcaaaacaatctaatagaattgagagatataatgatgttttaaaaatttttattgaaaaagagtttgtttatccgtgctatgaaaccgctgaagaactatctttaaaaagaaaatcacaactttcatcagggaaacctccagtatacgatagatcttctctaaacctctcagattttgaaaaagaagaattttgttccaaaggtcttaaaccacattacagattttttctaaatcatgagaccattttctggaatgatcttattagaggagaatgtaaatataacttaagtaatgtatcagatcctatattggtaagggaagatggaagatttatatatactctcgcctctgtgatagatgatattgacttgaatattactcatattattaggggagaggatcatgtaactaattcggcggctcaattacaaatattcgatgctatggaggctgctcgacctagtatggggcatttgccacttatgaccgattccaaaggggaaggattatcaaaaagaattggaagtttatctatcaaagatttaaaaaaagaagaaatagagagtatttctctaaattcttatttatctagcattggttcatcgaaaaacactgagttaaaaaaaggtattaataatattattgaagattttgatatatcccattttagtcgtgctccaacaaaatttaatttcgatgaacttaacaacatcaataaaaaattgatacaacaattagattacacaacatttaaatctaagtttagagatgaagatcaagttttagatgaaaaatgttggaatattataaaaaaaaatattacttcttttaaggaagtaaaagaatggaatgaaataatttttggtcaagtatcagataatgaaatagatgaagatgttagagaagtatttttaaaaactcttcctgatgaacaatttgatgaaaagacatgggtcaactggtcacaaaaaattagagaaaatctggaattaaagaataatgaaatatttaaattaatgagaaaagtattaactagtcgtatgtttggaccagaaatgtcagaattaattttaattttgggtagagaaaaaatcattgaaagattgaaatcaaaatga

SEQ ID NO: 299835 - DNA, 748 bp, Unknown
  Bacterial polypeptide expressing nucleotide sequence isolated from the Sargasso Sea
tatgggttgggaagtgccaaattttgcatatatacctttaatccatacaattgagggtaaaaagctttctaaaagagataatgcctccacattagatgactattcaaaaattggtattatgccagatgctttaagaaactacttgttaagactaggctggtcctatcaagataaagaaatatttaacttaaatgaaagtattaaatattttaatctagagggaattggaaaatcaccttcaaaacttgatatgagccgtattttatcaatgaatgagcactatattaaaactattgatgaacaggagcttttcaaaagtttggtagaatattgtgagatttacaaagaaaaaatcaaacctgaaaaagaggaaaaaataaaaaattcattatcctttttaaaaaataaagcaaaaacattagaagatatattcaacaacgcaaaatacataatcttagataaaattaattttaatccagataatctgaagttaattgatgataaagcagaaagaataattcaagaatttaaagttgaaatttcttccttagatattttaaacagagaaaaattagagcctatagtaaataatttaataaaaaagcatgaaactaactttaaaggtataggacagcctctaagagtaattttaacgggatctaaatttggtccaggtctctatgatattttaatttctttaggcaaggaagaagtggataaaagattaggaaacaagataactagatag

SEQ ID NO: 299836 - DNA, 97 bp, Unknown
  Bacterial polypeptide expressing nucleotide sequence isolated from the Sargasso Sea
atgatagaaagagctagatttgctccaagcccaactggacctcttcacattggaggtataagaacagccctatttaattatctaatagcaaaaaaga

SEQ ID NO: 299837 - DNA, 883 bp, Unknown
  Bacterial polypeptide expressing nucleotide sequence isolated from the Sargasso Sea
atgcccgttccggatcatctgttgctggagctggaacgtggccagcgctggcgagccgacggcacctaccgcggtcgctacgccccctcgccgacgggcgccttgcatctcggcaatctccaaaccgcgctgttgtcctggttgcaggcgcgccaggccggtggtgtctggctgttgcgcatcgatgatctcgacaccccccgcaaccggcccggtgccgttgaggcgatccaggccgatctgcactggctcgggctcgactgggacggggagccgattctgcagagccgccgccgtgggctctatgcctcctggctctcctggttacgccgccgcggcgccctgttcccctgccgttgctcacgacgggagctggcaggtctggcgcgctaccccggcacctgccgtgatggcagcgctggctgggggtggcgtgatcgccggttgcccagctggcggttgcgggttcccatccgtgatccagatggcagcggtgacgtggtggtgcgccgtgcggacgggttcatcgcataccagttggccaccgtgatcgatgaactggccctgggcatcactgatgtggtgcgcggtgaagatctgcgcgaggcgttgcctgcccagcggagtgtgtatcgggccctgcagcagcagcccccccgctttcaccacggtccgttgcgttgtgacgccgaggggaggaagctgtcgaaacgtgaagccagcagcgggctgatggccctgcgtgagctggatctggatgcccctgcagtggttggtcttctggcctctggtctgggttatgggccgcctggggccaggctctcggcgatcgagttactggaggacttgactcagaaagggatccgtgcgggccgttcttaag

SEQ ID NO: 299838 - DNA, 525 bp, Unknown
  Bacterial polypeptide expressing nucleotide sequence isolated from the Sargasso Sea
aatgactggatatattactagatttgctccatcacctaccggtaaccttcatattggaagtgccagaaccgctcttataaattttatttttaaatctcaacacccggattctaaattattcttgcgaattgaggatacagataaaaaaagatcaactgaagaatttaaaaataatattataagtagccttaagtggttaggaataaaatgggatgatgaaccacaaattcagtctctaaatattaatcgacatttatcgatagctaacaatttattaaataataataatgcttacaaatgcatctgtacagaagatgagctaataaatagaagaaaaaaaataaacataggagaagttaattcaaaaaaaatatgtaatagttgtgaaaaaaacaaagaaattcaatcacttgaatcaggttttgtaattagaattaagattccaacagatggaagtgaaatcttagaagatgtaattcaaggaaaaatagaggttaaaaataatgaaatagatgactttgtttt

SEQ ID NO: 299839 - DNA, 690 bp, Unknown
  Bacterial polypeptide expressing nucleotide sequence isolated from the Sargasso Sea
aaggaaagaaactatcaaaaagagataatgcatcaacattagatgattattcaaaaattggaataatgcctaatgctcttagaaactatcttctgagattaggatggtcatacaaagataaggaaatttttgatttagacgaaagtatcaaatacttcaatttagaaggaattgggaaatcaccctcaaaattagatattgatagaatttattcaatgaatgaacattatataaaaaatattgacgaaaatgatctatttaattttttaataacttattgtgaaacttttcaagaaaagataaataatttagcacaaaaaaaaattaaaaattcattacattttttaaaaaataaagcaaaaactttggaagatatttacatgaattcaaagtttttaataaatgacaaaattcaaatagaaaaagaagataaaaaacttttagacgaaacagctattaaaattattaaattattttgtgatgatattaataaactatcagattttactagagaaacactagaaccaataattaataaccttataaaaaataataatacaaattttaaaggagttggacagccactaagaatatgccttacaggatcaaagtttggaccgggtatatatgatatattatgtgcacttggtaaagaggaagtttctaaaagattatctcaaataagataac

SEQ ID NO: 299840 - DNA, 843 bp, Unknown
  Bacterial polypeptide expressing nucleotide sequence isolated from the Sargasso Sea
aaaccagggaagttttatcttccgtctcgaagacacggatcgcaaccgactggttgaagcagcagaatcgaacttgctgaagatgctggaatgggcgggattagatatcgatgaggggccaagaattggtggtaaatttggaccttatcggcagtccgaacgacttgagatataccgcgatcatgtagaccggcttttggaacatggagacgcctatccctgtttctgcagtgaggaaagactggaaaaactcaaaactttccagcgttctgaagggctgacaccaagatacgacaatcattgtagaaagctgcaaaaaaaagaggttgagacaaaaactcaatcaggtgaaaagcatgtcatccgcatgaagattcctgagaaccaggaaaccttccggttgaatgacctagttcgcggaaccgtagcaatcgagagtactcaagtcgaagaccaggtaatcctgaaaagcgatggattcccaacctatcatctggctgtggtggttgatgatcatttgatgcagatcagtcatgttgtcagaggggaggaatggcttccttcttttcccaaacaccttttgctttaccgctattttggttgggaatcgcctgaattcatccaccttcctttgatcctaaatgaagaacgggcaaaactcagcaaacgccatggtgccgtttccgtagaagaattccgcgaaagaggttacctgcctcaggcattgctgaatttcattgccctactgggttggaatcccggtgatgaccaggaggttttgagtctggaggaaatggtgcatgaattccgttttgagagggtgtccaagtcgggagcagtttt

SEQ ID NO: 299841 - DNA, 722 bp, Unknown
  Bacterial polypeptide expressing nucleotide sequence isolated from the Sargasso Sea
aatgtctgagggcgttcgcgttaggtttgcaccaagccctaccgggcctttacatgttggtggattaagagccgctctctacaattatttgcacgcaaagaaaaataacggaacatttattttaagagttgaggatacggatcaaaagagagaggttggtggtagttatgaatacattgaagagtctttaaggtggtgtggattaatccccgatgagtccccgtctaaagggggtagttttgggccctacaaacaaagccaaagaaaaaatatttatgaaaaatatatcgaagtcttggtagaaaaaggggctgcttattacgctttcgataaggctgaggacctagatatgcacagaaaaaatcataaaaaaaaaggaaagacttttatttataatgcgcacaacaggctaaagcttgtaaactcgttgtctttagacaaaaaaagcgttgaaaaacttttaaaaacagcgccatatgtggttcggtttaaaatgccagacaaagagatggttgtttttaaagatgagatccgcggtaaaattgaggtttcatcaagagaacttgacgacaaagttctttttaagtctgacaaaatgcccacctatcattttgctaatgtggttgatgaccacatgatgaaaataactcatgttattaggggagaagagtggttgccctcgcttcctttgcatgtgcttttatatgaatcttttgggtgga

SEQ ID NO: 299842 - DNA, 814 bp, Unknown
  Bacterial polypeptide expressing nucleotide sequence isolated from the Sargasso Sea
gatgtctaaagtagcaacacgttttgctccatcccctactggagctcttcatattggaggggttagaactgccttatttaattggttgttctctaaaaatcaaaaaggaacttttcacctaagaattgaagatactgacaaagaaagatcaaaagaagaatacaaaatacaaattattaaatcattaaagtggataggaattgagcatgatggtgaagaatatattcagtcacaaaaaatagaagatcacattaaaattgctaatgaattattaaaaaaaggtaacgcatataaatgctactgctctgctgaagagatagaggaacaaaaaaaaagagctaggcaaaaaaagatgccgtatatttataatagaaaatggagagattctgatgaaaaagatgctcctaaagatattaagcccgtgattagatttaaaagtaaaataaatggaaattcgaaacttaaagatttagttcaaggagatattgaaattgaaaataatacaatagaagattttataattttaagaaacgatggaacgccgacttacaacctttctgcaaccgttgacgatcatcaaatgggaatgacacatataattagaggagatgatcacaagataaatacttttaaacaaatacaaatatatcaagcaatgggttgggatgttcctgaatttgcgcacattccattaattcatactattgaaggtaaaaaactttcaaaaagagataatgcctcaacgttagatgattactcaaaaataggcataatgcctgatgctttaagaaattatctacttagacttggatgg

SEQ ID NO: 299843 - DNA, 982 bp, Unknown
  Bacterial polypeptide expressing nucleotide sequence isolated from the Sargasso Sea
aataaaaatcccatacgtttatgatagaaaatggagagacagaaatgaaattgaagcgcctaaagatattaaaccagtaattagatttaaaagtaaaattgatggtacatcaatattaaaagataaagttcagggaaatgtagaaattgaaaataatactatcgaagattttgtaatattaagaaatgatggcacaccaacttataatttatctgctgctgttgatgatcatcagatgaatatgacacacattattagaggtgatgatcataaaatcaatacatttaaacaaattcaaatttatgaagcaatgggatgggctttaccaacgtttgcacatataccattaattcatacaattgaggggaaaaaattatcaaaaagagataaagcatcaactttagaggactattctaaaataggtattatgcctgatgctttgagaaactatcttttaagattgggttggtcatatgaagataaagaaatttttactttagatgaaagtgtaaaatattttaatcttgaaggtattggaaaatcaccatcaaaattagatttaagtagaattctatctatgaatgaacactatataaaaagcattgatgaaaaagaattgtttaatcaactaattaattattgtgagatttttaaaaaaaagattattggggaaaaaaaagataaaattaaaaaatctctaacttttcttaagaataaagctaaaacactagaggatatatataataatagccaatatataattaatgatgaagttaattttaataaagaagatctaaaattaattgatgctaatgcacaaaaaattatctctgagtttaaagataatattaaagaaataagcaactttacaagagaaaatttagaaccgatagttcaggaacttataaaatctaataaaaccaattttaaaggtgttggtcagccattaagagtggctttaacagggtcaaaatttggccct

SEQ ID NO: 299844 - DNA, 937 bp, Unknown
  Bacterial polypeptide expressing nucleotide sequence isolated from the Sargasso Sea
tatgactgttcgtacacgttttgcaccgagtcccacaggctacctccacatcggtggcgttcgtaccgctttgtttaattggctttttgctcgacaccacggtggtcaatttgtcctcaggattgacgacaccgacaacgctcgcaatatcaatgaagccctccagccgattcttgatgggttgcggtggcttggcattgactgggacgaagggcctgatgttggtggaccgtacgcgccctacttccagtcggaacgaagtggacgctaccagaatgctgcccaaaaactactcgaatccggtcatgcctatcgtgactttgcgacacctgcggatcttgatgctgaacgaaaggctgctcaagccgcaggcgtgccgtttatctacagccgtcgctttgcttcttttgatgatgcttcggctgaaagatttttagccgaaggacgcgcgagtgttgtacggctaaagatgcctcgggaaggatcgctcgtactcaccgatgctgtccgtggccgagtagagtttgcttgggagagagaacaggaccatgtcattcagcgttccgatggaacctgcttatatcatcttgcgaatgtgatcgatgaccacgatcttgcaatcagccacgttattcgagcagaagaacatctttcaaatactccaagacaggcgtttattgcacagtcgcttgggtatgaactgcccacgtatgcgcatttgccactcgttgccgaaccaggaagtcgcaccaaactctcaaaacgaaaacttgcaaaatatctcaaaaacaatgatttcaaacaggttatggagcatggcctcaagattgcagaaaggacgggattgaagccagaggctgacacatttaatcccgtgatcgtggacttctatcgcgctgtcggctatttgccttgggcaattgataattactttggc

SEQ ID NO: 299845 - DNA, 997 bp, Unknown
  Bacterial polypeptide expressing nucleotide sequence isolated from the Sargasso Sea
ggatacagatacaattcgctctaaagaagagtatacaactcaaatattagattcattatcctggcttggcttagattgggatgaaccattagtttatcaatcaggccgctcaaaggagtataaaaactatttaaatcagttaattgattctggaattgcttatagatgtttttgctcaaaaaatgacttagatggctcaagagctaaaggtcattataaatattcaggaaaatgtagaaatatatcaatggaaacgataaaagaaaggttaaatcaaggaatttcttttacttataggattcgtattccagatggaaaaacaaaatacaatgatttgatatatggaaaaattgaaatttcgaatgatgaattagatgattttattatttttcgttcagatggaactccaacttataattttacggccgttattgatgatcatgatatgttaataacacacataatccgtggtgaagatcatttgtctaatacacccaaacaaataattctgcataaagctttaggctttgagattccaacttttgcacatttacctatgattttgggttcagataaaaaaagattaagtaaaagacatggcgcaccaggtatacaattctttaaagaggatggatatttacctctacctttaattaattatcttgccttattaggctggaatagtggtgataaggatgagatttttacattggaatcattaattgaaaaatttgatttgaaaaaaattcaaaaaaaaggtgccgtttgggatccaaaaaagttgaattggctaagtgggcaacatattatcaatcttcaaactgattttattttggattctattagaaatattaagccagagtggggtaaaggatatgaaatctcttatttagttaacattattgagattttaaaaattaggtcaagatcattaaaagatattattaatcaatctgagctgtattttaatggtccagatgaatatgacccaattggt

SEQ ID NO: 299846 - DNA, 607 bp, Unknown
  Bacterial polypeptide expressing nucleotide sequence isolated from the Sargasso Sea
atgtcttttaattgtaggtttgcgccctctcctactgggcctcttcatataggtggagttcgaacagccttattcaattggcttttagcaaaaaaaaacaaaggtaaatattttctaagaattgaggatactgataaagaaagatctaaagaggaattcaaaaaacaaattattacatctttagcttggcttggtattaaacatgatggagatgaatatattcaatccaaaaatatatctaaacacgttgcagttgcagaggaattgttaaaaaaaggttttgcttacaaatgttattgttctgaagaagaaattaacgagcaaaaagaaaaatgtaaaaaacaaggaatgccatatgtttataatagaaaatggagagatgctaaagatttaaaaattccagatggagtaaaaccagtaataagatttaaaagtaaaatatcaggaaatacgattataaaagatttagtgcaaggagatagaaacatttcaaattctactattgaggattttgtaattttaagaaaagataatactccaacataccagttatcagccacggttgatgatcatgaaatgaaaataactcatgttatagaggagatga

SEQ ID NO: 299847 - DNA, 943 bp, Unknown
  Bacterial polypeptide expressing nucleotide sequence isolated from the Sargasso Sea
ccacctgggcaatatccgctcggccttgtacccctgggcattcgctcgcgccacgggtggtgacttcattttgcgcattgaagacaccgacctggagcgctccagccaggcggcggtggacgtcatcatcgagggcatggcttggttgggcctgaaccacgacgaaggccctttctatcagatgcagcggatggatcgttacaaggcggtcctggcagagttgcaggctgccggtcacgtgtatccctgctacatgagcgtggccgagctggatgctctgcgcgagcggcagatggttgctaaggagaagccgcgctacgacggcacttggcgccccgaggttggcaagactctgcccgccattccagaaggcgtgcagcctgtgctgcgcttcaagaacccgcagggcggggtggtggcctgggacgacaaggtcaagggccgcatcgagatcagcaacgatgagctggatgacctggtcatcgcgcggcccgatggcacacccacctacaacttctgcgtggtggtggacgatatcgacatggcgatcacgcacgtgatccgtggcgatgaccacgtgaacaacactccacgccagatcaacatcttccgcgccctgggcaaggaacccccggtctatgcccacctgcctaccgtgctgaacgagcagggcgagaagatgagcaagcgcaatggtgccaagcctgtgacgcagtaccgcgatgaaggttatctgcccgatgccatggtgaattacctggcccgcttgggctggagtcacggcgacgatgaaatcttcagccgtgagcagttcctgcagtggttcaacctcgaccatctgggccgcagcgcggcgcagttcgatgaagccaagctgcgctgggtgaatgcccagcacctgaaagccatggctgatgacgctttggcggcgctggtggctccg

SEQ ID NO: 299848 - DNA, 886 bp, Unknown
  Bacterial polypeptide expressing nucleotide sequence isolated from the Sargasso Sea
aatgaaggtaactagatttgctccaagtcccacaggcaatctgcatataggaggagttagaactgctttatttaattatgttttttcaaagcaatctggtggtttattcttaataagagttgaggatactgatagagaaagatcaaagaaggaatatgaagaagacataatatctggattagaatggcttggtatatctcccgataaaacaccgataagacaatcagaaagatcagatatttatcaaaaagctgctgataagctcattgactctggaaatgcctattggtgcgattgttccccagaagatttagaagaaatgcgtgaacagcaagccgccgcaggtaaaaagccaatgtatgatggaagaagtagaaaccttggccttgaaagatcagacaaaactgttcttagattagcaacgccacttgaaggagaaacggtagtaaatgatttaatacgtggcgagataactttcaacaatagtgaattagatgatctaattctgttgagaagtgatggtactcccacatatcatttctgtaatgttgtcgatgatttcgatcagggtgtaaccacagtaatccgaggggaggatcatattagcaatacaccgagacaaatccatatccagaaagcgcttggctatccagatcttgagtatgctcatttacctttggtgctaggtgaagataaaaaaaggctttcaaaaaggcatgccgcaactagcttaaatgcttataaagaaatgggatttacaaaagaaacaattataaatgccttagcattgcttggttggtcgactgaaaatgaaattttttcaattgatgaattgatcgaatcatttcagctagaaaatgttcaaaaagctgcagcgggtatttga

SEQ ID NO: 299849 - DNA, 809 bp, Unknown
  Bacterial polypeptide expressing nucleotide sequence isolated from the Sargasso Sea
aatggttgaatcacctgtaagagttcgttttgcccctagcccctccggcgagcttcaccttggaggagcaaggactgctctttttaactatctattttcaaaacaaaacaatggtaatttttttttgagaatagaagacacggatcaaaaaagatctgataaaatttacattgatcaaataattgaatccttaaattggtttggtatacgatgggatgagcccgtcattttccaatctaaaaaatttaatgattacagaacatatgttgatatgttggtaaaaaaagaatttgcttacccttgtttttgttcaaaaaaaactcttcaaaaagaaaaagataaaggaaattttttgtatagccgtacatgtcgcaacttaagtgattcggaagttaaatctagatttaaccaaggtggtagttttgtctataggtttaaaacacctcctggtaaaaccgtttttacagatacaatatacggtcataacgaaactgataacgatgaaataggcgactttattatattgagatcagatggttccccaacttacaatttatgtgctgtagttgatgatcatttattagccataactcatgttattcgcggcgaagatcatttatctaatactccaaaacaaattcttatttataatgcactaaaattaaaacagccaacattttcgcatttaccaatgatcttaggttcggacaaaaaacgactaagcaagagatttggtgcacaaggaattcaaaactttaaaaatgatggatatttgaacattactttgatgaactacttagccatgctcg

SEQ ID NO: 299850 - DNA, 818 bp, Unknown
  Bacterial polypeptide expressing nucleotide sequence isolated from the Sargasso Sea
aatgaaggtaactagatttgctccaagtcccacaggcaatctgcatataggaggagttagaactgctttatttaattatgttttttcaaagcaatctggtggtttattcttaataagagtcgaggatactgacagagaaagatcaaagaaggaatatgaagaagacataatatctggattagaatggcttggtatatctcccgataaaacaccgataagacaatcagaaagatcagatatgtatcaaaaagctgctgataagctcattgactctggaaatgcctattggtgcgattgttccccagaagatttagaagaaatgcgtgaacagcaagccgccgcaggtaaaaagccaatgtatgatggaagaagtagaaaccttggccttgaaagatcagacaaaactgttcttagattagcaacgccacttgaaggagaaacggtagtaaatgatttaatacgtggcgagataactttcaacaatagtgaattagatgatctaattctattgagaagtgatggtactcccacataccatttctgtaatgttgtcgatgatttcgatcagggtgtaaccacagtaatccgaggggaggatcatattagcaatacaccgagacaaatccatatccagaaagcgcttggctatccagatcttgagtatgctcacttacctttggtgctaggtgaagataaaaaaaggctttcaaaaaggcatgccgcaactagcttaaatgcttataaagaaatgggatttacaaaagaaacaattataaatgccttagcattgcttggttggtcaactgaaaatgaaattt

SEQ ID NO: 299851 - DNA, 723 bp, Unknown
  Bacterial polypeptide expressing nucleotide sequence isolated from the Sargasso Sea
tttgcggacggcactttttagctggcttttcgctaggcaaaaccaaggaagttttatcttccgtctcgaagatacggatcgcaaccgactggttgaagcagcagaatcgaacttgctgaagatgctggaatgggcgggattggatatcgatgaggggccggggattggtggtgattacggaccttatcggcagtccgaacgacttgagatataccgcgatcatatagaccgacttttggggcaagaagacgcctatccctgtttctgcagtgaggaaagactggaaaaactcaaaactttccagcgttctgaagggctgacaccaagatacgacaatcattgtagaaagctgcaaaaaaaagaggttgaaacaaaaatccaatcaggtgaaaaacatgtcatccgcatgaagattcctgaaaaccaggaaaccttccggttgaatgacctggttcgcggaaccgtagaaatcgagagtactcaagtcgaagatcaggtaatcctgaaaagcgatggattcccaacctatcatcttgctgtggtagttgatgatcatttgatgcagatcagtcatgttgtcagaggagaggaatggcttccttcttttcctaaacaccttttgctttaccgctattttggttgggaaccccctgaattcgttcatcttcctttgatcctaaatgaggaacgggcaaaactcagcaaacgtcatggcgctgtggc

SEQ ID NO: 299852 - DNA, 928 bp, Unknown
  Bacterial polypeptide expressing nucleotide sequence isolated from the Sargasso Sea
tttggttcaaggagaagtaaacatagctaactctattatagaagattttgttattttgagacaagatggctcaccaacttatcaattatctgctgttgttgatgatcatcaaatgaagattacccatgttattagaggagatgatcacaaaataaatacttttaaacagaaacaaatctatgaagctatgaaatgggacgtccctgagtttgctcatattcctcttattcatagtgaaaaaggatcaaaactttccaagagagataaagcgtcaacaattgatgattatataaaaattggtatcttatctgatgcattaagaaattaccttttgcgtttaggatggtcgcataaagataaagaagttttcacaactgatgaaagtattgagctttttaatttaaaaggtgttggaaaatcaccatctaaattggacatgtcacgaatactttctttaaacgaacattatattaaacatattgatgaaaaagagttatttaaatttttaaaaatttattctcaaaaattcaaaaaaagcattgatccatctaaagaaaatttacttataaagtctatgtcttttctgaaaaataaagctaaaactcttgaagatatttatcaaaactctcaatacattgttcaagaaaatattcaaattgctcctgaagattacaaacttctagatgtttcttctaaaaatattataaaagattttcttggtgaattcgataaaatatcaaaaataactaaagaaaatactgaaaaaatattaaaagaattaattaataaacataaaacaaattttaaaggtgttggtcagcccttaagaattgcattaaccggttctagatttggtccaggtatatacgatattattttatcacttgataaaaatgaagttgttaaaagattaaaggctattaattaa

SEQ ID NO: 299853 - DNA, 822 bp, Unknown
  Bacterial polypeptide expressing nucleotide sequence isolated from the Sargasso Sea
cgcattatttaattggttattttcaaaaaataaaaaaggtaaattttacttaagaattgaagatactgataaagaaagatctaaagaagaatataaaaaacaaataatagattcacttgcttggattggcataaaccatgacgataaagaatatattcaatcaaaaaatataagcaaacataaagaaattgcacaagagcttttaaaaaatggttttgcatacaaatgttattgctctgaggaagaaattaaagaacaaaaagaaaaatgtaaaaaaatgggtataccgtatgtatataataggaaatggagagattccaaaggtatagaaattccaaaaaatattaatcctgtaattagatttaaaagtaaaatttcaggaaactcaattgttaaggatcttgtacaaggagaaatcaatatctcaaattcgattattgaagatttcgttattttaagacaagatggatcaccaacatatcaactgtcagcagtagttgatgatcatttaatgaaaatttctcacgtgataagaggtgatgatcataaaataaatacttttaaacaaaaacaaatttatgaagcaatgaaatggtcaatacctgaatttgctcatataccgctcatacatagcgaaaaaggatctaaactttctaagagagataatgcttctactatagatgattatataaagattggaattctatctgaggcattaagaaattatcttctacgcttgggatgggcacataaagataaagaaatatttaactcggaagagagtataaaacttttcgatttaaaaggtatggaaaatctcca

SEQ ID NO: 299854 - DNA, 517 bp, Unknown
  Bacterial polypeptide expressing nucleotide sequence isolated from the Sargasso Sea
gatgacaacgacaacaagatttgcgcctagtccaacgggattattgcacttgggtaatatcagaacagccctaataaattggttgtatgcaaaaaatagtggtggaaaatttattcttcgaattgatgatactgatcaagagaggtcaaaagatgaatacatttctcaaataaaatatgatttggagtggctgggaatagactacgacgagacatttaatcagtcttctagatttgaaagatataaagagcaattcgaaaaattaaaatctgatggcaggatatatgcttgctatgaaactcctgaagaacttgagagaaaaagaaagcttcagatggctgccggtggaaagcaagtgtatgaccgttctgcattaaaattaaccgagcaacaaattaaagattatgagaatgatggaagaaaacctcattggcgatttcttcttcaaacagaacgcatgaaatggaatgatttattaaagggtgaaattgatattgatttaacaagcttatcagac

SEQ ID NO: 299855 - DNA, 784 bp, Unknown
  Bacterial polypeptide expressing nucleotide sequence isolated from the Sargasso Sea
gatgtcaaaagtagcaactcgttttgctccctcacccacaggggcacttcatattggtggtgtaagaacagctttatttaattggttatattctaaaaaccataatggtaaattctttttaagaatagaggatacggataaagaaagatctaaagatgaatataaaaatcaaataatacagtctcttaaatggattggaattaattatgatggagaagaatatatacaatccaaaaaaattgaagatcatataagagtagcaaatcaattactcaaaaatggttttgcatacaaatgttattgttcaagtgaggaaatagaggaacaaaaaaaaagagcaaggcaaaaaaaaatcccttatatttataatagaaagtggagagacaaaaaagaaagtgatatatctcagaatattgaaccagttataagatttaaaagtaaaatagatggcaaatcaatattaaaagatttggttcaaggtgatgttgaaattgataataacacgatagaagattttatcatcttaagaaatgatggaacgcctacctacaacttgtcagcatcagttgatgaccatcaaatgaatatgactcatataattaggggtgatgatcataaaattaatacttttaaacaaatgcaaatttatcaagctatgaaatgggaaatgccttcatttgctcatatacctttaatacacacaatcgatggaaaaaagctttctaaacgtgataaagcatcaactttagacgactattcaaagattggtattatgccagatgca

SEQ ID NO: 299856 - DNA, 832 bp, Unknown
  Bacterial polypeptide expressing nucleotide sequence isolated from the Sargasso Sea
aatgaaaaaagttgcaactcggtttgcaccctcacctactgggccattgcatataggaggagtaagaactgctttatttaattggctatattcaaaaaaccataatggaaaattttttttaagaattgaagatactgataaggaaagatcaaaagaggaatttaaattacagattttaaattctcttaaatggatagggattaatcatgatggagaggagtatattcaatcaaaaaatattgaaagtcatattaaagtcgtaaataaattattagaaactggaaatgcttacaaatgttattgctcctcagatgaaatagaagagcaaaaacttagagctaaacaaaaaaagataccgtacatttataatagaaaatggagggataaaagtgaaatagaggctcctcaaggtgtaaaaccagttataaggtttaaaagtaaaattgagggcagcacaaaaattaatgatatagttcaaggagatatagaaattgaaaataatacaattgaagattttataattttacgaagagatggaacaccaacatacaatttatcggcttcagtagatgaccatattatggatatgactcatataattcgaggtgatgatcataaaatcaatacatttaaacaaattcaaatttatgaggcgctgcaatgggaaaaacctttatttgcacacatacctttaattcatacattggaaggtaaaaaattatcaaaaagagataatgcttcaacaattgatgattacgaaaaaattggaattatgcctgatgccctaagaaattatcttatgagattgggatggtcttataaagataaagaa

SEQ ID NO: 299857 - DNA, 607 bp, Unknown
  Bacterial polypeptide expressing nucleotide sequence isolated from the Sargasso Sea
atgtcaaaagtagcaactcgttttgctccctctcctactggggctcttcatattggtggtgtcagaactgccttgtttaattggctatattcaaaaaaccaaaaaggcacttttcatttaagaattgaagatactgacaaagaaagatcgaaagaagaacacaaaatacaaataattaactcattaaaatggttaggtatagaacatgatggtgaagaatatattcaatcaagtaaaattgatgatcatgtaaaaattgcaaatgaattattaaaaaatggatttgcttataaatgttactgttcacctgatgagatagaagaacagaaaaaaagagctagacaaaaaaaaataccttatatttacaacagaaaatggagagatgcagacgaaaaagatgctcctaaagaaattaaacctgtaataaggtttaaaagtaaaattgaaggaagttcaattcttaaagatttggtacagggtgatgttgaaattgaaaacagcacaatagaagattttgtaatattaagaaatgatggaactccgacttataatttatcggcaactgtagataaccatcaaatgggaatgacacatataattagaggag

SEQ ID NO: 299858 - DNA, 964 bp, Unknown
  Bacterial polypeptide expressing nucleotide sequence isolated from the Sargasso Sea
tgaagaaattgaagaacaaaaaaaaagagctaaacaaaaaaaaataccatacgtttatgatagaaaatggcgtgatgttagtgaagataaggctccaaaagatataaagccggttataagatttaaaagtaagattgaagggtcttctactttaaatgatcttgtccaaggagatgtcgaaattgaaaacaatacaattgaggattttgtaattttgcgtaatgatgaaacacctacttataatttgtcagcaacagttgatgatcatattatgaaaatgacacatatcattaggggtgatgatcataaaattaatactttcaaacaaattcaaatatatgaagcacttggttgggaggtccctctttttgcacatataccccttattcatacaatagatggaaaaaaactctcaaaaagagataacgcttcaactttagaagattactcaaaaattggtattttgccagatgctcttagaaattacttattaagattgggatggtcatataaagacaaagaaatttttgatttaaatgaaagtattaaatattttactctggaaggaataggtaaatcaccctcaaaacttgatatgagcagaattctttcgatgaatgaatattatatcaaaaatagcaatgaaaatactctttatgaaaaattgagagaatactgtgataaatataaagataaaattaaagaagacaaagaaaatacaattaaaaattctttaaattttttaaaaaataaagcgaaaacacttgaagatatattcaacaattcaaaatatattttaaatgacaaagttatttttaatgaaaatgataagactttaataaatgatgatgcaaaaaaaataatacgattatttgaagaaaatattttagaacttaaagtttttaatagagaaaatttagaacaaattgttaataaacttattaagtcaaataatactaatttt

SEQ ID NO: 299859 - DNA, 901 bp, Unknown
  Bacterial polypeptide expressing nucleotide sequence isolated from the Sargasso Sea
ctagatgattttattattgaaagaagtgatggctctgcaacttacaacctgtgtgttgttgtagatgacttagattctaatatttctcatgttatcagaggtgatgaccatgttaataatacctttaagcagataaatgtttttaaggctttgaataaaaatgtacccatctatggacatgttcctatgattcttggtgaagatggaaagagattatctaaaaggcatggcgctttaggggtgcgagagtatgctgctttgggtattttgcctgaagcactgaagaactaccttctaagattaggatggtccttgggtgatgacgaaatattcaatggtgaagacatgaaaaaaagttttcaatcaggtattttaaataagtctcctgctactttctcaatggataaattactttggtttaacaaatattacttggatcaaatgagcatagctcaactaatggaggttgtagcgctgaaggattttgatgggagtgaatattctaaaactgtcttggaaacaattagagatagatgttcaacattaaatgaattctctacaaatgctgactatttcttcaaggatcctgaagattatgacccttctctacttaataaacattgtaaagaacatacatttaatcatttatctcttttgaaagagcaattagaggcacttgatatttgggaacaagctcatattaaagaaactattgataaggttgtctctaatcttgaaataggttttggaaagattggcttacctctaaggctagctctcacagcaacagtaaattctccttcaatagatctagtatgtgacatactcggaaaagaaattacttccagaagattagaaagcttcttaactaagattcaaaacttaaaaactgatcaatagc

SEQ ID NO: 299860 - DNA, 899 bp, Unknown
  Bacterial polypeptide expressing nucleotide sequence isolated from the Sargasso Sea
gataatagacacagaagtctttcaaaagaagaaatagaaacattcatatcccaagggcggacttcagtaataagatttaagattgatgaaaaaattgatattaaatgggtagatcagataaggggcgaaatcaaatggcaagggaaggatttgggaggtgatttagttttatcaagaagggctaagggatatgagattggtgatcctttgtataatcttgcggttgtagttgatgataatttcatgaatattactcacgttgtaaggggtgaagaccatatctcgaacactgcaaaacaaatattgatttataaagcattaaattttaatttgcccactttttcgcatacacccttgatacttaatagcgaaggaaaaaaattatctaagagagattgcgttacttcaatcgacgaatttagagaaatgggatatttacctgaggccctatcaaactatatggcatttttaggttggtctccaaaatctgccgacagagaaatactttcacttgaggagatatctgaaatttttgacttatcagaaattaataaagcaggagccaaatttagttgggaaaaactcaactggattaatgcacaatatataaaaaatatggaatcaataaagttaatggagatcctgagaaaatactgggatgaccatggttgggagccgccatctcaagaatgggctaataaattagcaattttgattagagactctatgactctcttaaaagattcaattgatcaatcaaaaccatttttcttaatacctacaattcaaaaagaaggtcaagattttctggaaaacccggaaagcaaagtatctttaaaactaatcttaaattatttaattgagcaaaatactataaaactaaataaagagaaagctaa

SEQ ID NO: 299861 - DNA, 357 bp, Unknown
  Bacterial polypeptide expressing nucleotide sequence isolated from the Sargasso Sea
ttccgacggcgtctatggcgatgtcgaaatcccgtgggatgctgtcgatatgcaggttctgctgaaggccgacggcatgccgacctaccacatggcgaacgtcgtcgacgaccacatgatgaagatcacccatgtggcgcgcggcgaagagtggctggcctcggtgccgaagcacatcctgctctatacctatctcgggctcgagccaccgcagttcttccacctgccgctgatgcgcaatcccgacaagtcgaagctgtcgaaacggaagaacccgacctcgatttcgtactactcggcgcttggctatctgccggaagcgctgatgaacttcctcggcctgttcttcatccagat

SEQ ID NO: 299862 - DNA, 541 bp, Unknown
  Bacterial polypeptide expressing nucleotide sequence isolated from the Sargasso Sea
gatgtctaaagtagcaacacgttttgctccatcccctactggagctcttcatatcggaggggttagaactgccttatttaattggttattctctaaaaatcaaaaaggaacttttcatctaagaattgaagatactgacaaagaaagatcaaaagaggaacacaaaatacaaattattaaatcattaaagtggataggaattgagcatgatggtgaagaatatattcagtcacaaaaaatggaagatcacattaaaattgctaatgaattattaaaaaaaggcaacgcatataaatgctactgctctgctgaagagatagaggaacaaaaaaaaagagctaggcaaaaaaagatgccatatatttataatagaaaatggagagatgctgatgaaaaagatgctcctagagatattaaacccgtaattagatttaaaagtaaaatagagggaaattctaaacttaatgatttagtgcaaggagatgttgaaattgaaaataatacaatagaagattttataattttaagaaacgatggaaca

SEQ ID NO: 299863 - DNA, 133 bp, Unknown
  Bacterial polypeptide expressing nucleotide sequence isolated from the Sargasso Sea
aatgaataatcctcgtgtaagattcgcaccaagtcctaccggttatttgcatattggtggtgcaagaacagctttatttaattggctttttgcaaaacagaataagggccagtttttgttgcgaattgaggat

SEQ ID NO: 299864 - DNA, 778 bp, Unknown
  Bacterial polypeptide expressing nucleotide sequence isolated from the Sargasso Sea
acctataatctgtcagcatccgttgatgatcatcaaatgaaggtgacacatataattagaggtgatgaccataaaattaatacatttaaacaaatgcaaatatatttagcaatgaaatgggagcttccatcatttgctcatattccattaattcacactgtagaggggaaaaaactatctaagagagacaaagcatcaactttagatgactattcaaaaattggtattataccagatgcactaagaaattatcttttaagattaggttggtcatttaaggataaagaaatttttactctagaagaaagtatcaaacattttagtttggaaggtataggtaaatcaccgtcaaaattagatattagtagaattttgtcaatgaatgaacattatattaaacatatgaatgaaaatgatctttttgttcatttaaaaaaatactgcgaagtttataaagataaaatagataacaagtcagaaaagattaagaaatctttaagttttctaaaaaacaaagccaagactcttgaggatatatatattaatgcacaatatcttataaaagataaaataaaaatatcctcagaagatcaaagactattagataacttagcaaaaacaatcttagaagattttttaaaagaatttgaaaacttatccaacataaataaagaaaatttagaaaaaattataaatgacttaataaaaaacaataaaacaaacttcaaaggagttggtcaacctctaagagtggctttggtaggatcaaaatttggcc

SEQ ID NO: 299865 - DNA, 904 bp, Unknown
  Bacterial polypeptide expressing nucleotide sequence isolated from the Sargasso Sea
tatgaaaagaggtaatcttgtctttgatctttcaaaaatagatgattttataatcctgaaggcagatggtatgccaacttatcatttggctaatgttgttgatgactcagaaatgaaaataagtcatgttcttagaggggaggaatggatatcaagcactccaaaacatttactaatttataattttattaatgctaaagttcctgaatttatccacttacctttaatatttggaaaagataaatcaaaattaagtaaaaggcatggagcaaattcaattatagaatataagaaccaaggcttacttccaaatgcattattaaattatttagctcttttaggttggtcgccaggaaatgacttagagtttttaaatcctgatgatattgcaaaattgtttgaaataaggggtttaagtacaagcccatcaatatttgatcctaaaaaactttcatgggttaacggtgttcatataagagaattgaatgataaaaagttatcagaaattataaaagaaaaagttaaattaaattcagcctataataatagatatgatgaagataattatttaaaaatcgcatctttaataaaggaaaggattaagtcattacatgatatctacccattaataaaattcttttttgattatgatttgccaaaaaaagaattgatcaaatgcggaaatctcaaaaacaatgaaattaaagatctaattataatgctgatagaagattttaagctattgattgaaaataaaagaattgatactcaaaatattgaagatttattaagaaaaaattgtaaagaattagaattaaaagttagagattatttaagtttgataagaaattgtattactggctcggaaatatcccctcctttatttgagtctatagaaatttta

SEQ ID NO: 299866 - DNA, 836 bp, Unknown
  Bacterial polypeptide expressing nucleotide sequence isolated from the Sargasso Sea
aattaactctctaaaatggatggggattgaacatgatggtgaagagtatattcaatcagaaatgattggtgaacacgtaactattgctaaaagattattagaaaatggaaatgcctataaatgcttttgtagcgcagaggaaatagaggaacaaaagaaaagagctaaacaaaaaaaaattccttatgtatataatcgaaaatggcgaaatattgctgaagatcaagccccaaaggatataaaaccagttataagatttaaaagtaaaatagagggtacttctagtctaaaagacttagttcaaggagacgtggagattgaaaataatactattgaggattttgttattttaagaaacgacgaaacaccgacatataatttatctgcatcagttgatgatcataatatggaaatgactcatatcattagaggagatgatcataaaattaatacttttaaacaaatacagatatatgaggcactaggttgggaaattccacaatttgctcatatacctcttattcatacaatagatggtaagaagctgtcaaaaagagacaatgcctcaacattagaagattactcaaaaattggaattctacctgagtcacttagaaattaccttctaaggttaggatggtcctataaagataaggaaatttttaatttagatgaaagtataaaactttttaacctagagggaataggtaaatcaccttcaaaacttgatattagtagaattctttctatgaatgaatattatattaaaaatagtgaagaagatattttgtacaataagttaaaagaatattgtgagatttataaagataaaatta

SEQ ID NO: 299867 - DNA, 786 bp, Unknown
  Bacterial polypeptide expressing nucleotide sequence isolated from the Sargasso Sea
attcaagttgctaaagaactattaaaaaatggacatgcatataaatgttattgttcaagtgaagaaattgaagaacaaaaaaaaagagctaaacaaaaaaaaattccatatatttatgacagaaagtggagagataaaaaagaagttgacgctccaaaaaacatcgaaccagtaataagatttaaaagtaaaattgaaggatcgacaatattaaaagatttggtgcaaggagatgttcaaatcgaaaataatactatagaagattttattattttgagaaatgacggatctccaacttataatctttcagtagctgtagatgatcaacaaatgaaggtaactcatataattagaggagatgatcataaaattaatacttttaaacaaatgcaaatatataatgctatgcaatgggaacttccaaattttgcacacataccattgatacacacaacagaaggtaagaaactatctaaaagagataaagcttcaactcttgatgactattctaaaattgggataatgcctgaagcactaagaaattatttgttgagattaggttggtcttttaaagataaagaaatttttactttagaggaaagtatcgaacattttaatttagaaggaataggaaaatctccatcaaaattagataaaagtcgtatattatctatgaacgaatactatataaaaaatattagtgaaaaagatctattcgatagattcaacgaatattgcaaaaactacaaacaagtaattggggcaaataaagaagataagatcaaa

SEQ ID NO: 299868 - DNA, 779 bp, Unknown
  Bacterial polypeptide expressing nucleotide sequence isolated from the Sargasso Sea
gatggctcaatatattacaagatttgctccttctccaacaggcaatttgcatattggaagtgctagaactgcacttttaaattatattattactcaacaaattcactcttctaaattctatctaaggatagaagacacagataaaaaaagatcaaataaggaatttacacaaaacatactaaatggattatcctggttaggaattaaatgggaaaataatgttcaaatacaatcagaacgaattgacaggcataagcaagtagtaaagaatttattagaaaaaaaatttgcgtataaatgtaattgctctgaggaaaaacttaataaaaaaagagattttttaaaaaaaaacaaaaatagctcaaaaaaaatttgtacagattgtaaaaataataatgatgtgcaaaatttatctgaaaattttgttgtcagattaaaacttccagatgaaggagaactaataataaatgataaaatacagggaaaggtaactgtaaaaaataaagaattggatgattttattttattaagaaaagatcaaactccaacatatatgttatcggtcgtcgttgatgataatgatttaggtgtgaattatataattagaggagatgatcatttgaataatacttttaggcaatattatatatacaaatttttaaattggaatattcctgaatatgctcatattccattaattcatggagaagatggctcaaaattatctaaacgacatggtgctgtagatatattagattttaaaaaaaatggatatttaa

SEQ ID NO: 299869 - DNA, 308 bp, Unknown
  Bacterial polypeptide expressing nucleotide sequence isolated from the Sargasso Sea
aatgtcaaaagtagcaactagatttgctccatcgccgactgggccattgcatataggtggagttcgtacagctttatttaactggctatattcaaaaaatcaaaatgggaatttttttttaagaattgaagatactgataaagaaagatccaaagaagaatacaaaaaacaaattattaattcgctaaaatggataggtataaactttgatggagaggaatatgtacaatcaaaaaaaatagatgatcatattaaagttgcccatgaattattaaataaaggtagcgcttataaatgttattgttcat

SEQ ID NO: 299870 - DNA, 445 bp, Unknown
  Bacterial polypeptide expressing nucleotide sequence isolated from the Sargasso Sea
atgaatgtagttacaagatttgccccctcacctacaggtttccttcatattggtggagctagaacggctttatttaattatcttttcactaaaagatataagggtaaatttttgcttagaattgaagatactgacaaagctagatctacagataaagctattaaagcaataatatcaggattagagtggttaaatttaaatcatgatggaaaaattgttttccagtcaaataattcattaaggcacaaaaaaatagcagatgaattattgaaatgtgataatgcgtaccgttgttaccttactaatgaagagcaaaatcaaataagaaatgattgtataaaacgtggactaccctttagaagcccatggagaataaagaaatataataataaaaatgaaaattcgtatgtaattagaattaaaatgccagatgaaggatttacag

SEQ ID NO: 299871 - DNA, 657 bp, Unknown
  Bacterial polypeptide expressing nucleotide sequence isolated from the Sargasso Sea
attttagagggcatgaactggttaggtctgacgtgggacgagggcccgtactatcaaactaagcgttttgatcgttataacgaaatcatcgcgcagatgttagagcagggcactgcttataaatgttattgctcgcgtgaacgtatcgatgctttaagagaagcacaagcggcaaacggcgaagcccaaaaatacgatggttgctgccgtgacttgccagcgcgtgacactgacgagccttttgttgtgcgtttcaaaaaccccatcggcggttcagtggtgtttgatgaccatgttcgtggccgtatcgaattctcaaacgatgcattagatgatctgatcattgcccgtaccgatggcgttccgacttataacttctgtgtggtggttgacgattgggatatggggatcacttgtgtggtgcgtggtgaagaccatatcaacaacaccccacgtcaaatcaatatccttaaagcattaggcgcgcctattcctgaatatgctcacgtgtcgatgattttaggtgacgatggtgccaagttatctaagcgccatggtgcggtaagcgtaatgcaataccgtgatgacggttacctgcctgaagcactgcttaactacttagttcgcttaggttggtcacatggcgatcaagaagtg

SEQ ID NO: 299872 - DNA, 678 bp, Unknown
  Bacterial polypeptide expressing nucleotide sequence isolated from the Sargasso Sea
gatgtcccgatgggcctccggcaaccgtcgatcggtcgccgcgcccgtcacgcgctgcgtcgccaccgagtcgaagatcgagatcaaggtcccgcccaacgacggcaccgtgcgcgtgcgcttcgcgccgtcccccaccggcaacctccacgtcggcggagcccgcaccgcgctcttcaattggctctacgcgcgccggatgggcggcaagttcatcctccgcgtcgaggacaccgacaccgcgcgctccacccgcgagtccgaggacgccatggtcagggatctcaagtggctcggcctcgactgggacgagggacccgacgtcgacggaccctacggcccctaccgccagtccgagcgcggcgccatctacaagcagctcgcgcagcagctcgtggacgagggctacgcgtacccatgcttctgcaccgacgaggagctcgccgcgatgaaggaggagcaggaggcgaaaaagcttccccccaagtacatgggtaagtgggccaccgcctcgaaggaggaggtggacgcggagatggccaagggcaccccgcacacctacaggttcagggtgcccgagggtgagcgcgtcgagattgacgacatgatccgcggcaaggtgggctgggacaccgacaccctcggcgacttcgtcctcctccgatccaacggcatgcc

SEQ ID NO: 299873 - DNA, 902 bp, Unknown
  Bacterial polypeptide expressing nucleotide sequence isolated from the Sargasso Sea
cctcgatccggccgaagctcagcgtcgcatcgctgctggtgaatcccatgtgatccggatgaaggtgccgagcgaaggcgtgtgccaggtcaacgacatgctgcgcggcaccgtcgagatcggctgggatcgcatggacatgcaggtgctgatgaaggccgatggcctgccgacctacttcctcgccaacgtggttgatgaccacctgatgggcatcactcatgtgctgcgtggcgaagagtggctgccgtcggcgcccaagctgatcaagctgtacgagtacttcggctgggagcagccgcagctgtgctacatgccgctgctgcgcaatcccgacaagagcaagctctccaagcgcaagaatccgacctcggtgaccttctacgagcgcatgggttttctgccacaggcgatgctcaactacctcgggcgcatgggttggtcgatgcctgacgagcgcgagaaattcactctgaacgagatgatcgagcacttcgacatcaatcgcgtatcgcttggcggaccgatcttcgatctggagaagctttcctggctgaacggccagtggctgcgcgaactgccggtcgagcagttcgctgccgaagtgcagaagtgggcattcaatccgcagtacatgatgcagatcgccccgcacgtgcagcagcgcgtggaaaccttcagccagattgcgccattggctggcttcttcttctccggtgcattgccgctcgatcccgcattgttcgcgcacaagaagctcgatgcgacgcaggtgcgccaggtcatgcagctaattctgtggaagttggaagcactgcgccagtgggaaaaggagcgcatcaccgcgtgcatcaccctggtggcggaacatctaggcttcaagctgcgcgatgtgatgccgc

SEQ ID NO: 299874 - DNA, 607 bp, Unknown
  Bacterial polypeptide expressing nucleotide sequence isolated from the Sargasso Sea
aatgaaatgtagatttgcaccaagtccaacaggcttacttcatattggtaatgcaagatcagcagttttgaattgggcatacgctcaaaaaaataacggaaagtttatactaagaatagatgacaccgatcaatcaaggtctactaaagaatttgaaaataaaattaaagaaaatctatcttggttaggacttaattgggacaacacttttaatcaatcagaaagattggatatttataaaataaatattgaaaaactaaaaaaaaatggtcgtctatacccttgctttgaaacttcagaagaattatctttaaaaaagaaatccttacttgcttcaggtaaacctcctatttatgataggtcttctttagaacttaccgaaagtcaaattaaagaaaaaattaatttaggacttaagcctcattggagatttaagcttgaagaaaacttaataaagtgggatgatttaataaaaggtgaggtaagatttgatactaaatatcttagtgatccaatattaattagagaggatggatctcttctttatcatttacctttctgtattgatgatattgaagaaagggatactcatataatcagaaggtga

SEQ ID NO: 299875 - DNA, 816 bp, Unknown
  Bacterial polypeptide expressing nucleotide sequence isolated from the Sargasso Sea
aatgtcttttattgcaggtttgcgccctctcctactgggcctcttcatattggcggcgttcggacagccttattcaattggctgttagctaaaaaaaataagggtaagtattttcttaggatagaggacactgataaagaaagatctaaagacgaattcaaaaaacaaattattacatctttagcttggcttggtattgaacatgatggagatgagtatattcaatctaaaaatatatctaaacacgttacaattgcagagaaattgttaaaaaaaggttatgcctacaaatgttattgttctgaagaagaaattaatgagcaaaaagaaaaatgtaaaaaacaaggtatcccatatatttataatagaaaatggagagatgccaaagatttaaaaatcccagagggaataaaaccggtaataagatttaaaagtaaaatatcagggaatacgattataaaagatttagttcaaggggatagaaatatttcaaattctactattgaggattttgtaattttaagaaaagataatactccaacataccagctatcagccacagttgatgatcatgaaatgaaaataacacacgttattagaggtgatgatcatatgattaactcttttaaacagagacaaatttacgaagcaatgggttgggaagttccaaactttgcacacattcctttaattcacagtgagcaaggaaagaaattatcaaaaagagataatgcttccacccttgaagattatattaaaataggggttatatcagacgctttaaggaattatttattaagattgggatggtcttat

SEQ ID NO: 299876 - DNA, 823 bp, Unknown
  Bacterial polypeptide expressing nucleotide sequence isolated from the Sargasso Sea
tatggtaattacgcgttttgctccttcaccgacgggctttttgcacataggaaatgttagagctgctctaatgaactaccttcttgctaagaagagtaatggtatttttattctcaggattgatgacactgatcaagaaagatctaagcaggaatatgtagacgctatcaagacagatttggagtggttaggtctcgaatgggatcgaattgaatatcagtcatctagattagacttatataattccgcgtccgataagcttcgttctattgatttgctctatgaatgttttgagaccccctcagagctggatttaaaacgtaaaaagcaactgaatatgggcaaaccgccagtttatgatcgtgcggcattggctttatcagatgaagaaaaattaaaccttagagataatcgcggtggtggtcactggaggtttaagcttgagcaaaatcgtattgaatggaaggatggaattctgaaagatctttctatcgacgcggcatcagtttcagatcctgttttaataagagcggatggtcaatatttgtatacacttgcatctgtggttgacgatatagatatgggaataacacatgtagtccgtgggtcagatcacgttacaaacacagcgacacaaatccaaatgattaaagctcttgggggtgatatacctaaatttgctcaccactctttgttgactggtcctggtggtgaggccttatcaaaaaggttagggacgttagccctaaaagatttgagagaagccggtattgagccggcagccctatgtagcttgatgtcacgtttaggatcttcccaggca

SEQ ID NO: 299877 - DNA, 844 bp, Unknown
  Bacterial polypeptide expressing nucleotide sequence isolated from the Sargasso Sea
tatgaatccaatcgttaggtttgcaccaagtcctactgggcagcttcatattggtggtgtacgcaccgcgcttttcaattatgcatttgcaaaaaagcatgatggcacttttttaattagaattgaagatactgataaagaaagatcgaaagatgaatatacagtccaaatattagattctttaaaatggttaggtcttgaattcaaaggcgaacctattaagcagtccactagaacagaacggtataatgaagtcatcaattatttacttgaaactggcaacgcatatagatgttttacttctagtgatgaattgcaagaattaagagaaaaaagtgaatcatatttatatcctggaatatggagagatagatcaacagaagagattgaatctaaattaaaagatggtgctcctttcacaatccggttaagaattcctgaaagtgggaaagttgattttgaagatttagtctatgataaaatcagtacagatatttctgaattagatgattttataattgctaggtcagatggtagtccgacatataacctaactgtcgttgtagatgatcatgatatgaatatctctcatgttattaggggagaggatcatatttccaacacgcctaagcaattaatgatttataaagctatgaattgggacagtcctgcttttgggcatctcccaatgatattaggttctgatggtaagcgattaagtaagcggcatggtgctaaaggaactcaagcttataaagaactcgggtatttttctgattctttgattaattatcttgctttactaggatggaaccctggaaatgaggatgaaatttttaattta

SEQ ID NO: 299878 - DNA, 763 bp, Unknown
  Bacterial polypeptide expressing nucleotide sequence isolated from the Sargasso Sea
gacgaactcaacgccatgcgcgaggcccaaatggccagcaagcaagcgccgcgttacgacaaccgccatcgcaacctcagcccggagcaggtcgccgcttatcaggccgaaggccgtcaggccacagtgcgctttcgcatcgatgacagccgcagcatccagtggaaggatctggtgcggggatccatgagctggagcggggccgacctgggtggcgacatggtgattgcccgccgcgctccagccgatcaaattggcgatccgctttacaaccttgtggtggtggtggatgacgccgccatggagatcacccatgtaatccgcggcgaggaccacatcgccaacaccgccaagcaactgctgctctacgaagccctgggactgccgcttcccgagttcgcccatacccccctgatcctcaaccaggagggccgcaagctctccaagcgtgatggcgtcacctcggtgagtgacttccgaggcatgggctacaccgccagtgccctggctaattacatgacccttttgggctggtctccgcctgagggcatgggggagcggttcagcctggttgatgccgccaaggtgttcgacttccagcgcgtgaacaaagctggagctcgctttgattggggcaagctcaattggctcaatggtcaggtgttgcatgagctgggagcagccgaactcaaccgccgactaacgcccctctggcaggaggcaggttttgaggttgccaaccgcagccaggcctggtggagca

SEQ ID NO: 299879 - DNA, 355 bp, Unknown
  Bacterial polypeptide expressing nucleotide sequence isolated from the Sargasso Sea
atgttaaaagttgcaactagatttgctccttcaccgacaggtccattacatataggaggtgtaagaactgcattgtttaattggctattttcaaaaaatcaaggtggaaaattttatttaagaattgaagacactgacaaagaaagatcaaaagaagaatataaaaatcaaataatacaatcactcaaatggataggtatagaacatgatggtgaagagtatatacaatctaaaaaaattaatgatcatattaatgtggctaatgaattattaaaaaatggtaatgcttataaatgctattgttcaaatgaagaaatagaagaacaaaaaaaaaggtctagacaaaagaaaattc

SEQ ID NO: 299880 - DNA, 822 bp, Unknown
  Bacterial polypeptide expressing nucleotide sequence isolated from the Sargasso Sea
gcttacgatgagattcgcggagaattaactttttattctaatgagctcgaagacaaagttattcttaagtctgatggaatgccaacctatcatttagcaaatgttgttgacgataatgatatgaaaataacatcagtggttaggggtgaagaatggctctcatcacttcctgttcattatctactttatgagttttttggatggatccctcctaaattttaccacctccctttaattttaaaaactggtggtgcgggtaagctttcaaaaagagatgcagatgaacaggggcaccctgtttttgctgttaaatgggaagactctaatgggtttaaagagcacggttttgttcctgaaggccttaataattacctggcgcttctaggttggagcaacaaagaagaaaaggagaagtatacaatggaagagctggttgaatcttttaactatggggaaataaacaaatcaggagctcgttttgattttaaaaaagcgctgtggattaatcacttgcacctaaaagatcttgattctaaaagaatattagatctctctgaacaaacaaaaaaattgctggttgaaagatatggcgagcccgaagctatagaaattgttgagttagttaaagagagactgaacacctccaaagacattgacaaagagctttcagtttttattaagcagcctaaggaaattaatgcgtcagcaattgaaaaaattaacagagaggtaatatttagtgttttaaatttttgtaaattaaatagtgagcttattaacagtccttttgaacttaaaaatgagcttatgaagtttggagca

SEQ ID NO: 299881 - DNA, 721 bp, Unknown
  Bacterial polypeptide expressing nucleotide sequence isolated from the Sargasso Sea
atgaaaaaagtagcaacaagatttgctccatctcctactgggcctctacatattggtggtgtgagaacagctttatttaattggttatattctaagagccaaaaaggagatttttatttaagagttgaagatacagataaagaaagatcaaaagatgaatacaaagatcaaatagttaaatctcttaagtggattggtattaattatgatggtgaagaatatatacaatcgaggaaaattaaagatcatataaaagttgcgaatgaattacttaaaaatggttacgcatataaatgttattgttcaagtgaagaaatagaagaacaaaaaaaaagagcaagacaaaaaaaaattccttacatttatgatagaaagtggagagacaaaagtgaaacggatgctccaaaagatatcaagccagtaattcgatttaaaagtaaaataaatggaacatctgtatttaaagatttagtacaaggtgatgttgaaatagaaaataatactattgaggattttattattttaagaaatgatggcacaccaacatataatttatcagcatcagttgatgatcatcaaatgaatatgacgcacattattagaggtgatgaccataaaataaatacttttaaacaaatacaaatttatctagccatgaaatggaatttgccttcatttgctcacatacccttaattcatacaattgaaggaaagaaatatc

SEQ ID NO: 299882 - DNA, 520 bp, Unknown
  Bacterial polypeptide expressing nucleotide sequence isolated from the Sargasso Sea
atgagtgaatcattaatccgaaccaggtttgcccctagtcctaccggtttacttcatatcggaggagcaagaacagctttatttgcttggcttttcgcgaaatctaattcaggttcttgtcttcttagaatcgaagacacagataatgaaaggtccaaaccagaatatacaaatgagattatcaatagttttaattggatgggagttaattttgatgaggatgttgtttatcagtcaaaaaattatgagcgccatctagaagtagcaaaagaattactaaagaatggaaaagcatattattgtaattgttctaaagaaagattagaccaattaaggaaagagcaacaggagcgaggtgagagtgcaaagtatgatggtaagtgtagaaatctttccatcagtgaatcagagaatacagttataaggtttaagaactctgatgaaggtagtgttgtctttaaagacctaattaaaggtcaaatagaatttagtaacgaggagatggagacttcatcatagt

SEQ ID NO: 299883 - DNA, 891 bp, Unknown
  Bacterial polypeptide expressing nucleotide sequence isolated from the Sargasso Sea
atattcaatctaaaaatatatcaaaacacgtcgcagttgcagaagaattgttaaaaaaaggttatgcttacaaatgttattgttccgaagaagaaattaatgagcaaaaagaaaaatgcaaaaaacaaggaatgccatacgtttataatagaaaatggagagatgccaaagatttaagaattccagagggagttaaaccggtaataagatttaaaagtaaaatatcagggaatacgattataaaagatttagttcaaggggatagaaatatttcaaatgctactatcgaggattttgtaattctaagaaaagatcatactccaacataccagctatcggccacagttgatgatcatgaaatgaaaataactcatgttataagaggagatgatcatatgattaactcttttaaacaaagacaaatttacgaagccatgggttgggaggttccaaactttgcacacattcctttaattcatagtgagcaaggaaagaaattgtcaaaaagagataatgcttctactcttgaagattatattaaaataggggttatatcagatgctttaaggaattatttattaagattgggatggtcttataaagataaagaaatttttacaaagcaggaaagtatagatttatttgatctaagtggtgttggaaaatcaccctcaaaattagatatgaataggatttattcaataaatgaaacatatataaagagtatcgatcagaaagatctttttaatttttttaaagaatatgtttcaaaatataaaaaacctgtagatcaatcaaaagacaatatgcttttaaaatcaatgggcttcttaaagaataaagcaaaaactctagaggatatttggaataatgccccaatatattattaat

SEQ ID NO: 299884 - DNA, 643 bp, Unknown
  Bacterial polypeptide expressing nucleotide sequence isolated from the Sargasso Sea
aatgaaaaaagtagcaactagatttgctccatcacctactggtccaatacatattggtggaataagaactgctctatttaattggttatattctaaaaaccaaaatggaaatttttatttaagaattgaagatactgacaaggaaagatcaaaagatgaatacaaaaaacaaattattcaatctctaaaatggataggtatcactcatgacggagaagaatatattcaatcaaaaaaaatagacgatcatattaagattgctaatgaattattaaaaaatggtcatgcatacaaatgttattgttcaaatgaggaaatagaggaacaaaagaagagatcaaggcaaaaaaaaattccctatttctacgatagaaaatggaggaataaaaaagaaactgatgcgccaaaagatataaagccagtcataaggtttaaaagtaaaatagaaggatcgactatactgaaagatttagttcaaggtgatgtggaaatagaaaacaatactatcgaagattttataatattaagaaatgatggtactcctacatataacttatcagcctctgtagatgatcatcaaatgaatatgactcatatcattagaggagatgatcataaaataaatacttttaaacaaattcaa

SEQ ID NO: 299885 - DNA, 853 bp, Unknown
  Bacterial polypeptide expressing nucleotide sequence isolated from the Sargasso Sea
attacttatcaatcacagagattcagtcactacattgacaaggttgaggaacttctcaacaaagattgggcttactatgacaaagtggagaaaaatgaaaagacgagggggactgatttagctcttgcctatgataataggcttaacaaagaaggacatgttatcagatttaggaatcagagagaaaatacaatcagcatcaatgattctgttcacggagaaataaaatttgatccaaaagttttttttgatgttgtaattcttagatcaaatggtgtacccacttataatcttacgtctgtggttgatgacattgatatggaaataacgcatctcatcagaggagatgatcatttaagtaacttacctgtacaagtaaatcttttcaaatcatttgaagcggatgttcctatcttttgtcaccttcctatgattcatgggaccgacggtaagagattatcaaaaagacatggggcagtcgatataaatcattttctcaggcaaggttacagagttgatgctctgataaattatttagtcaaaacaggttggtcacatggagataaagaaatttttagtattaaggaactgctggagctttttgatttagatcgggttaccaagtccgcggcaacttttgatattgataaattgaactggcttaatcaacactatataaaaaatgatgatattgaaaatgtggcagagcagatacttccatacttacacgatcataatccaccgattgaagcatgtaatgatgattatctgaaaaatatattacttcttggcatagaaagagaattctctcttaaaaatattgctaatagcattacatatttttatcaggatg

SEQ ID NO: 299886 - DNA, 859 bp, Unknown
  Bacterial polypeptide expressing nucleotide sequence isolated from the Sargasso Sea
tcgaaaagtaataaaggtaaatgtttattgaggattgaagatacagataaagacagatcaaaagaggaatacacaaactccatacttaaaagctttagttggatgggtattgaatttgatgaagagcctgtctatcaatctaaaaatatttctttgcatcttaaggctataaaaaaattgatagaagaagggcatgcttattattgtcattgctcacaagaaagattagataaattaagaaaggatcagcaaaaggcaggagaaaagccaaaatacgatggtaaatgtagagaacttaacttagaaaaatctgattcttcagttgttcgttttaagaactctcgagaaggagctgtaacatttaatgatttggttagaggagaaattaccatttctaataatgaattagatgacctgattattcttaggtcagatgggtcgcctacttataacctcagtgtagtagtggatgatatgaatatgggaataactcacgttataagaggagacgatcatataaacaatactcctcgacagataaatatttgcaaggcattaggaggagaagaaataacctttggtcatgtgcctatgattcttggagacgatggaaaaagaatgtctaaaagacatggagcaataagtgttgtcgactataaaaacatgggaatactttctgaagcctttttaaattatctagttagattaggttggtctttaggtgataaagaagtcttcacccttgatgaacttataaattgtttttctgaaggaaagataaactctgcaccttcctcattctcaatggaaaagcttacttggtttaataaagagcatttagatctcgtagaagaagacc

SEQ ID NO: 299887 - DNA, 682 bp, Unknown
  Bacterial polypeptide expressing nucleotide sequence isolated from the Sargasso Sea
attttatctcagaattgaagatacagataaagaaagatcgaaagaagaatttaaaaaacaaattttagactcacttgcctggattggtcttaatcatgatgataaagaatatattcaatcattaaatataaaaaagcataaagaaattgctgaagaactcttaaaaaaaggttttgcttacaaatgcttttgcacagaagaagaaattaaggagcaaaaagaaaaatgtaaaaaacaaggtataccttatctttataatagaaagtggagagatcaagaaaatcttgaagtgccaaaaaatattaatcctgttattagatttaaaagtaaaatttctggaaactcagttgttaaagatctggttcaaggagaaattagcgttgcaaactcaattattgaggatttcgtaattctacgaaaagatggctcaccaacttatcaattatccgctgttgttgacgatcatttaatgaaaataacgcatgtcatacgcggagatgatcacaaaataaatacttttaaacaaaaacaaatttatgaggcaatgaaatggaatattcctgaatttgctcacatacctttaattcatagtgaaaaagggtctaagttgtctaagagagataactcatcaactataaatgattatattaaaattggaattttatctgatgccttaagaaac

SEQ ID NO: 299888 - DNA, 856 bp, Unknown
  Bacterial polypeptide expressing nucleotide sequence isolated from the Sargasso Sea
atggttcgtgtaagatttgcgcctagcccgacagggccaatacatattggtggtgttcgaactgcgctatataactatttatataagttaaacagggggggggaatttattcttagaatagaagacaccgacagctctagaagggttgatggggctgaaaaatacatttatgatgttttagactattataaaatcaaggttgacgaggggccccgtgaaggaggggggttcggcccctataggcaaagcgaaaggaaaaaaatttataataaatacattgatttattaattgaaaaggggcttgcttactactgttatgcctcaaaagaagaacttcttagcgcgcgagaagataagggtttttcttataactctaaaacaaggatgttgtttaaaaatagtttaagcttaaatgaagaagaaaacttatcgctactaaagaaaaagaaatatgttgtacggctaaaagtggaggcggacgttgagctaagcataacagacctcctaaggggaaccataaaagtaaattcaaacaatttggaagataagatattagtcaagggagacggcttgcccacatatcattttgcgaatgttgttgatgattatttgatgaagataacaaccataataagaggtgaggagtggcttccgtcgttgccaatccataagttaatatatgatgccctaggctgggaaatgccaaacactgttcatctgcctttgatattaaacccttcgggattaggaaaattaagcaaaagagatgctataagaaataattacagcatattcccgattaagtgggaagagcttgatggccttaaagaaaaggggtttacccgctggacgtcca

SEQ ID NO: 299889 - DNA, 412 bp, Unknown
  Bacterial polypeptide expressing nucleotide sequence isolated from the Sargasso Sea
aatgtctaaagtagcaacaagatttgctccatcacccacaggacctctgcatataggaggtgttagaactgcattgtttaattggttgttttcaaaaaatcaaaaaggatctttttttttaagaattgaagatacggataaagaaagatcaaaggaagagtataaaaatcaaatcatacaatctcttaaatggataggcattgaaaatgatggaaatgaatatattcaatcaaaaaaaataaatgatcatattaaagttgctaacgtattacttaaaaatggtcatgcttataaatgttattgttcaaatgaagaaatagaagaacaaaaaaaaagagcaaaacagaaaaaaataccttacatttatgacagaaaatggagagataaaaatgaaattgatgctccaaaaaat

SEQ ID NO: 299890 - DNA, 896 bp, Unknown
  Bacterial polypeptide expressing nucleotide sequence isolated from the Sargasso Sea
catgataatcactcgatttgcaccaagccctacaggaacattacatattggcggagttagaacagcactttttaattatgtttatgcaaaacaaaataatggtaaatttcttgtaaggattgaagacactgatcaagttcgatcaaaatctgaatttgaggaaaacattattaatggattgcatgacatgggtctcaagccagatgcagatcctgttcggcaatctgaaagaaagcatctttatttagatgcagctcatagaattattgaatcaggccaaggatattattgtaattgttcaccagagaggctggatgagcttagaaatacacagatgaaagctggtaaaaagccaatgtatgacggtaagtgcagagataaagggttggaaaaatctgaaaatacagttttaaggctcaaaacacccaatgatggagaagtaagatttaatgatttggttagaggtgaagtagttttcaataattctgagcttgatgatcttattcttcttagaagtaatgggacaccgacatatcatttatgtgttgtggttgatgatgctgatcaaggcgttacaactgtaataaggggtgaggaccacttaagtaataccccaagacagattcatattcagcaagcccttgagctaccagcaatggagtatgctcacttacctttagtccttggtgaaaataaaaaaagactttcaaaaagagattcggtaactagtctcgatgaatacatctctaaaggatatctacaaacctcaatgattaatatgcttggaagacttgggtggtcaaaaggagataaagagatattttatatagatgatctgcttaaagattttagaattcaagaggtgcaaaaagcgggcgctgtattcgatttaaaga

SEQ ID NO: 299891 - DNA, 922 bp, Unknown
  Bacterial polypeptide expressing nucleotide sequence isolated from the Sargasso Sea
aatgccgaaacaaggatctacctcttttactgatttagtaaaaggtgagattcaagtatcaaatgatcaacttgaagattttataattgaaagaagtgatgggtctgccacttataatttctgcgttgtagttgatgatctggactctaaaattacccatgtaataagaggcgatgatcatgtcaataatacttttaaacaaataaatgtatttaaagcctttaatgaaaatgttcctacttatgggcatgttcctatgatacttggagaggatggtaagagattgtcgaaacgacatggagcattaggagttggtgaatattcctcacagggaatcttgcctgaagctctaaaaaattatctattacgcttaggttggtccaaaggtgatcaagaaatttttgattatcatgaaatggaggagacatttgtggaaggtactcttaatcagtcacctgcaacattctcgatggataaattgctctggtttaacaagcattacttagattctaagagtgaagagcaattgattaatgcaataaacaacaaaaaatttgatggtagtgactattcaaacagtgttcttttggcaattcgagaaaggtgttcaactttaaatgacttcatagttcattcctcttatttcttcaaagatccagaagattttgaagatactttaatcaataaacattgcaaggaaggaacccatggatatttatcattattaaaatcctatttatctgaacttgaaatgtgggatcaaatttcaataaaagaagttatagataagactgtttcagaggtagatgttggctttggaaaaattggattacctttaaggttggctttaacggcaacagtgaactctccttcaattgacttagtttgcgaaatactaggtaagaatatttccttaagagat

SEQ ID NO: 299892 - DNA, 956 bp, Unknown
  Bacterial polypeptide expressing nucleotide sequence isolated from the Sargasso Sea
tctaaaaatcaaaaaggaatatttcatttaagaatagaagatacagataaagaaagatcgaaagaagagtacaaaaaacaaatcattgaatctttaaaatggataggaatcaaagcagatgaagaagaatatgttcaatcaacgaagattaaaaagcatattgaaattgcaaacaaacttttagataaaggttttgcttacaaatgttattgcactgaacaagatatagaagaagaaaaaaaaagagctaaacaaaaaaaactaccctatatttataatagaaaatgcagaaacattaaggatgtaccagaaaatattgatcctgtagtaagatttaaaagtaaaatcgaaggaagtacaactttaaaagatcttgttcaaggtgatgttaatatagaaaatgcaactattgaagattttgtaattttaagaaaagatagcacgccaacatataatctatcagctgcagttgatgacaacgaaatgaatataactcatataattagaggtgacgaccacaaaatgaatacttttaaacaaatgcaaatctttcaaagtatgaattggaatttgccaacttatgttcatattcctttaattcatacttcagaaggcaaaaaattatcaaaaagagataaggcttcaactttagatgattataaaaaaattggtattatgcctaatgcattaagaaattatttgttaagattaggttggtcttttcaggacaaagaaatatttacattagaagaaagtatcaaacattttaatattgaaggcataggaaaatctccttctaaattggatatgagccgtattttatcgataaatgaacattatattaaaaatatagatgaaaatgatctttataatcatttaaaaaaattctgtgaaatctataaaaataaaattgataataaagaggaaaaaatcaaaaaatctctaactttccttaa

SEQ ID NO: 299893 - DNA, 342 bp, Unknown
  Bacterial polypeptide expressing nucleotide sequence isolated from the Sargasso Sea
catgaggttaagatttgctcctagccctaccggctatttacatgttggtggattaagaacagctttatacaatttttttttagctaaacaatctaaaggttcattaattttaagaattgaagacactgatcaaaatcgtttagtacaagatgcggaagaaaatttaattgctatgttaagttgggcgggtattaactttgatgaaggtccccatcttcagggtaaatatggtccatacaggcaatctgaacgactttctatatataaaaaatattatttacaattaattgaacagggcaatgcttatccttgcttttattcaaaacaaagattacatgattt

SEQ ID NO: 299894 - DNA, 883 bp, Unknown
  Bacterial polypeptide expressing nucleotide sequence isolated from the Sargasso Sea
tgattccaatgaactagaagataaagttattcttaagtctgatggaatgccaacctatcatttagcaaatgttgttgacgataataatatgaaaataacatcagtggttagaggtgaagaatggctctcatcgcttcctgttcattatctactttatgagttttttggatggaagcctcctaaattttatcacctccctttaattttaaaaactagtggagcggggaagctttcaaaaagagatgcagacgaacaggggcaccctatttttgctgttaaatgggaagactctgatggatttaaagaacacggtttcattcctgagggtcttaataattacctggcacttctgggctggagcaacaaagaagaaaaggagaagtacacaatggaagagctggttaagtcttttaattatgaggaaataaacaaatcaggagctcgttttgattttaaaaaagcgctatggattaatcacctgcacttaaaagatcttgaatctaaaagaatattagatctctctgaacaaacaaaaaaattgttggttgaaagatatagcgagccagaagctatagagattattgagttagttaaagagagattaaacaccaccaaagacattgacaaagagctttcagtttttattaagcagcctaaggaaattgatgtgtcagcaattgaaaaaattaacagagaggtaatatttagtgttttaaatttttgtaaattaaataacgagtttattaacagttcttcggaacttaaaaatgagcttatgaagtttggagcagaaaacgatatttcttttggaaatattatgaaaacgctaagactttccttggttgggagtctttctggacctgatttatttaagattatagat

SEQ ID NO: 299895 - DNA, 349 bp, Unknown
  Bacterial polypeptide expressing nucleotide sequence isolated from the Sargasso Sea
atgaaaaaagtagcaactagatttgctccatcacctactggtccactgcatattggtggagtaagaactgctctatttaattggttatattctaaaaaccaaaagggtgatttttatttaagaattgaagatacagacaaggaaagatcaaaagatgaatacaaaaaacaaatcatacaatctctaaaatggataggtattactcatgatggagaagaatatattcaatcaaaaaaaatagacgatcatattaagattgctaataaattattaaaaaatggtaatgcatataaatgctattgttcaagtgaagaaatagcagagcaaaaaaaaagagcgagacaaaaaa

SEQ ID NO: 299896 - DNA, 664 bp, Unknown
  Bacterial polypeptide expressing nucleotide sequence isolated from the Sargasso Sea
atgtcaaaaaatacaattaaagttcgttttgctccaagcccaacaggtgagcttcatttgggtggagcaaggactgcgttattcaactggctttttgcccaaaggcagaacggttcttttttccttagaattgaagatactgataaggagcgatccaaaactcagtacactgagcaaataattgattcaatgaaatggttaggattgaattggaaaacgcctgtagtgtatcaatcaggaagaactgagcggtataaacactatttgaatattttgtttaagaacgatctttgttatcgttgtttttgctcaaaagatgagcttcaacaatctaaagtggacggtcatttcttatatccaggtacttgcaggaatttgtctgagcatgaaattaaaacaaagcttaaccaaggcattaccttcacgattcggatcaaaataggctctgggaaaacgatgttcaatgatcttgtgtatggtaaaaacgtaacagatcataatgaattagatgattttatcattattcgctctgatggcactccaacgtataatttttccgttgtggtggatgattatgaaatggagattagccatgtcattcgaggtgatgatcacctatcaaatacttctaaacagataattatttatcgagcactgggttaaa

SEQ ID NO: 299897 - DNA, 635 bp, Unknown
  Bacterial polypeptide expressing nucleotide sequence isolated from the Sargasso Sea
tcttcatataggtggcgtcagaactgcattgtttaattggctttattcaaaaaatcaaaaaggatctttttttttaagaattgaagatactgataaagaaagatcaaaagacgaatataaaaatcaaataataaaatctcttaaatggataggtatagaaaatgatggaaatgaatatatacaatcaaaaaagatagatgatcatattaaagttgctaatgaattactaaaaaatggtcatgcatataaatgttattgcatgagtgaagaaatagaagagcaaaaaaaaagagctaaacaaaaaaaaattccctatatttatgatagaaaatggagagataaaagtgaatcagatgctccaaaaaatgtcaagcctactattagatttaaaagtaaaatagttggaaccagcatattaaaagatttagtacaaggagatgttgaaatagaaaataatactattgaagactttataattttaagaaacgatggatctccaacttataacttgtccgcatcagttgatgatcatcaaatgaacattactcatattattaggggtgatgaccataaaattaatacgtttaaacaaatgcaaatttattcggcaatgaaatgggaattgccatcttttg

SEQ ID NO: 299898 - DNA, 310 bp, Unknown
  Bacterial polypeptide expressing nucleotide sequence isolated from the Sargasso Sea
atgtccataataacacgctttgccccctcacccactgggtatttacatctcggaggagctcgtaccgctctttttaactggctttttgcaaaaaggtacgggggacaatttcttttaagaatagaagacacagatagagcacggtctaatgatttagctatccagcaaatactaaacggtatgcaatggctaggattagactgggatggagatttagtttttcagcattctagatctgagaggcatgttgaggttgccaaaagtcttttagaatcaggcagagcttataaatgcttttcaagcccctgaa

SEQ ID NO: 299899 - DNA, 439 bp, Unknown
  Bacterial polypeptide expressing nucleotide sequence isolated from the Sargasso Sea
gatgtcaaaagtagcaacccgttttgctccatcacctactggagctcttcatattggaggtgtgagaacagctttatttaattggctatactcaaaaaatcagaaaggcacatttcacctaagaattgaagatactgataaagaaagatctaaagaagagtacaaaaatcaaattataaattctttaaaatggataggaatagaacatgatggagatgaatatattcaatcaactaaaattaaagatcatattaaagttgcaaatgaactattaaaaaatggaaatgcatacaagtgttattgctctagtgaagaaatagaagagcaaaaaaaaagagctcaacaaaaaaaaataccttatatctataatagaaaatggagagatgcagatgaaaaagacgctccaaaagatattgagccagtaataagatttaaaagt

SEQ ID NO: 299900 - DNA, 934 bp, Unknown
  Bacterial polypeptide expressing nucleotide sequence isolated from the Sargasso Sea
attgaaagatttagtacaaggagatgttcaaattgataataatactattgaagattttgttattttgagaaatgatgggtcaccaacctataatttgtcggcatccgttgatgatcatcaaatgaaagtgacccatataattagaggtgatgaccataaaattaatacatttaaacaaatgcaaatatatttagcaatgaaatgggatcttccatcatttgctcatattccgttaattcatacatcggaaggaaaaaaactatctaaaagggacaaacaatcaactctagatgactattcaaaaattggcattatgccagatgcgttaagaaattatctcttaaggttaggttggtcatttaaagataaagaaatttttactttagaagaaagcataaaacactttagtttggaaggtataggcaaatcaccatcaaaattagatatgaatagaattttgtcaatgaatgaacattatattaaaaacatgaatgaaaatgaactttttgatcatttcacaaattattgtgaaaattacaaagaaaaaattaatagcaatgcaaataaaattaaaaagtctctaagttttcttaaaaataaggccaaaacacttgaagatatatacaataactcacaatatttaataaaagataaaattcaaatttcctccgatgatgcaaaacttttagatgatttatcaaaaaaaattttaaatgaattcttaaaaaaatacgaaaaactaacaagtataaataaagaaaatttagaaaaaataataaatagtttaatttcagataacaaaacaaactttaaaggagttggacaacctttaagaattgctttagttggatctaaatttggacctggaatatatgatataattttatctttagataaaaatgatgtaatccaaagattaaaggttattagctaa

SEQ ID NO: 299901 - DNA, 536 bp, Unknown
  Bacterial polypeptide expressing nucleotide sequence isolated from the Sargasso Sea
aatgattaaacagccctctgtacgttttgctccaagcccaactggaaaacttcatttaggaggagctcgaacagcactttttaattggttatatgcaaaacgttatgaaggaaaattctttttacgtattgaggatacagatactgaaagatcaaagaaagaatacacagatcaaattctaaattctctacaatggcttggcttggattggtctgagccaataatttatcaatcaaagcgaagcttgatttataaagaagctgtacaaaaactacttgataatagactcgcatacagatgtttcttaacgaaggaagaattagagcttgcacgtgaaaaatctaagaaggaaggtggcgattttcatgttcccaaaacctatagggatatttcattaaacgatcaaaaaagtttacttaactctggacaatcatttacaataagattaaaagtccctcttaaaggagttacttcttttgaggatgagatatatggaaaaattaatgtaaataataaagagattgatgattttatta

SEQ ID NO: 299902 - DNA, 931 bp, Unknown
  Bacterial polypeptide expressing nucleotide sequence isolated from the Sargasso Sea
tggattggtattaaacatgatggagatgaatacattcaatcaaaaaagatagacagtcatgtaaaagtagctaatgaattattaaaaagtggtaatgcttataaatgttactgttcaactgaagaaatagaagaacaaaaaaaaagagcaaaacaaaaaaaaattccttatgtttacaatagaaaatggagaaatatgaatgaagctgaagctcctaaggatataaagccagtaataagatttaaaagtaaaattgatggaacttctatattaaaagatttagttcaaggtgatgttgaaatagaaaacaatactatcgaagattttgttattttgagaaatgatggaacaccaacttacaatctttcagcatctgtagatgaccataatatgaatattactcatgttataagaggagatgatcataaaattaatacatttaaacaaatgcaaattcatgttgtgatgaaatggaagttgccatcatatgcgcatatccccttaatacatactattgatggaaaaaaattatcaaaaagagataaggcctcaacattggatgactattcaaatatcggcattatgcctgatgctttaagaaattatctcttaagacttggttggtcttataaagataaagaaatatttaccttagatgaaagtatcaaacattttaatcttgaaggaataggtaaatctccatcaaaacttgatataagcagaatcttatcaatgaatgagcattatattaaaagtattgatgaaagtgaactttttactcaattaacaaaatattgtgaaaattataaacaaaggatccccagtgaaaaagagaataaaattaaatcctcgttggtatttcttaaaaacaaagccaaaactttagatgatatatacaataactctaaatatataattcaagataagatca

SEQ ID NO: 299903 - DNA, 565 bp, Unknown
  Bacterial polypeptide expressing nucleotide sequence isolated from the Sargasso Sea
aatgtcttttaattgtaggtttgcgccctctcctactgggcctcttcatattggtggagttcgaacagccttattcaattggcttttagctaaaaaaaataagggaaaatattttctgaggatagaggacactgataaagaaagatctaaagacgaattcaaagaacaaattattacatctttggcttggcttggaattgaacatgatggcgatgaatatattcaatctaaaaatatatctaaacacgttacagttgcagaggagctattaaaaaaaggttttgcatataaatgttattgctcagagcaagaaattaatgaacaaaaagaaaaatgcaaaaaacaaggtataccatatgtttataatagaaaatggagagatgctaaagatttaaaaattcccgaaggagttaaaccggtattaagatttaaaagtaaaatatcaggaaatacgattataaaagatttagttcaaggggatagaaacatttcaaattctactattgaggattttgtaattctaagaaaagatatactccacataccaactatcggctacggttga

SEQ ID NO: 299904 - DNA, 933 bp, Unknown
  Bacterial polypeptide expressing nucleotide sequence isolated from the Sargasso Sea
caagaaatactcggacgagctggtcgccaaggggcatgctttcccgtgcttctgctccgcccagcgcctcgatgaagtgcgcgcgcagcagatggccaacaaggaaacgccgcgctacgacggtcactgcatgcacctcgacccggccgaggcgcagcgccgcatcgccgcaggcgagtcgcacgtggtgcgcatgaaggtgcccagcgaaggcgtctgcgtggtgccggacatgcttcgtggtgatgtcgagatcccgtgggatcgcatggacatgcaggtgctgatgaaggccgatggcctgcccacctacttcctggccaacgtcgtcgacgaccacctgatgggtatcacccacgtgctgcgcggcgaggaatggctgccgtcggcgcccaagctgatcaagctctacgaatacttcggttgggagcagccggcgctgtgctatatgccgctgctgcgcaatccggacaagagcaagctgtccaagcgcaagaaccccaccagcatcaccttctacgagcgcatgggttacctgccgcaggccatgctcaactacctggggcgcatggggtggtcgatgccggacgagcgcgagaagttctccctggccgagatgatcgagcacttcgatatcaaccgcgtgtcgctgggcggaccgatcttcgatctggagaagctgtcctggctcaacggccagtggttgcgtgagctgccggtggaaaccttcgccgccgaagtgcagaagtgggcgctcaaccccgagtatctgatgaagatcgcgccgcacgtgcagggcagggtggaaaccttcagccagatcgcaccgctggccggcttcttcttctccggcgcgctgaatctggacgccaagctgttcgagcacaagaagctctcgccggatcaggtgcgccagctgatgcaactgatcct

SEQ ID NO: 299905 - DNA, 493 bp, Unknown
  Bacterial polypeptide expressing nucleotide sequence isolated from the Sargasso Sea
aatgtctaaagtagcaacaagatttgctccatcaccaacgggtcctctacatataggaggtgttagaacggcattatttaattggttatttagtaaaaaccaaaatggaacttttcacttaagaattgaagatacagataaagagagatcaaaagatgagtacaaagatcaaataattaaatcacttaaatggattggtattggatatgatggtagtgaatatattcaatcttctaaaataaatgatcatattaatattgctaacgaattactaaaaaatggtcatgcttacaaatgttattgttcaaatgaagaaatagaagaacagaaaaatagagcaaaacaaaaaaaaattccttatatttatgatagaaaatggagagacaaaagtgaaaatgaggctccaaaaaatataaaacctacaataagatttaaaagtaaaattgatggatccactatattaaaagatttagttcaaggagatattgaaata

SEQ ID NO: 299906 - DNA, 875 bp, Unknown
  Bacterial polypeptide expressing nucleotide sequence isolated from the Sargasso Sea
aagatttaaaagtaagattgatggaacttcaatatttaaagatttagttcaaggtgatgttgaaatagataataacacaattgaagattttatcatattaagaaatgatggaactcctacatataatttatcagcatccgtagatgatcaccaaatgaatatgacacacatcattagaggtgatgatcataaaataaataccttcaaacaaatacaaatttatcaagctatgaagtgggaattgccgtcatttgctcacataccattgatacatacaatagagggaaaaaaactatcaaagcgagatcaggcttctacattagatgattattctaaaattggtatcatgccagatgctcttagaaattatcttttaagactaggatggtcttataaagataaagagatatttactttagatgaaagtataaaattttttaatcttgaaggaattggtaaatcaccatcaaagcttgatatgagtagaattttatcaatgaacgaacattatattaaaaatattaatgaaaatgatttattcaatcaattaactgaatattgcaaattatataaaagtgaaattcaatcagataaaaaagataagattaaaaagtctcttactttcttaaagaataaagcaaaaactttggaggatatatttaataatggtctatatattattaaagatgaggtcgattataataaggatgatcttaaattaattgacgataaagcgagaaaagtaatttctaattttaatgatcaatttcagaaaatagatgttccttctagagaaattttagagccaatagtaaatgagcttataaagtcacatggcacaaattttaagggtgttggacaaccactaaggattg

SEQ ID NO: 299907 - DNA, 957 bp, Unknown
  Bacterial polypeptide expressing nucleotide sequence isolated from the Sargasso Sea
attgttcaatgaagaaatagaagaacagaaaaatagagcaaaacaaaaaaaaatcccttacatttatgatagaaaatggagagacaaaagtgaagctgatgctccaaaagatataaaacctacaataagatttaaaagtaaaattgatggatccactatattaaaagatttagttcaaggtaatattcaaatagaaaacaacactatagaagatttcataatattgagaaatgatgggtctccaacttataatttatctgcgtcggttgatgatcatcaaatgaatataacacatataataagaggagatgatcataaaattaatacctttaaacaaatgcagatttatttagctatgaaatgggaaatcccctcttttgctcatatacctttaatacatacaactgaaggcaaaaagctttctaagagagataaagcttcaacattagacgattattcaaaaattggggtaatgccagaggcactgagaaactatcttctaagattaggatggtcttttaaagataaagaaatatttaccgaagaagaaagtattaaatattttaatttagaaggaataggtaaatctccatcaaaacttgatatgagccgaattttatccatgaatgaacattacattaaaaatattgatgaaaataagcttttcaatcgattaataaaatactccgaaatttataaggaaaaaatacctaataaaaaaggagataaaattaaatcatcattagcttttcttaagaacaaagctaaaactttagaggatatatataaaaattctaaatacataattcaggataaagttactattaaccaagaagatattaaactaatagataataaagcaaaaaaaatagtgtcagaattttcaaatagtatttcaaaaatagaaaaatttaaacaaagaaaacttaaaagccaatttattaatgatctcattaa

SEQ ID NO: 299908 - DNA, 880 bp, Unknown
  Bacterial polypeptide expressing nucleotide sequence isolated from the Sargasso Sea
aaaacgtatcgagattatacggaaagccaacaacaagagctagttgatcaaggtaaaccgtttacagtgcgactaaaaattcctgatggtataacagaatttgatgatttagtgtatggaaatattaaagttaataataacgatttagatgattttattattgcaaggtcagatggaactccaacctataattttgtagtaacaattgatgattctgatatgaatattactcatgttataagaggagatgatcatttagcaaatacaccaaaacaaatattagtctataaagctcttggtttaaatgttccaacttttgcgcatttaccaatgattttgggagctgataaaaaaagattaagcaagcgtcatacagctacgaacgttcaagaatatcgcgacaaaggttacacttctgaggcaattcttaattatctttctttgttaggttggaatccagactctgaacaagaaatttttaatttagatgatttaattgatggttttaatctagagcaagttcaaaagaaaccagcaacatttgatgaaaaaaaattattatgggtttccggtcaacatatggccaaaattagtattgatattgttattttagaacttgaaaaactcaatcctagttggggtcaaggacaatcagataaatacaaaagtgatgttttatctttaacaaaagatagatcaaaaacattaacagacttgatggagatttcagatacattttttgttgatcatatcatttatgatatggatatcaaaaataagatttggaatgaaatttcttctcaaattattgatgatttattaaatgctataaatattgaagaaaattttgataaacaaacattagagtccattttgaaaa

SEQ ID NO: 299909 - DNA, 715 bp, Unknown
  Bacterial polypeptide expressing nucleotide sequence isolated from the Sargasso Sea
atgagtgttgttacaagatttgcaccaagtccaactggctctctacacttaggagggctaagaaccgctatatttaattatctctatgcaaaaaaaaaccagggaaaattgattttgagaatagaggatactgaccaggaaaggtcaacagaaggctctttacaagaaatcatcacttcgctggaatggctaggcatagaatgggatgaagggccatatctacagtctagcagattaaatatttatactgatttcgttaatatgcttcttgataaagatttagcttacaaatgcttcacaacaaatgaggaaataaaagaattaaaagaaaaagctgctaaaaataaggaaatatacagatatcccagaatctggagagatagacgggaccatcctcaaaattctaactacgtaattagatttaaagttccagatttaaaagaaataagttttaccgatactttgagaggtcaaataaatatcgattcttcaaatttggatgattttgtcatagttaagagtgatggcttccctacttataatttcgcatcagtagttgatgatgctgatatgggcgttactaatatcattagaggtgaagaccatctttcaaataccgccaaacagatgctaatatttgacgcaatagagaaagagccaccctcttttacacatgtttcaatgattctaggaaaagataagaacaagcttagca

SEQ ID NO: 299910 - DNA, 889 bp, Unknown
  Bacterial polypeptide expressing nucleotide sequence isolated from the Sargasso Sea
cgtgataaaactgactctgaagcccctaaaaatatcaaaccagttattagatttaaaagcaaaattgatggatcaacagttttaaaagatttagttcaaggagatgttcaaattgaaaataataccattgaagattttgtaattctaagaaatgatggaacaccaacctataatttgtcagcatcagttgatgatcatataatgaatattacgcatataattagaggtgatgatcataaaattaatacctttaaacaaatgcaaatatatttagcgatgaaatgggaacttccatcgtttgcacatattccattaattcatacagttgatggtaaaaaattatcaaaacgagataaggcttcaactttagatgattattcaaaaattggaattatatcagatgctctaagaaattatcttcttagattaggctggtcatttaaagataaagaaatttttaatttagatgaaagtattaaatatttcaatttagaaggcattggaaaatctccgtcaaaactagacatgagtcgtattttatcaatgaatgaacactatataaaaaatattgatgagattaatctttataatttattaaatgaatattgcgccagatataaaatagaaataacagctgataaagcacaaaaaataaaaaattcactatctttccttaaaaataaagcgaaaaccttagaggatatttataaaaattctcaatatataatttcagataaggtaaattttaatgatgatgatctaaaattgattgacgaaacctctaaaaaaatcatatcagaatttcatggtaaaatttctgagttaaataagtttaacagagaggcattagaacctattataaatgatttaattaaatcaaataatacaa

SEQ ID NO: 299911 - DNA, 838 bp, Unknown
  Bacterial polypeptide expressing nucleotide sequence isolated from the Sargasso Sea
agctgtagtagatgatcatgaaatgaaaataacacatgtaataagaggagatgatcataaaataaatacttttaagcaaaaacaactttatgaagctatgaaatggaatgtccctgaatttgcacatatacctcttattcatagtgaaaagggatcaaagttatctaaaagagatatggcttctaccataggagactatatcaaaaaaggaattttagcagatgcattgagaaattatcttttgcgtttgggttgggctcataaagataaagaaattttttctcttgaggaaagtataaatttattcgatttaaaaggtgttggaaaatctccttccaagttagatctgtctagaattttatcgcttaatgaacattacattaaacatattgatgagaaggaattgttcgcattgcttaaagattttgctcaaaattttagagagagcataaatccttcaaaggaaaaggcagttttacaatcaatgagttttttgaaaaataaggcaaaaacactcgacgatatttattgtaattccgaatatattattaaagataacattgatataatgcccgaggataaaaagcttttagatactgaggcaaaaaaaattatatctgaattcttggaaaattttaaaaaaatcgatattccaaataaagaaaaacttgaagaaatcattaataatttgataaaaaaacatagcacaaattttaagggcgtgggtcagccattaaggatagctttagtaggatctagatttggcccgggcatttacaatatcattctttcactcacaaaagatgaagttataaaaagaatttctaaaattaattaa

SEQ ID NO: 299912 - DNA, 835 bp, Unknown
  Bacterial polypeptide expressing nucleotide sequence isolated from the Sargasso Sea
agggattccctatgtttacaataggaaatggagagatgcaggagatcttaaagttccagagaatgttaaaccagttattagattcaaaagtaaaatttctggaatgtcctcaataaaagatttagtgcaaggtgaaatgaatgtatctaatctaactatcgaagactttataattttaagaaaagataataccccaacatatcaactttctgcaacagttgatgataatgaaatgggaataactcatgtaattagaggcgatgatcataagattaatacttttaaacaaaaacaaatatatgacgccatgaattggactgtgcctgaattcgcgcacataccattaattcatagcgaaatagggaagaaactttctaaaagagataaagcttcaaccattgatgattatataaaaataggaattttatcagatgcccttagaaattatttgttaagattaggttgggctcataaagataaagaaatcttctccttagaagaaagtattgaactttttgatttaaaaggagttggtaaatctccatctaagcttgatatgagcagaattctctctcttaatgaacattatattaagcacatagaggaaaaagaattatttaaattatttgaattttattgtgataagtacaaaaaaccacttgagtcttccaaatccaacgtaattttaaaatcaatcaattttttaaagaataaagccaaaacacttgaggatatccatcaaaatgctcaatacattcttaataataaagtacaaatatcagcagaagatatgaaattgattaatgaatcttctaaaaatattcttaaggatttt

SEQ ID NO: 299913 - DNA, 453 bp, Unknown
  Bacterial polypeptide expressing nucleotide sequence isolated from the Sargasso Sea
aatgaagaatcctcgtgtaagattcgcaccaagtcctactggatatttacatatcggtggcgccagaactgctctttttaattggctttttgccaaacaaaacaatggaaaatttcttctaagaattgaagatactgatcttgaacgttctaaagaagagtatatcaatcaaataactgatgctcttaaatggttaggtttaagctgggatgaagatattattttacagtcaaaaaataatattagacatcaagaaatggtttctagaatgcttaaagaaggaacagcttataaatgttttcttcaaaaagatgagctagataagctcagagcagaatctgaacagaagaaagaagtgtttcgtgttcctcaaatatatagagatttatctcctgaaaaagaaaaagaattaattgaacaaggcaagtcgttcactgttagaattaaagttcc

SEQ ID NO: 299914 - DNA, 946 bp, Unknown
  Bacterial polypeptide expressing nucleotide sequence isolated from the Sargasso Sea
catgtcagtaagaacaagatttgcaccgtcgcctaccggagaacttcatcttgggggagctagaacagcgttatttaattggctattcgcgaagagtcaaaaaggggatttcttgctcagaattgaagataccgatgccaagcgctccaatgatcaaactgcaaaaaacattattggagatttaaaatggctgcagttaaattgggatggagatattgtataccaaaaaaaaaatattgatcaacaccaagaagttataaataaccttttgagatctggacatgcctaccattgctattgcactgaaaaagaaattcacgaactcaagtatacgggtcaagccaatagtttaaaagcgctaagatcgccatggagaaatgaaaacaaacaaaaaaatgatactgaatcttctgttattcgtttcaagacacctgaaaatgtaatcttaaactttaatgacaaagtaagaggattattgagctggaaatctgatgaaattgaagactttgttattgcaagagccgatggaacgccaacatacaatctagcagtggtcactgatgataaaaatatgaaaatatcccacgtaattcgcggagaagatcatatcactaatactattaaacaaacattgatttatagagctctgaattggcgtttaccaatttttgcacatatacccttaatacaaaatcaatcagggcaaaaattatctaaaagggatgggaaaaataacttagtatacttcaaacaagaaggagtcttacctagcgcgatgctaaattacctagctcgacttggatggagttataataacgaagaattcttttctgaaaaacaggccatttcatggttttcattagagggaataggtaaaagtccttcgaaatatgatgaaaaaaaagtaataaatttatgtgggaaagcatttaaaaaccttgaatag

SEQ ID NO: 299915 - DNA, 834 bp, Unknown
  Bacterial polypeptide expressing nucleotide sequence isolated from the Sargasso Sea
attatttaattggttattttctaaaaaccaaggtggcactttccacttaagaatagaagacaccgataaggaaagatctaaagatgaatacaaagatcaaattattaagtccttaaaatggataggtattaattatgacggtgttgaatacatacaatctaaaaatatcgataatcatattaaagttgtaaatgagttattaaaaaatggtaatgcatataaatgttattgttcgagtgatgaaatagaagaacaaaaaaaaagagctaaacaaagaaaaattccttatatttataatcgaaaatggagagataaagataaaaccgatgttccaaaaaatataaagccagttataagatttaaaagtaaaattgatggctctactttattaaaagatttagtacaaggagatattcaaattaacaataatactattgaggattttattattttgagaaatgatggatctccaacttataacttatctgcagcagtagatgatcaacaaatgaaggctacgcatataattagaggagatgatcataagattaatacatttaaacaaatgcaaatatatttagctatgaaatgggaacttccttcttttgcacacattccattaatccacactagcgaaggaaaaaaactatctaaaagagataaagcctcaactcttgaggacttctcaaaaattgggataataccagaagctctaagaaattatttattaagattgggctggtcatttaaagataaggaaatatttactttggatgaaagtattaaacattttaatctagaaggaatcggcaaatccccagcaaaattggatat

SEQ ID NO: 299916 - DNA, 881 bp, Unknown
  Bacterial polypeptide expressing nucleotide sequence isolated from the Sargasso Sea
gaacatattgaaaaatctttaaattggtgtggaattattcctgatgaaagccccaaaatacctggaaaatttggcccttattttcaatctcaaagaaaagatctttatagaaaatatgtcgataaactaataaaaaaaggttctgcctattatgcttttgataaaaaggatgaattagatgcattaagaaagaacagtgaagaagaaggaaaaacgtttatttacaattggctcaatcgagataaactaaaaaactcactatcattaagcaataatgattcaaagaacctaattaataaaggtgaatatgtagtaagatttaagagctatgagccattaaaagataaaaatgaatattatatcaaagatatagtaagaggaaaagttaaaattgatttaaaaaacttagatgataaaattatatataaaagcgatggaatgcctacctaccatctagctaatatagttgatgatcatcttatgaaaattagccatgtaataagaggagaagaatggctaccttctctagcattacattttaaaatctatgaagcatttggttgggaaaaacctttatttgcgcatttaccattaatattaaagccatccggacagggtaaattgagtaaaagagatggtaaaaaatttggtatacctgtgtatccaattgaatggaatgactccaaggaggatattaaatatttaggctttaaagaaatgggttttgaatcagaagcaattctaaattttatttgtatgattgggtggaatccagggaatgaagaagaggtgttttcaatgaaagaattagaatctattttttctttagacaaaataaataaatctggagcaaaatttgattttgaaaaagctaaatggtt

SEQ ID NO: 299917 - DNA, 460 bp, Unknown
  Bacterial polypeptide expressing nucleotide sequence isolated from the Sargasso Sea
atggtcataactagatttgcgccaagtccaacaggtaatctgcatataggtggtgctagaacagcattatttaattggctgtatgcaaaaaatcagagcggtaaatttttattaaggattgaagatacagatataaaaagatcagaagacaaatatgtagagaatatcttagaatcccttgagtggctgggaattgaatatgatgataatttaatatatcaaagtgaaagaagtgatttatacaaaaaagctgtaaataagttattagagatggatctagcttattattgtgactgttccaaagaggaacttgaaaaactcagaacagaacaacaaaaatcaggactaaagccaaaatacgacggaagaaaccgcgaaaagggcttagaaaacggtccaaatactgttgttagattcaaaacgccattaaatgggaaaattattgtcagagatactttaa

SEQ ID NO: 299918 - DNA, 872 bp, Unknown
  Bacterial polypeptide expressing nucleotide sequence isolated from the Sargasso Sea
attgtttaattggttgtattcacaaaataaaaaaggttcattctttttacgaattgaagatacagataaagaaagatcaaaagatgaatataaaaatcaaataatacaatctcttaaatggataggtattgtaaatgatggaaatgaatacattcaatcaaaaaaaatagatggtcatattaaagttgctaatgaattattaaaaagtggctatgcttacaaatgttattgttcaaatgaagaaatagaagaacaaaaaaatagggcaaaacaaaaaaaaattccttacatatatgatagaaaatggagagataaaagtgaagctgatgctccaagagatatcaaaccaaccataagatttaaaagtaaaattgatggatcgactatattaaaagatttggttcaaggagatattgagatagagaataatactattgaagattttattatattaagaaatgatggatcacctacatataatttatctgcttcagtagatgaccatgagatgggtattacacatataattagaggtgatgaccataaaattaatacatttaaacaaatgcagatttatttagctatgaaatgggaagtgccctcttttgcccatataccgttaatacatacaaaggaaggtaaaaagctttctaaaagagataaagcatcaacattagacgattattcaaggattggaataatgccagaagcattgagaaactatcttttaagattaggatggtcttttaaagataaagaaatatttactgaagaagaaagcattcaacactttaacttggaaggaataggtaaatctccatcaaaacttgatatgagtcgtatattatcaatgaacgaacattatattaaaa

SEQ ID NO: 299919 - DNA, 650 bp, Unknown
  Bacterial polypeptide expressing nucleotide sequence isolated from the Sargasso Sea
gatgttaaaagttgcaactagatttgctccttcaccaacaggtccattgcatataggcggaataagaactgctttgttcaattggttattttcaaaaaatcaaggtggaaaattttatttaagaattgaggatacagacaaagaaagatcaaaagatgaatataaaaaacagataattcactcgcttaagtggataggtatagaacatgacggtgaagaatatattcagtcaaaaaaaattaaagatcatatagctatagttaatgaattattaaaaaatggtaatgcttataaatgttattgttcaaatgaagaaattgaagaacaaaaaaaaaggtctagacaaaaaaagattccttacatttataatagaaaatggagagataagaaagaatcggatgcaccagaaaatatcaagccagttataagatttaaaagtaaaattgaaggaaccactaaattgaaagatttagtacaaggtgatgttgaaatagaaaacaatacaattgaagattttgttatcttaagaaatgatgggacgccgacttataatttatctgcatcagtagatgatcatcaaatgaagatgacacatataattagaggtgatgatcataaaattaatacttttaaacaaattcaaatatatg

SEQ ID NO: 299920 - DNA, 511 bp, Unknown
  Bacterial polypeptide expressing nucleotide sequence isolated from the Sargasso Sea
atgtcccaagttgtaactaggatagctccctctcctactggtttcatgcatattgggactgcaagaacagctttatttaactggctatatgcccgcggtagaaatggtaaattttatattcgcatagaagatacagatcgaaagcgatcaactgcagaggcaaatgaagtaattataaatggactaaattggttgggcttagattatgatggagatatagtaagtcaatttgaaagagcaccgcgacacgttgaaatagcagagaagttgttaaaaaatggaaaagcttacaagtgtttcacttctcctggagaaattcaaacttttaaagaaacagcgttaaaaaatggcacatcaactctgtttaaaagcccttggagaaacgctgacccatcaagttatcctggcagtccctatgtaataagaattaaagcccctgaaacaggtgaaacaattatacaagatgaggttcaaggaaaaattagtataaaaaataatcagttagacgata

SEQ ID NO: 299921 - DNA, 407 bp, Unknown
  Bacterial polypeptide expressing nucleotide sequence isolated from the Sargasso Sea
gatgtcttttaattgtaggtttgcgccctctcctactgggcctcttcatattggtggcgttcgaacagccttattcaattggcttttagctaaaaaaaataaaggaaaatattttctaaggatagaggatactgataaagaaagatctaaagacgaattcaaaaaacaaattattacatctttggcttggcttggaatcgaacatgatggcgatgaatatattcaatctaaaaatatatctaaacacgtaaaagttgcagatgaattgttaaaaaaaggttttgcctacaaatgctattgctctgaggaagaaattagtgaacaaaaagaaaaatgcaaaaaacaaggaataccatatgtttataatagaaaatggagagatgccaaagacttgaaaattccagaag

SEQ ID NO: 299922 - DNA, 472 bp, Unknown
  Bacterial polypeptide expressing nucleotide sequence isolated from the Sargasso Sea
atgagtaaatcacctgtaagaacaagatttgctcctagccctactggctacctccacataggcggggcaagaacagcattatttgcttggttattcgcaaagtcttatggcggcgattgcttattaagaattgaagacactgataaagaaagatcaaaagaagagtataccgaggaaattattcgtagttttgagtggttaggtattgagtttgatgaggaagttgtataccaatcaaaaaatgccactcgatataaagaagtcatcgattcacttcttgaagaaggcttggcatacgtttgtagtggagaggatcttcagcaggacaaaaaatttagagacgagaatcttgcaagagatgaaaacacagtggttaggtttaaaatgccggaaaaggacacaacaaagtttgatgatatggtaaaaggacagattgaggttttaaatgacgaattagaggattttataatga

SEQ ID NO: 299923 - DNA, 946 bp, Unknown
  Bacterial polypeptide expressing nucleotide sequence isolated from the Sargasso Sea
agacaccgacaaagagcgcagcaagagcgaattcaccagcaacatcctggatggcctgcattggcttgggatcgactgggacgctgaaccggtgatccaaagcgagcgcgtggagcaccaccgccaggcgatccaacagcttcttgatgctggtttggcgtaccgctgttacgcctcagaagacgaactcaacaccatgcgcgaggcccaaatggccagcaagcaagcgccgcgttatgacaaccgccatcgcaacctcagcccagagcagatcgccgcctatcaggccgaaggccgtcaggccacggtgcgctttcgcatcgatgacagcggaagcatccagtggaaggatctggtgcggggagccatgagctggagcggggccgacctgggtggcgacatggtgattgcccgccgcgctccagccgatcaaattggcgatccgctttacaaccttgtggtggtggtggatgacgccgccatggacatcacccatgtaatccgcggcgaggaccacatcgccaacaccgccaagcagctgctgctctacgaagccctgggactgccgcttcccgagttcgcccatacccccctgatcctcaaccaggagggccgcaagctctccaagcgtgatggcgtcacctcggtgagtgacttccgcggcatgggctacacctccagtgccctggctaattacatgacccttttgggctggtctccgccggagggcattggggagcgattcagcctggttgatgccgccaaggtgttcgacttccagcgcgtgaacaaagctggagctcgctttgattgggacaagctcaattggctcaatggtcaggtgctgcatgagctgggagcagccgaactcaaccgccgactaacgcccctctggcaggaggcaggttttgaggttgccaaccgcagccaggcctggtggagcaac

SEQ ID NO: 299924 - DNA, 855 bp, Unknown
  Bacterial polypeptide expressing nucleotide sequence isolated from the Sargasso Sea
tatcagatttaggaatcagagagaaagtatagttagcatcagtgattctgttcacggagaaataaaatttgatccaaaagttttttttgatgttgtaattcttagatcaaatggtgtacccacttataatcttacgtctgtggtggatgacattgatatggaaataacgcatctcatcagaggagatgatcacttaagtaacttacctgtacaagtaaatcttttcaaatcatttgaggcggatgttcccatcttttgtcaccttcctatgattcatgggactgatggtaagagattatcaaaaagacatggggcagtggatataaatcattttctcaggcaagggtacagagttgatgctttgataaattatttagtcaaaaccggttggtcgcatggtgataaagaaattttcagtattgaggaactgttagagctttttgatttaggtcgggttaccaaatccgcagcaacttttgatattgataaattgaactggttaaatcaacactatatcaaaaatgatgacattgataatgtagcagagcaaatacttccatacttacaagaacaaaatcttccaaataaagtatcaaatgatgattatctaaaaaatatattacttctcggaattgagagagaattctctcttaaaaatattgctaatagcattacatatttttaccaggatgagattcattacgattttaatacaattgcgaagtatgaaaaaactcagactataaaaatactgaaagatattgttactaaattttttactatagatttcaatgacaagccgtcaataagtgcctgtgttaagtcatcatgtgaagatctcaagcttaagtttaa

SEQ ID NO: 299925 - DNA, 556 bp, Unknown
  Bacterial polypeptide expressing nucleotide sequence isolated from the Sargasso Sea
aatgtcttttaattgtaggtttgcaccgtcccctactggtccacttcatattggaggggttagaactgcattattcaactggttgttagcaagaaaaaataaaggaaaattttttcttagaatagaagatactgacaaagaaagatctaaggaagaatttaaagaacaaataatttcatcattagcatggttaggtattaagcatgatggcgaagaatatattcagtcaaagaacgttaaaaaacatatttcaatagccgaagaacttcttaaaaaaggatttgcatataaatgttattgttctgaacaggaaattaatgaacaaaaagaaaaatgcaagaaacaaggtataccttatgtttacaataggaaatggagagactcaaaagatcttcaatttccaaaagatgtaaaacccgtaattagatttaaaagtaaaatttcaggaaatacaatcattaaagatttagtgcagggagacagaaatatttccaactcaactattgaggattttataatattaagaaaagatagtactccaacataccagctgtca

SEQ ID NO: 299926 - DNA, 544 bp, Unknown
  Bacterial polypeptide expressing nucleotide sequence isolated from the Sargasso Sea
tatgaaaaaagttgcaactcgttttgcaccctctcctacaggtcctttacatataggtggggtaagaactgctctatttaattggttatattcaaaaaataaaggtggatacttttatttaagaattgaagacacagataaagaaagatcaaaggatgagtataaaaatcaaattataaaatcactcaaatggattggtattgaaaatgatggagacgaatatattcaatcaaaaaaaatcaatgatcatattaaagttgctaacgaattactaaaaaatggttatgcgtataaatgttactgttccagtgaagaaatcgaagaacaaaaaaaaagagctaagcaaaaaaaaattccttatatttatgatagaaaatggagagataaaaatgaaatagaagctccaaaagatgtcaaacctacaataagatttaagagtaaaattgatggaaccagtgtattaaaagatatagtgcaaggagatgtcgaaatagaaaataatactgtcgaagactttataattctaagaaatgacgggtcaccg

SEQ ID NO: 299927 - DNA, 865 bp, Unknown
  Bacterial polypeptide expressing nucleotide sequence isolated from the Sargasso Sea
aaaaaacaaagtggtacatttctattaagaatagaagatacagacaaagaaagatctaaagatgaatacaaagatcaaataattaaatccttaaaatggataggtattgattatggtggcaatgaatatatacaatctagtcaaattgataatcacattaaagttgcaaatgagctattgcaaaatggaaatgcatataaatgttattgctcgagtgaagaaattgaagaacaaaaaaaaagagctaaacaaaaaaaaattccttatatttataatagaaaatggagagataaagaagaagcagatgctccaaaagacatcaaaccagtcataagatttaaaagtaaaattgaaggatcggctgcattaaaagatttagtgcagggaaatgttcaaattgaaaataatactattgaagattttgttattttgagaaatgatggatcacctacctataacctctcagcagctgtagatgatcatcaaatgaagataacacatataattagaggtgatgatcacaaaattaatacttttaaacaaatacaaatatataaagcaatgcaatgggaaataccaaattttgcacatattccattgatacacacaactgaaggtaaaaaattatctaaaagagataaagcttcaactcttgatgactattctaaaattggaataattcctgaagcactaagaaattacttgttgagattaggatggtcttataaagacaaagaaatatttactttagaagaaagtatcaaatattttaatttagaaggaataggaaaatcaccatcaaaattagatattagccgtattttatcaatgaacgagtactatataaaaaatattagtgaaaatg

SEQ ID NO: 299928 - DNA, 715 bp, Unknown
  Bacterial polypeptide expressing nucleotide sequence isolated from the Sargasso Sea
cgccgcgaggcgggcaagtcgacggccttaaagccctctgacttgctgttgtctgacgatgagcaggcggcacgaaaagcggcgggcgatgcctatgtgatccgcatgatggtgcccgaggaagagggcgtctgtgccatcgaggatatgttacgcggcacgatcgagctcgactggggcatggtggatgcacagatcctgctgaagtcagacgggctgcctacctaccacctcgccaacgtggtggatgaccatctgatggagatcacccacgtgattcggggcgaggagtggatcaactccgcgccgaaacaccaactcctgtatgagtactttggttgggacatgccggtgctgtgtcatttaccgctgttgcggaaccccgataaatcgaagctgagcaagcgcaagaaccccaccagcatcctctactaccagcgcatgggttacctgcccgaggcggtcgtgaactatttgggccgcatgggctggtcgatgcccaatgaagaagaaaagttcacgctggatgagatgcaggccgcctttgatatcagccgggtgtcactcggcggaccggtgttcgatgtggaaaagctcaagtggctaaacggtctgtggattcgggaatcgctcagcgctgacgagttggtcagacggctgcgcgactgggcgctgaaccgggagatgctggacaaaatcctgccccacgcccagg

SEQ ID NO: 299929 - DNA, 821 bp, Unknown
  Bacterial polypeptide expressing nucleotide sequence isolated from the Sargasso Sea
aatgaaggtaactagatttgctccaagtcccacaggcaatctgcatataggaggagttagaactgctttatttaattatattttttcaaagcaatctggtggtttattcttaataagagtcgaggatactgacagagaaagatcaaagaaggaatatgaagatgacataatatctggattagaatggcttggcatatctcccgataaaacaccgataagacaatcagaaagatcagatatgtatcaaaaagctgctgaaaagctcattgactctggaaatgcctactggtgcgattgttccccagaagatttagaagaaatgcgtgaacagcaagccgccgcaggtaaaaagccaatgtatgatggaagaagtagaaaccttggacttgaaagatcagacaaaactgttcttagattagcaacgccacttgaaggagaaacggtagtaaatgatttaatacgtggcgagataactttcaacaatagtgaattagatgatctaattctattgagaagtgatggtactcccacataccatttctgtaatgttgtcgatgatttcgatcagggtgtaaccacagtaatccgaggggaggatcatattagcaatacaccgagacaaatccatatccagaaagcgcttggctatccagatcttgagtatgctcacttacctttggtgctaggtgaagataaaaaaaggctttcaaaaaggcatgccgcaactagcttaaatgcttataaagaaatgggatttacaaaagaaacaattataaatgccttagcattgcttggttggtcaactgaaaatgaaatttttt

SEQ ID NO: 299930 - DNA, 790 bp, Unknown
  Bacterial polypeptide expressing nucleotide sequence isolated from the Sargasso Sea
tctatttaattggttatattcaaaaaacaaaaaaggtaatttttttttaagagttgaagatactgataaagaaagatcaaaagaagaatataaagatcaaatagtaaaatctcttaaatggattggtataaattatgatggagaagaatatatacagtccaaaaaagttgaagatcatattaaagttgcaaatgaattacttaaaaatggttttgcatataaatgttattgttcgagtgaagaaattgaagaacaaaagaaaagagctagacaaaaaaaaattccttatatttatgacagaaagtggagggataaaaaagaagccgatgcacctaaagatataaagccagttataagatttaaaagcaaaatagatggaacatctgtattaaaagatttagtacaaggtgatgttgaaatagataataatactattgaggattttattattttaagaaatgatgaaactccaacttataacttgtcagcatcagttgatgaccatcaaatgaatatgactcacataattagaggtgatgaccataaaattaatacctttaaacaaatccagatttatcaagctatgaaatgggagatcccctcatttgctcatatacctttgatacacacaattgaagggaaaaaattatcaaaacgagataaagcctcaacgttagatgattattctaaaattggtattatgccggatgcacttaggaattatcttcttagattaggttggtcttataaagataaggaaatatttacactagatgaaagtattaaacat

SEQ ID NO: 299931 - DNA, 946 bp, Unknown
  Bacterial polypeptide expressing nucleotide sequence isolated from the Sargasso Sea
gacgagattagagggtctttaagttttaattcaaatgagatagaagacaaagtaattatgaagtctgatggtatgccaacatatcattttgctaatgttgtagatgatcatgatatgaaaattacctctgttgttcggggtgaggaatggttgtcttcgcttccatcgcatttaactctatataatcattttgggtggtctcctcctaaattttatcaccttcccttaatattaaaaagcacaggccaagggaaactgtcgaaaagagatgctgaagaacagggccaccctgtttttgcagttcagtgggaagagtctaaaggttttaaagagtcaggatatacccctgagggaatgttaaactatctagctttattagggtggaaaggaaaagacgagaacgagaagtattctcttgatgagcttgtcaatagttttgaaagtaaagacataaacaaatcaggggcacgatttgatattaaaaaagctatgtggattaatcaccttcaccttcgagacttttcatcaaaaaaaattctctcattaagcgagcaggccaatcttttattagaaaaaaaatacagtaatgatgtctgtgaacaaattgttgatttgattaaagaaagacttaatactttgtttgatgttgaaaaggaagtgtttgtttttgttagccaaccaaaagtttacgaccaaggggtaatagagaaaattacaagaaacaccatatataatgttctaaatttttgtaaattaaaagaggagttaatttcagagcccgtgttgttaaaagaaagcttgatgacttttgggtctgaaaaccaaatttcttttggaaatattatgaagagtttacgtctttgtatagttgggtgtttgtcaggtccggatttatttaaaattatagatattattggtcctgaagaaacactccacagaatttgaa

SEQ ID NO: 299932 - DNA, 901 bp, Unknown
  Bacterial polypeptide expressing nucleotide sequence isolated from the Sargasso Sea
aagaatgtcaagcctgtaattagatttaaaagtaaaatttcaggaaactcaattgttaaagatcttgtccaaggagaaattaatattgctaactcaatcatagaagattttattattttaagacaagatggttctccaacttaccaattgtctgcagttgttgatgatcatgtaatgaaaattacacacgttataagaggtgatgatcacaaaataaatacttttaagcaaaagcaaatctatgaagctatgaaatggaatatacctgaatttgctcatatacccctcattcatagtgagaaaggatctaagctttctaaaagagataaagcttcaactatagatgactatataaagattggaattttatccgaagctttaagaaattatcttcttcgtctaggatgggctcacaaagataaggaaatctttaacttagatgaaagtataaaactttttgatttaaaaggtgttggaaaatctccatcaaaattagatatgtctagaatactttctttaaatgaacactatattaagcacatggatgaaaaagaattgtttaaatttttaaagatttattctcagaaatttaaaaaaaatatcgatcaatctaaggaaagctcacttataaaatctatgagttttttaaaaaataaagcaaaaacgcttgaggatatttatcaaaactcacaatatattcttcaagataatatcaagatatcccccgatgattccaagcttctagataattcttctaaaaatattataaaagactttcttgatgaatttgaaaaaatgtcaaaaataactaaagaaaatcttgaaaaaactgttaatggtttaattgataaacataaaacaaatcttaaaggtgtgggtcagcccttaagaatagtttaac

SEQ ID NO: 299933 - DNA, 343 bp, Unknown
  Bacterial polypeptide expressing nucleotide sequence isolated from the Sargasso Sea
aatgtctaaagtagcaacaagatttgctccatctccaactggtcctctccacataggtggtgtcagaactgcattatttaattggttgttttccaaaaacaaaggcggaacctttcatttaagaatcgaagatacagataaagaaagatctaaagatgaatataaaaaacaaattgttaaatctttaaaatggataggcatagaatacgatggtgatgaatatatacaatctacaaaaataaataaccatgttgatgttgcaaacgaattgttaaaaaatggaaacgcttataaatgttattgcacaaatgaagaaatagaagaacaaaaaaaaagggctaaa

SEQ ID NO: 299934 - DNA, 639 bp, Unknown
  Bacterial polypeptide expressing nucleotide sequence isolated from the Sargasso Sea
ttgtaagtaaaaaatcagcatcatctaaattttacttgagaattgaagatacagaccatgaaagatcaaagcagaaatacacagataacataactaattctttaaaatggcttggacttaattgggatgaagatattcaagttcagtctaaaagattatcaagacatcaagaagttgctaaagaattacttcaaaaaaagcgagcatttaaatgtatatgctctgaagaaaaaatagctaaccgaagaaaattaattagagaaaataaaaactattctaaaaaaatatgtaatgaatgtaaaaatgataatgatattcaaagtaaagatgaggattttgtagtcagattagacgtgccaaatgaaggaaatttaaaaattaacgatacaattcaaggagatgtttctgtcgcaaatttagaattagatgatttcattttactaagaaaagatcaatcgcctacttatatgttatctgtagtagttgatgatcatgatttaggaatcaattacattattagaggtgatgatcactttattaatacttttagacaatactacatttataaatttatgaattgggatatacctcaatatgctcatattcctcttattcatggagaagatggaacaaaataaa

SEQ ID NO: 299935 - DNA, 760 bp, Unknown
  Bacterial polypeptide expressing nucleotide sequence isolated from the Sargasso Sea
atgaaaaaagtagcaactagatttgctccttctcctactggtcctcttcatattggtggggtaagaactgctctatttaattggttatattcaaaaaatcaatcaggtaaattttatttgaggatagaagatactgataaagaaagatctaaggaaaagtataaaattcaaataattaactctctaaaatggatgggaattgaacatgatggtgaagagtatattcaatcgagaatgattgatgaacacataactattgcaaagaagttgttagaaaaaggaaatgcctataaatgctattgtagtgcagaggaaatagaagaacagaagaaaagagctaaacaaaaaaaaattccttatgtgtataatagaaaatggcgagatatttctgaagatcaagccccaaaggatataaaaccagttttaagatttaaaagtaaaatagaaggcacctctcttctaaaagacttagttcaaggaaacgtggagattgaaaataatactattgaggattttgttattttaagaaatgatggaactccaacatataatttatctgcgtcagttgatgattataatatggaaatgactcatattattagaggagacgatcataaaattaatacttttaaacaaatacagatatatgaggcactaggatgggatattccacaatttgcgcatatacctcttattcatactatagatggcaaaaaactatcaaaaagagataatgcttcaacattagaagattactcaa

SEQ ID NO: 299936 - DNA, 904 bp, Unknown
  Bacterial polypeptide expressing nucleotide sequence isolated from the Sargasso Sea
tcttcatattggaggtgtgagaactgctttatttaattggctatactcaaaaaatcaaaaaggtacatttcaccttagaattgaagatactgataaggaaagatctaaagaagagcacaaaatgcaaattataaattctttaaaatggataggaattgaacatgacggagatgaatatattcaatcaactaaaattgaagatcacagtaaagttgcaactgaactattaaaaaatggaaatgcatataaatgttattgctctagtgaagaaatagaagaacaaaaaaaaagagctcgacaaaaaaaactgccttatatctataatagaaaatggagagatgcagatgaaaaagacataccaaaagacattgagcctgtaattagatttaaaagtaaaattgaagggagctctatattaaaagacttggtacaaggtgatattgaaattgaaaataatacaatagaggattttattatattaagaaatgacggaacaccaacatataacctttcagcaactgtagatgatcatcaaatgggaatgactcacattattagaggtgacgaccataaaataaatactttcaaacaaattcagatttatctggctatgggttggaaagtgccaaattttgcacatatacctttaatccatacaattgagggtaaaaagctctctaaaagagataacgcctctacactagatgactattcaaaaattggaattatgccagatgctttaagaaactatttgttaagactgggctggtcttatcaagataaagagatatttaacttagatgaaagtattaaatattttaatctagagggaattggaaaatcaccttcaaaacttgatatgagccgtattttatcaatgaacgagcactatattaaaactatt

SEQ ID NO: 299937 - DNA, 897 bp, Unknown
  Bacterial polypeptide expressing nucleotide sequence isolated from the Sargasso Sea
agaattgacgatacggacacttccagaagcacagatgaattcaaagactcaatcatctcagcactcaaacaactcggcttagaacatgatgataaaattacttatcaatcacagagattcagtcactacattgataagattgaggaacttctcaacaaagatttggcttactatgacaaagtggagaaaaatgagaagacgagggagactgatttagctcttgcctatgataataggcttaacaaagatggacatgttatcagatttaggaatcagagagaaaatataattagcatcagtgattctgttcacggagaaataaaatttgatccaaaagttttttttgatgttgtaattcttagatcaaatggtgtacccacttataatcttacgtctgtagtagatgacattgatatggaaataacgcatctcatcagaggagatgatcacttaagtaacttacctgtacaagtaaatcttttcaaatcatttgaagcggatgttcctatcttttgtcaccttcctatgattcacgggatcgacggtaagagattatcaaaaagacatggagcagtcgatataaatcatttttttagggaaggttatagagttgatgctttgataaattatttagtcaaaaccggttggtcacatggtgataaagaaattttcagcactaaggaactgttggagctttttgatttagatcgggttaccaagtctgcggcaacttttgatattgataaattgaactggcttaatcaacactatataaaaaatgatgacattgaaaatgtggcagagcagatacttccatacttacaagaacaaaatcttccaaataaagcatcaaatgatgattatctaaaaaatatattacttctcgggatgagagag

SEQ ID NO: 299938 - DNA, 310 bp, Unknown
  Bacterial polypeptide expressing nucleotide sequence isolated from the Sargasso Sea
aatgtcttttaattgtaggtttgcgccctctcctactgggcctcttcatattggtggagttcgaacagccttattcaattggcttttagctaaaaaaaataagggaaaatattttttaagaatagaggatactgataaagaaagatctaaagacgaattcaaaaaacaaattattacatctttggcttggcttggaattgaacatgatggtaatgaatatatccaatctaaaaatatatctaaacacgttacagttgcagaggagctgcttaaaaaaggtttcgcatataaatgttattgctctgaggaa

SEQ ID NO: 299939 - DNA, 892 bp, Unknown
  Bacterial polypeptide expressing nucleotide sequence isolated from the Sargasso Sea
aatgaaaaaagtagcaactagatttgctccctcgccttttggtgcattgcatattggaggtgttagaacagcattgtttaattggttatactccaaaaatcacaatggtaaattttatttaagggtggaagatacagataaagaaagatctaaagacgaattcaaagatcaaataatacaatcgcttaaatggatcggtatcaactatgatggggaagaatatattcaatcaaaaaaagtagatgatcacataaaagttgcaaatgagctacttaaaaatggtaatgcatataaatgttattgttcaagtgaagaaatagaagaacaaaaaaaaagagctagacaaaaaaagattccttatatttacgatagaaaatggagagataagaatgaaaatgatgcacctaaagatattaaaccagttattagatttaaaagtaagattaatggaacatcaatattgaaagatttagttcaaggtgatgttgagattgacaataatacaatagaagactttataatcttgagaaatgatgggactcctacatataatttatcagcatccgtggacgatcaccaaatgaacatgacacatattattagaggtgacgatcataaaataaacgccttcaaacaaatacaaatttatcaagctatgaaatgggaattaccatcatttgctcacgtaccattgatacatacaatagaaggtaagaaactatcaaaacgagatcaggcgtctacattagatgactattccaaaataggcataatgccagatgcccttcgaaattaccttttaagactaggctggtcttacaaagataaagaaatatttacattggaggaaagcataaaattttttaatttagaaggtatcggaaaatctccc

SEQ ID NO: 299940 - DNA, 769 bp, Unknown
  Bacterial polypeptide expressing nucleotide sequence isolated from the Sargasso Sea
atgaaaattagaacacgctttgctccaagcccaactggcttcttacacgttggcggcttaagaacagccctatataattttttatttgcaaaaaaaaataaaggtgtatttgtcctcagaatagaagatactgaccaagatagacttattccaaatgcagctcaaaatttaataaaaacacttgaattttgtggtttgaattatgatgagggaccaaatcaaaaaaataaattcggaccatatacccaatctaaacgattacatatctataaaaaatatattttacaattaattaacaacaaacaggcttatccatgtttttttaaaaatgataaaaatgatttagctcctgagtacgatattcaaacagcattagaaagaatgcaaaatgagcaatttgttgtaaaatttaaactttcacatgataaaaatttaaaaacatttgatgaaatcagaggggatgtcatctttgatgtaaatttaatggaggatcctataattttaaaatcagatggatatccaacgtatcattttgccaatgttattgatgatcattgcatgaaaatatctcatgtgatcagaggagaagaatggctaccctctttaccaaagcatattttgctttacaatgcattcaattgggatacgccaaagttttatcatctaccattgctattaaatccagataaaagcaaactatcaaaaagacaaggagatgtaggtgtcgaagattttttaaaaaaatggttacttaaaagaaaagtattat

SEQ ID NO: 299941 - DNA, 682 bp, Unknown
  Bacterial polypeptide expressing nucleotide sequence isolated from the Sargasso Sea
agtggatatcttcatatcggaggtgttcggactgctctttatgcatggctattcgctagaaatcagggcggaaagttcttgctaagaattgagaatactcatataaagaggtcatcccaagaatcaattaattcaattatggaaggtcttaaatggctaggcttggatcatgatggggaagttatcgagcaaagatataggtttgatatttatcagaaaaaagccaatcaattaatcgaagagggaaaggcctatgagtcagaaggtgcagttaggcttaaatccgattgctcttcagatattgttatttcggatcaagtttttggcgatgttaaagttaataaagatgaattggatgatttcattattatgcgctcaaatggagctccaacctatcatctcgcagtagtgattgatgattatgagtcagggattactcatgtcatgagaggcgacgatcatttaaagaatacagcaagacatattcagcttatggaggcttttggttatccaatcccacagtttgctcatctaccaatgattctcggcccggatggctctaggctctcaaaaagacatggtgctatgaatgtgcttcattacagagatgagggtttctcatcggaggctttgctcaattatttggtcaggcttgggtggtctaagggtgatcaggaaatat

SEQ ID NO: 299942 - DNA, 795 bp, Unknown
  Bacterial polypeptide expressing nucleotide sequence isolated from the Sargasso Sea
gcttttagccaaaaaaaataaaggaaaattttatctaagaatagaggatacagataaagaaagatctagagatgagtttaaaaaacaaataattgaatctctgtcatggattggaataaagcacgacgataaagaatttattcaatccaaaaatattaataaacataaagaaattgctgaggatctcttaaaaaaaaattttgcttacaaatgttattgttctgaggaagaaattaaagagcaaaaagaaaaatgtaaaaaacaaggtatcccatatgtttacaataggaaatggagagaccctaaagatcttcaaataccaaaagatgtaaaaccagttatcaggtttaaaagtaaagtttcgggaaatactataattaaagatttagtccagggtgacattaatatatcaaattcgattattgaggattttgttatattaagacaagacggatctccaacttatcaattgtccgcaacagttgatgatcattcaatgaaaatttcacatgtgattagaggtgacgatcataagattaatacatttaaacaaaaacaaatttatgaagcaatgaaatgggatattcctctatttgcgcacatacctttaattcatagtgaaaaaggatctaaactctcgaaaagggataaatcctcaactattgatgactatgttaaaattggaattttacctgatgcactaagaaattacctgttgcgactaggttgggcgtataaagataaggaaatcttttctctagatgaaagtattaaactttttgacctgaaaggtgt

SEQ ID NO: 299943 - DNA, 898 bp, Unknown
  Bacterial polypeptide expressing nucleotide sequence isolated from the Sargasso Sea
aattctactattgaagattttgtaatactaagaaaagattatactccaacataccagctatcagctacggttgatgatcatgaaatgaggataactcatgttattagaggagatgatcatatgatcaattcttttaaacagaaacagatttatgaggcaatgggttgggaagttccaaactttgcacacattcctttaattcatagtgcgcagggaaaaaaattatcaaaaagagacaatgcttccactcttgaagattatattaaaataggaattatttcagatgctttaaggaattatttattaagattgggatggtcttacaaagataaagaaatttttactaagcaggaaagtattgatttatttgatttaagtggtgtcggtaaatctccctcaaaattagatatgaatagaatttattcaattaatgaaacttatataaaatctattgatgaaaaagatctgttcgatttgttcaaggaatatttttcgaaatacaaaaaacccatagatcaaacaaaagaaaaaattatttcaaaatcaatgggcttcttaaagaataaagcaaaaactctagaggatatttggaataatgcccaatatattattaatgataaaatcgagattggcacagatgacaaaaaacttatagatgatttgtctaagaaagttattaaagactttactagtgagtatgaaaaactatccgctttatctagaagtgctttagagactataattaaatctttaattgataaacataagactaattttaaaggtgtgggtcaacctataagaatagcattagtgggttcaagatttgggccaggtatatatgatgttatattgtctttagataaatcagaagtaattaaaagactaaaacaaatttaaa

SEQ ID NO: 299944 - DNA, 652 bp, Unknown
  Bacterial polypeptide expressing nucleotide sequence isolated from the Sargasso Sea
catggcttttatttgcaggtttgctccatcacctacaggaccattgcacatcggtggtgttagaacagcactatttaattggcttttagcaaaaaaaaataaaggtaagttttatttaagaattgaagatacagataaagaaagatcaaaagatgaatttagaaaacaaattatagaatctcttgcctggattggaataaagcatgatgataaagaatatattcaatctaaaaatatcaataaacataaagaaattgctgaagaacttttgaaaaaaggttttgcgtataaatgttattgttctgaagaagaaattaaagaacaaaaagaaaaatgtaaaaaacaaggcataccttatatttataataggaaatggagagatccaaaagatttaaaaattccttcggatataaagcctgttgtaagatttaaaagtaaaatctctggtgatacgaaaattatagatctagttcaaggagaggttaatatttcaaattctattattgaagatttcgtgattttaagacaagatgcatctccaacctatcaattgtcagccgttgttgatgatcatgaaatgaaaattacacatgtgataagaggagatgatcacaaagtaaatacttttaaacaaaaaccaaaatttatgagg

SEQ ID NO: 299945 - DNA, 483 bp, Unknown
  Bacterial polypeptide expressing nucleotide sequence isolated from the Sargasso Sea
tatgagtactgtagcaacaagatttgctccctctcctactggcccactacatattggtggagttagaacagctcttttcaattggttattttcaaaaagtaataagggtaaattttacttaagaattgaagatacagataaagaaagatctaaagatgaatataaaaagcaaattatagattctcttagttggattggtataaaccatgatgatcaagaatatatacaatcaaaaaatataaataaacataaagaaattgctgaagagcttttgaaaaatggattcgcttataaatgctattgttctgaagaagaaattaaagagcaaaaagaaaaatgtaaaaaaaaaggaatagcctatgtgtacaatagaaaatggagagaccctaaagatcttaaaattccagaaaatataaacccagttattaggtttaaaagtaaaatttctggaaattcagttgttaaagatcttgttcagggtga

SEQ ID NO: 299946 - DNA, 889 bp, Unknown
  Bacterial polypeptide expressing nucleotide sequence isolated from the Sargasso Sea
agacaaagtaacaggtctcgcttttataaaaaatatgtagacaaattattaaagcaaggaagtgcttactacgcatttgactcgctagaagatcttgatagcgctagaaaggctgggggaatagattttaaatacaatgtgaaaacaagaatgaggcttagcaactcttttacagtgtctgaagaagaaagaaaaaaaagagtagaagaaggcaggtatgtggtaagactggctattccagaaaataaaaaaatttctgcttacgatgagatacgcggagaattaaattttgattcaaatgaactagaagacaaagttattcttaagtctgatggaatgccgacctatcatttagcaaatgttgttgacgataatgatatgaaaataacatcagtggttagaggtgaagaatggctctcatcgcttcctgtccattatctactttatgagttttttggatggaagcctcctaaattttaccacctccctttaattttaaaaagtagtggagcggggaagctttcaaaaagagatgcagacgaacaagggcacccaatttttgctgttaaatgggaagactctaatgggtttaaagaacacggtttcattcctgagggccttaataattacttggcacttctgggctggagcaacaaagaagaaaaggagaagtacacaatggaagggctgattgagtcttttaattatgaggaaataaacaaatcaggagctcgttttgattttaaaaaagcggtatggattaatcacctgcacttaaaagatcttgaatctaaaagaatattagatctctctgagcagacaaaaaaattgatggttgaaaaatatagcaagtcagaaactatagagattattgaattagttaaagaga

SEQ ID NO: 299947 - DNA, 819 bp, Unknown
  Bacterial polypeptide expressing nucleotide sequence isolated from the Sargasso Sea
aaatgaaaattactcatgtggtcagaggtgacgatcatatgattaattcatttaaacaaaagcaaatctacgattctatgggatggggagttcctaattttgctcatattcctttgatacatagtgagtcaggtaaaaaactttctaaaagagataaagcatctaccatcgatgattatattaaaattggagtaatagcagatgcgctaaggaattatcttttaaggctaggatggtcttataaagataaagaaatatttagtctagacgaaagtattgagctttttgacctaaaaggagttggaaaatcaccttcaaaacttgacatgtctagaatactttctttgaacgagcattatataaagaatatggatgaaaaagaattatttaaacttctgaaaatttatttaaaaaaatttcaaaaaagtttagataaatctaaagaagatagtgtcatcaaatctataggttttctcaaaaataaagctaaaacactagatgatatttataaaaacgcacaatatattttgaatgaaaatatagaaatttcttcagaagatttaaaacttttggatgaaacgtcaaaaaaaatcttaaatgattttgtaaatgattttcaaaaaatgcaattaattaataggactaatcttgaaaaattggtaaatgatcttatcaagaagcataaaacaaacttcaagggcgttggtcaaccattgagaatttctctagttggttctaaatacagacctggtatttatgatattatcctctccttaaaaaaaaaagaagttgtaaaaagaatatctaaaattaattaga

SEQ ID NO: 299948 - DNA, 268 bp, Unknown
  Bacterial polypeptide expressing nucleotide sequence isolated from the Sargasso Sea
aatgaagcataattctataaaagtaagatttgcaccaagcccaacaggtgagctgcatttaggtggtgcaagaaccgcgctgtttaattggctctattctcagaaattaaatggatcattttttcttcgaatagaagatactgataaagagcgatctagtgatatttatactaatcaaattatcgaatctttaaaatggcttgggttaaaatgggatgagccattatatatcaatccggtcgaactgatcgctataaatattatttga

SEQ ID NO: 299949 - DNA, 865 bp, Unknown
  Bacterial polypeptide expressing nucleotide sequence isolated from the Sargasso Sea
tttgctccctcacctactggagctcttcatattggaggtgtaagaacagcattatttaattggctttactcaaaaaatcaaaaaggtacatttcacctaagaatagaagatacagataaagaaagatctaaagatgagcataaagtccaaattgtaaattctttaaaatggataggaattgaacatgatggagacgaatatattcaatcaactaaaattaacgaccatattaaagttgcaaatgaactattaaaaaatggaaacgcatataaatgctattgttctagtgaagaaattgaagaacaaaaaaggagagctagacaaaaaaaactgccttatatctataatagaaaatggagggatacagatgaaaaaattattccaaaagatattaagccagtaattagatttaaaagtaaaattgaaggaagttctgtattaaaagacttggtacaaggtgatgtagagattgaaaataatacaattgaggattttattatattaagaaatgatggaactcctacatataacctttcagctactgtggacgaccatcaaatgggaatgacacacataattagaggtgatgatcataaaataaatacctttaaacaaatacagatatatctagctatgggatggaaggtaccaaattttgcacatatacctttaatccatacaattgaaggcaaaaaactatctaaaagagataatgcctctacattagacgattactcaaaaattggaattataccagatgctctaagaaactacttgttaagattgggctggtcatatcaggataaagaaatatttacaatagatgaggccattaaatactttaatttaaagggaatggaaaatc

SEQ ID NO: 299950 - DNA, 759 bp, Unknown
  Bacterial polypeptide expressing nucleotide sequence isolated from the Sargasso Sea
ttgaaatagataataataatattgaagattttatcattctaagaaatgatggaactccaacatataacctatctgcatctgtcgatgaccatcaaatgaaaatgacacatataatcagaggtgatgatcataaaataaatacctttaaacaaatacaaatttatgaagctatgaaatgggagttaccttcatttgctcatattcctttaatacatacaattgaaggaaagaaattatcaaagagagataaagcatccacattagatgattattctaaaattggtattatgcctgacgctctaagaaattatctactgagattaggatggtcttataaagataaagaaatattcactttagatgaaagtattaaatattttaatcttgaaggaattggtaaatcaccgtcaaagcttgatatgagtagaattttatccataaatgagcattacattaagaatattgatgagaatgatttacttaatcaactaaccgattactgcaaactatataaaagtgaaattaaaccagataaaaaagataagataaaaaaatcattaagtttccttaaaaataaagccaaaaccttagaagatatttataataatggtcaatatatcatggtagataaagtaaattttaatcaagaagatataaaattaattgatgataaagcaaaacaagttgtttctgatttcattagtcaatttaaaaaaattgaacaacctactagagaagttttagaaccgaataattgaa

SEQ ID NO: 299951 - DNA, 646 bp, Unknown
  Bacterial polypeptide expressing nucleotide sequence isolated from the Sargasso Sea
gatgtcaaatgtagcaacacgttttgctccctcacccactggagcgcttcatattgggggtgtaagaacagcgttatttaattggctttactcaaaaaatcaaaaaggtacttttcacctaagaattgaggatactgataaggagagatctaaagaagagcataaaatccaaattataaattctttaaaatggataggtattgaacatgatggtgacgaatatattcaatcaacaaagattgatgatcacatcaaagttgcaaatgaattattaaaaaatggaaatgcatataaatgttattgctctagtgaagaaattgaagaacaaaaaaaaagagccagacaaaaaaagctgccctatatctataatagaaaatggagagatgcagatgaaaaagatattccgaaagatattaaacctgtaattagatttaaaagcaaaattgaaggaaattccattttaaaagacctagtgcagggtgatgttgtagttgataacagtactattgaggattttataatcttaagaaatgatggtactccaacttataacctttcagcaaccgtagatgatcatcaaatggggatgactcacattattagaggtgacgatcataaaataaatacctttaaacaaattcagatt

SEQ ID NO: 299952 - DNA, 817 bp, Unknown
  Bacterial polypeptide expressing nucleotide sequence isolated from the Sargasso Sea
atcagaatagaagatacagattttcttcgatctaaatctgaatatacaaaaaatatattagagggcttgaaatggctcgggcttaaatgggatgaagaacctgtaaagcaaagtgaccgaatttcgattcacaaaagttacatcaaaaagctattggaatgcggtgctgcatataggtgctttacaacagaagatgaaatttctgaattaagagaagaacaaaaaaagaaaggattacctccaaagcatgataatagacacagaaacctttcaaaagaagaaatagaaacattcatttcccaagagaggacttcagtaataaggtttaagattgatgaaaaaattgaaattaagtgggtagatcagataagaggtgaaatcaaatggcatgggaaggatttgggtggtgatttagttttgtcaagaagggcaaaaggatatgagattggagatcctttatataatcttgcagttgtagttgatgacaattttatgaatattactcatgttgtaaggggtgaagaccatatctcgaacactgcaaaacaaatattgatttataaagcattaaattttaatttgccaactttttcgcatacacccttaatactaaatacccaagggaaaaaattatctaagagagattgcgttacttcaatcgacgaatttagagaaatgggatatttacctgaggccttatcgaactatatggcctttttaggttggtctccaaaatctgctgacagagaaatactttcacttgaagagatttctgaaatttttgacttatcagaaataaataaagctggagccaaat

SEQ ID NO: 299953 - DNA, 496 bp, Unknown
  Bacterial polypeptide expressing nucleotide sequence isolated from the Sargasso Sea
atgagtttagtagcaacaagatttgctccatctccaactggacctctgcatataggaggtgttagaacagctctctttaattggttattttcaaaaaataataaaggaaaattttatctaaggattgaagacactgacaaagaacgatctaaagaagaatataaaaaacaaattgtagaatctcttgactggatcgggataaaacatgatgataaggaatatattcaatcaaaaaatataaacaaacataaggaaattgctgaagaacttttaaaaaagggttttgcatacaagtgttattgctcagaagaagaaattaaagaacaaaaagaaaaatgtaaaaggaaaggcataccttatatttataatagaaaatggagagatcctaaaaatattgaaattccaaaagatgttaagcctgtaattaggtttaaaagtaaaatttctgggaactcaattgttaaagaccttgttcaaggagaagttaatattgcaa

SEQ ID NO: 299954 - DNA, 577 bp, Unknown
  Bacterial polypeptide expressing nucleotide sequence isolated from the Sargasso Sea
atgacaacgataacaagatttgcgcctagtccaacgggattattgcacttgggtaatatcagaacagccctcataaattggttgtatgcaaaaaatagtggtggaaaatttattcttcgaattgatgataccgatcaagagaggtcaaaagatgaatacatttctcaaataaaatatgatttggactggctgggaatagactacgacgagacatttaatcagtcttctagatttgaaagatataaggagcaattcgaaaaattaaaatctgatggcaggatatatgcttgctatgaaactcctgaagaacttgagagaaaaagaaagcttcagatggctgccggtggaaagcaagtgtatgaccgttctgcattaaagttaacggagcaacaaattaaagattatgagaatgatggaagaaaacctcattggcgatttcttcttcaaacagaacgcatgaaatggaatgatttattaaagggtgaaattgatattgatttaacaagcttatcagatcctgttttatttcgagaaagatggtgttccactttatacattcagttcagctgtagatgat

SEQ ID NO: 299955 - DNA, 1021 bp, Unknown
  Bacterial polypeptide expressing nucleotide sequence isolated from the Sargasso Sea
tcattgtagaaagctgcaaaaaaaagaggttgagacaaaaatccaatcaggtgaaaagcatgtcatccgcatgaagattcctgaaaaccaggaaaccttccggttgaatgacctagtgcgcggaaccgtagcaatcgagagtactcaagtcgaagaccaggtaatcctgaaaagcgatggattcccaacctatcatctggctgtggtggttgatgatcatttgatgcggatcagtcatgttgtcagaggagaggaatggcttccttcttttcccaaacaccttttgctttaccgctattttggttgggaaccgcctgaattcgtccaccttcctttgatcctaaatgaggaacgggcaaaactcagcaaacgtcatggtgccgttgccgtagaagaattccgcgacagaggttatctgcctcaggcattgctgaatttcattgccctactgggttggaatcccggtgatgaccgggaggttttgagtctggaggaaatggtgcatgaattccgttttgagagggtgtccaagtcgggagcagtttttgaccgtgaaaaactgaattggatgaatcagcagtacctgctgaagttgccggaagaggaatatttcagaatgattgatgatgtgatccagaaaggggattaccatgatcaggatccaggaaaaatcaggcaggctgcagaaattcttaaaactcgcttagtgaccttttcagacctaaaccagaaattaggactttttttcgaagaaaatcctgaaatcaaagatcttcaggcgattcaggttttgaaagaggaaaattcaaagaccgttttgaaagagttcctccaacaagcggaaaatctagatcaattgacttcggaaaatcttgggcaattggtgaaatccgtgcaaaaaagcacggggatcaagggtcgtggtctctggatgccgcttcgttgtgccattaccccgggaggtcagtggcccagaattacctgcgatgctcgattttttttggtgaaggaaaatgtctcc

SEQ ID NO: 299956 - DNA, 544 bp, Unknown
  Bacterial polypeptide expressing nucleotide sequence isolated from the Sargasso Sea
atgttacaaacacgatttgcaccctctcctactggcaatcttcatcttggaggtgctagaactgctttaattaattatattgtaagtaagaaatcagcatcatctaaattttacttaagaattgaagatacagatcatgaaagatcaaaaaaagaatacatagataacataactaattctttaaaatggcttggacttaattgggatgaggaagttcaagttcaatctaaaagattatcaaggcatcaagaaattgctagagaattacttcaaaaaaaacaagcttttaaatgtttttgttctgaagaaaaaatagctagccaaagaaagttaattaaagaaaataaaaattattcaaaaaaaatatgtactgaatgtaaaaatgataatgatcttcaaagtagagatgaaggttttgtagttagattagatgtaccagatgaaggaaatttaaaaattaaagatacaattcaaggagatgttacagtagcaaatttagagttagatgattttatattactaagaaaagatcaaacacccacct

SEQ ID NO: 299957 - DNA, 872 bp, Unknown
  Bacterial polypeptide expressing nucleotide sequence isolated from the Sargasso Sea
tatgcacgagatagtaacaagatttgctccctctcctactggcaatcttcatataggaggtattagaactgctttaataaactatataataacaaacaaaattagaagtttaaattcaaactctaaatttttcttgagaattgaagatacagataaattaagatccaaagaagagtttacgaaaaatataattgatggtttgaaatggatgaatattaactgggataataatataatttatcaatcaaaaaatattgaaagacataaagaaatagcaataaaattattaaaagaaaaagcagcttataaatgtgcatgcagtaaagaagatcttgaaaaaagaaggaaaaataatataaatttgaagagactttgtattgactgtgaaaacaataatgaaatacaatcattaaataaaaattattgtatcagaatcaaaattccttctgaaaatgaaattgagataaatgatttaatacaaggtaaaataaaagttaaaaataaagaattagacaatttcataattttaagagaagactctactccaacctacatgctttctgtagtagtagatgatcatgatatgcgaataaatacaattattcgtggtgatgatcatttaaacaatacttttagacaaattcacatttataaatcattaaattggccgatacctaaatatgcacatttaccactaattcatggacaagatgggaataaactttcaaaaaggcacggagctgttaatatcaatgaatttaaaaatcatggttatttaccacaagctattatcaataatttaatattattgggttggtcaccaaaaaaagaagatgaaataattgaattaaatgaaatattagaaaaatttg

SEQ ID NO: 299958 - DNA, 751 bp, Unknown
  Bacterial polypeptide expressing nucleotide sequence isolated from the Sargasso Sea
aatgcctgcatataaaacaagattttgtccaagtcctacagggcttttacacttaggtaatcttaggacagctcttttgaatgtactcttagcaattaagtcaggaggtgcttttatattaaggattgaagatactgatgcagaaagatcaaaaactgaattctcagaagcggtttgtgatgatctggaatggatgggccttggttggcaagaaggaccaagggttggtggtccagaagactcatattatcaatctgaaagaaactcaatatatgaaagtttctatgaaaaattactagagcaggatttaatttatccgtgcttcactagcgacgaagaattaaaaataataagaagaaatcaaatggccgccggtgagcccccaaggtacactggtatctgggctaatgcctctaaagaagaaatagaaaaagaattagaaaaaggcattcaacctgtgtataggttcagacttcctaaagataaaacaataacttttaaggatttagtgaagggagaacagtcttttcatactactgatttagatgactttatagtaagaaaaaaagatttaagtcctacttttatgtttgccaatgccatagatgattctttgatgggtgtaaatatagttctaagaggagatgatcatttaagcaacacgcctaggcaaattgccttgctggaagctttgaatcttaagattccagaatttattcacgtggctttattcacgggagacgatggtgct

SEQ ID NO: 299959 - DNA, 490 bp, Unknown
  Bacterial polypeptide expressing nucleotide sequence isolated from the Sargasso Sea
aatggttcgtcttcgctttgcacccagtcccactggctatttacacgtaggtggtttacgtactgcgcttttttgctggctatacactcgtaaaaacagtggaaaattcatttttcgtttagaagacacagatcagaaaagaatttttgaaggggctgaaaatcaattaaccagtatgttggaatggtcaggcattgaaattgatgaaggccctcaatatggagggatacatggaccctaccgtcaatctgagcgccttagtatttacgctcaatatatcagattattacttgacgaggggaatgcatacagatgcttttgcacatcagaacgtcttgaaaaactaagaaacgagcagcgcaaaaaagggactaccccgcgttatgatggattttgtagaaatctctccaaatcagaagcatcccggcgagctgaatcaggcgaggattttcgtgtacgaatgaaaattccggaagttccggaaactatg

SEQ ID NO: 299960 - DNA, 820 bp, Unknown
  Bacterial polypeptide expressing nucleotide sequence isolated from the Sargasso Sea
atgaatatcactcatataattagaggtgatgatcataaaattaatacatttaagcaattacaaatttacatagctatgaaatgggaggtgccctcatttgctcacatacctttaattcacactaaagaaggaaaaaaactatcaaaaagagataatgcatcaactttagatgattattcaaaaattggagtaatacctgaggcattaagaaattatcttttaagattaggatggtcttttaaagataaagaaatattttcagaagaagagagtataaaatattttaatttagagggtataggtaaatctccatcaaagttagatatgagtagaattttatcaatgaatgagcattatattaaaaatattgatgaaaatgagctctttaatcaatttactaaatactgtgaaatttacaaagaaaagatacctaatgaaaaattagataaaattaaatcctcattaatgtttctcaaaaacaaatcaaaaaccttagaagatatatacaaaaattctaaatacataattcaagataaagttagtattaatcaagatgatataaaattaatagatgaaaaagcaaaaaaaataatatctgaattttcaaatagtatttcaaaaatagaaaaattaaataaagaaaatttggagccggtaattaatcatataataaaaacaaataaaacaaattttaaaggagttggacaacctctaagaatatttttgactggatcgaaattcggccctggaatttatgatataattggctcacttggtaaagaagaagtgttaaaaagattaggaatgaagatatcttaat

SEQ ID NO: 299961 - DNA, 671 bp, Unknown
  Bacterial polypeptide expressing nucleotide sequence isolated from the Sargasso Sea
tttggaaaaacgtttaagactagccccgagtccaacgggtttatttcatattgggacagcgcgaacagcactattcaattggttgtatgcacaaaaaataggtggaaaatttcttatcagaatagaagatacagatttacttcgatctaaatctgaatatacaaaaaatatattagagggtttgaaatggcttggacttaaatgggatgaagaacctataaagcaaagtgaccgaatttcgattcacaaaagttgtatcaaaaaactattggaatgtggagctgcatataggtgctttacatcagaagatgaaatatctgaattaagagaagcacaaaaaaagaaagggttacctccaaagcatgataatagacacagaagtctttcaaaagaagaaatagaaacattcatatcccaagggcggacttcagtaataagatttaagattgatgaaaaaattgatattaaatgggtagatcagataaggggcgaaatcaaatggcaaggtaaggatttgggaggtgatttagttttatcaagaagggctaaaggatatgagattggtgatcctttgtataatcttgcggttgtagttgatgataatttcatgaatattactcacgttgtaaggggtgaagaccatatctcgaacactgcaaaacaaatattga

SEQ ID NO: 299962 - DNA, 847 bp, Unknown
  Bacterial polypeptide expressing nucleotide sequence isolated from the Sargasso Sea
ggtattactcacgtaatgagaggtgatgatcatcttaagaataccgcaaggcatatccagcttatgaatgcttttaattatccgattcctcaatttgttcatttgccaatgattttaggatcggacggatcgagactctcaaagaggcatggcgccatgaatgttcttcattatagagatgagggtttctcatccgaggctttacttaattatttggtaagacttggctggtctaagggtgaccaggagatattcagtattcaggaaatgattgatggatttgatctttcaggcatcaataaagccagcgctaaatttgatattgaaaaactttgttgggtcaatcagcaacatctgtttaatactgatgatactgagttgaagatgatgctagaagctgggtctgatacagctaaagggctcaatgatgaggtcatgacaaactttatcaatgcttataagaatagggcaaacaccatcaatgatttagtgtctagttgtgacagtcttttctcagatgaaattaaatatgatcaagcttcagctgataagtttctgaaaaaagcgatcctatctcctctaaaagatgttgttaatgttctaaaaaggtctgaatggaaccaagaatcaatttcagaggcattgcagtcagtttgtgaaaaacatgaaataggatttggaaagattggtcaaccgattagaattgctgtaacaggaggtacccaatcaccatccatagatcaaactttaattttattggatcagtcaatagtagttgataggattgaggcagcaatagaatatatagaagaaaattctgaattatctaaagataaagttaattaag

SEQ ID NO: 299963 - DNA, 706 bp, Unknown
  Bacterial polypeptide expressing nucleotide sequence isolated from the Sargasso Sea
gttagcagtagtcgttgacgattacgacatgggaataactcatattattagaggagatgaccatcttaataatgcctttcgtcagttttggatttacaaagcattagattggaaagtccctgcgtttgctcatatacctttaattcatggtgaagatggagcaaagttgtccaaaagacatggcgcacttggaattgaagaatataaagaaatgggatttttatctgaaagtataaactcttatttaatgaatttaggttggagagagcctgaaaaggattttattgatttagatgaagcatcaaaaatatttgaattaaataaaataggaaaatcatcatcaagatttaatattgcaaagttaaaaaatattaattctcattttatgagatcaaaaaatcaaaaatctttaattaatcttattaaagaaaaaattattaccttttctcctaattttgaagaaagattaattaaagtattaccattaattattgaaagagctgaaactataaatgatataattagttcaattaattggctaaattcagaagactatacagttatttttaaagaaaaaaataattttgagaatgaagaaattgaatttttaaaattatttataaaaagtttttcaaattgtaaaatagaatcaaaaagtgaaatggagaatcattttaataaatggctatctcaagaaaatataaaa

SEQ ID NO: 299964 - DNA, 771 bp, Unknown
  Bacterial polypeptide expressing nucleotide sequence isolated from the Sargasso Sea
tttgatcttaggggaaaaacaaaaaaaaagtggattgccacccaagcacgacaatagacatagaaatcttacgagaaaggagattaaagaatttatatctcaaggaaaatcatctgtaataaggtttaaaattgatgaggaaacagagatcaaatgggaagatcagattagaggcgaaattaaatggcaaggcaaggatctcgggggcgatttagttttatcaagaagagctttaggttatgagataggaaatcctttatataatcttgctgttgttgtagatgacaattttatgaatattactcatgttgtaagaggtgaggatcatatctcaaatactgcaaaacaaatattgatttataaagctttaaattttaaattaccaatttttgctcatactcctctaattttaaatagcgaaggtaaaaagctttctaaacgtgattctgtaacttccatcgatgaatttaaagagatgggatacttgcctgaggctttagccaattacatggcatttttaggatggtctataaaatcgcctgaaagtgaaattctttccttatcagaaatatctaaagtttttaatttgtcagatgtaaataaagctggtgccaaatttaattgggaaaaacttaattggattaattcccaatacatcaagaaaatggaattgacacaattatgtaaatttattaagaagtactgggaagaaatgggttgggaatctccttcttcagaatgggatttgaaattgacaaatttaattcaaga

SEQ ID NO: 299965 - DNA, 814 bp, Unknown
  Bacterial polypeptide expressing nucleotide sequence isolated from the Sargasso Sea
tggggaagaatatatacaatcaaacaaaatccaagaccatattaaaatagttaataaattattagcaaaaggtcatgcctataaatgtttttgttcatctgaagaaatagaagagcaaaaaaaaagagcaaaacaaaaaaaaattccatatatatataatagaaaatggagagataagaacgaagcagatgctccaaaaaatattaaaccagtaataagatttaaaagtaaaattgatggaacttcaaaattaaatgatctagttcaaggaaatgtagaaatagataatagtacaattgaagatttcgttattttaagaaaagatggaacgcctacttacaatttatcagcatctgttgatgatcatcaaatggaaatgactcacattataaggggagatgatcataaaataaatacatttaaacaaatacaaatttatgaagctatgggatggagtcttccattatttgctcacatacccttaattcatacaattgaaggaaaaaaattatctaaaagagataatgcatcaactttagacgactactcaaaaataggaataatgccagacgcactaagaaattatctattaagacttggatggtcatacaaagataaagaaatttttgatttagatgaaagtattaagtattttaatcttgagggtataggaaaatctccatcaaaattagatgtaagtaggataatgtctatgaatgaacattatatcaaaaatattgatgaaaataatttatatgagcagctaaatatatattgcagtcaaaataaagaaccaattagtgataaacaaaaa

SEQ ID NO: 299966 - DNA, 637 bp, Unknown
  Bacterial polypeptide expressing nucleotide sequence isolated from the Sargasso Sea
atgactattaagacaaggtttgctccaagtccaacaggctctttacatattgggggagttagaactgcgctctattcttggctacatgcaagacataataatggtagttttgtactacgtattgaggatactgatctagagcgttcgactgatgaagcaacagatattattttaaaatgcatggattggttggggcttgattacgacgaaggaccttattatcaaactcagcgttcaaaacgatatcaagatgtaatagaagagctattggaaactgataacgcctactattgttactgcacaaaagatgaagttgaaaatatgcgtaaagaggcaatgaagcgtggagaaaaaccaaaatataatggctactggcgaaataaaaagagaattcctaaatcaactgaaaaacctgttgttagatttaagaatccgttagatggagaagtagttttagatgatctggttcaaggtaaagttgtatttaataacgaggagctagacgacttaattatcgcgcgtgcagacggaagtgcgacatataatttgagtgttattgttgatgatatggatatgaaaattaccgatgttattcgtggtgaagatcatcttaataacacaccaaggcagataaata

SEQ ID NO: 299967 - DNA, 894 bp, Unknown
  Bacterial polypeptide expressing nucleotide sequence isolated from the Sargasso Sea
aatgatcatcacaagatttgcaccaagtcctactggcactcttcatataggaggcgtacgtactgcattgttcaattatctgcatgcaaaacaaaatgatggaaggttccttattagaattgaagatacagatcaggataggtcgaaactagagtatgaagaaaacatacttaatggacttgcaaagcttggcatgattccggatgagatcccaataagacaatctgaacgccatcaaatatataaagatgccgcacaaaaattaattgattctggacatgcttactggtgcgattgttcaaaagaaatgcttgatgagatgcgtaaagagcaagaagcagctggtaaaaagcctatgtatgacggaagaagtagaagtcttggactaaaacagtctgaaaatactgtattaaggcttgcaacaccagaagagggtgaaatcactgtaaatgatttgattcgaggagaggtaagatttcaaaactcagaattagatgatttgatattactcagaagtgacggtacaccaacctatcatttatgtaatgttgttgacgatttcgagcagaatgtaacaacagtcattagaggagaagatcatttaagtaatacgccaagacaaatgcacattcaacaagcacttggatataatttactagaatacgcacatctaccccttgttttaggagaaaacaaaaagcgactctccaaaagagatgctgtaacatctttagatgactatcttaatttaggctaccttccaacttcaatgattaatgtattagcaagattaggatggtcaaaaggcgatagtgaaattttttatatgaaagatttacttaaagattttagaattcaagaagttcaaaaagcagctgcaattttcaataagac

SEQ ID NO: 299968 - DNA, 835 bp, Unknown
  Bacterial polypeptide expressing nucleotide sequence isolated from the Sargasso Sea
agattttattattttaagaaaagatggaactcccacatatcaattatcagctgttgttgatgatcatttgatgaacattacacacgttattagaggagatgatcataaaattaatactttcaaacaaaaacaaatttatgaagcaatgaattggaaattacctgaatttgcgcatattccattaatacatagtgaaagtggttcaaaattatctaaaagagataaagcttctaccatcgacgattatataaaattaggaatattatctgatgcattaagaaattatttattacgattgggttgggctcataaagacaaagaaatttttaacttggatgagagtattaagtttttcaatcttgaaggggtgggaaaatctccttctaaacttgatatgtctagaatattatctattaacgaacattatataaaaaacatagatgagaaagaattatttaatttatttaaagagtattgcaaaaagtttaaaaaagagattgatacttttaaagaaaaaaaattgcttgattccataaattttttaaaaaataaagcaaaaactttagaggatatatatttaaatgcacaatatatactttctgatacaattaaaatttcaacagatgatctgaaacttttagatgctaactcaaaaaatattttaagagattttttaaaagaattcgaaaatttatcaaatattaataaaaaaaatttagaaaaaataataaataacttaattaaaaataataaaacaaactttaaaggtattgggcagcctttgagagtggctttggttggatcaaaatttggtcccggtatatataatataatt

SEQ ID NO: 299969 - DNA, 724 bp, Unknown
  Bacterial polypeptide expressing nucleotide sequence isolated from the Sargasso Sea
atggttaagactcgttttgccccaagcccaagcggataccttcatattggaggtgtcaggaccgctctatatgcatggctttatgccagaaatcaaggcggaaagtttttgcttcggattgaggatacagatatagaaagatcttctgaagagtcaaaattatcaattcttgaggggatgaaatggctcggtttagaacatgatgaggaaatcattcatcaatctgaaagatttgaggtttatagagcaagagccgatgaattgatatctgcagggaaggcatatgaatcagaaggcgccattcgttttaaatccgatcgctcttcaaatgttataatttcagatcacgtttttggcgatgttgaagtcaatgctgatgaattggatgattttatcatcatgcgttcaaacggggctccaacatatcattttgctgttgtgattgatgattttgaatcaggcattactcatgtcatgagaggtgatgatcatcttaagaacactgcaaggcatattcagcttatgaaggcttttgattacccaattcctgattttgttcatctaccaatgattttaggaccagacggttcaagactctcaaaaaggcatggcgccatgaatgttcttcattacaaagaagagggtttctcatctgaggctttgcttaactatttggtgagactaggctggtctaagggtgatcaggagatattcagcattcagg

SEQ ID NO: 299970 - DNA, 814 bp, Unknown
  Bacterial polypeptide expressing nucleotide sequence isolated from the Sargasso Sea
gataaagaaaggtcaaaagatatttacagtagagatatttttgaaagcatgtcttggctaggcctgcgctgggatgaagaaataatataccaaagcaaaaacaaatcatatcatgttagtctagctgaaaaattattatctgaaaataaagcttacaggtgttattgcaccaaagaagaaattgaagaagctagacttaaggcaaaaaaggataaaaagtcttacaagtataatcgtaagtggagagattttgaaggcaggcttgataaaccttttgtaattagaattaaaattcctttaacccaaagtacagttttaaatgataaaattttaggaaaaataacgataaataataatgaattagatgattttataattctaaggtcagataaaactccaacttacatgttatcagtagtagcagatgataaatctatgggtattacagatgtaataaggggagatgaccacttaacaaatacttttaagcagttgattttatttgatttatttaattgggaaaagcctaactatagccatataccccttattcatagtcaggatggaagtaaactttcaaaaagacatggggatttaagtgtaaaacaatacaagaataatatgctattacctgatgcattgctaaattatttacttagattaggttggggatacggagataaagagtttttttctaaaaaagaagcagttcaattttttaatttagaaggtgtaggaaaatcaccagcaaaatttgatccaaaaaagttagataatataaattcttattatttcaaaaaagttatcttttaaa

SEQ ID NO: 299971 - DNA, 632 bp, Unknown
  Bacterial polypeptide expressing nucleotide sequence isolated from the Sargasso Sea
aatggtgcgcgttcgtctggcccccagcccaacgggaacgcttcatatcggcaccgcccgcacagccgtcttcaactggctgtttgcacaccgccacggtggtcagtttctgctgcgcattgaggacaccgacaaagagcgcagcaagccggaattcaccgagaacattcttgaaggcctgcaatggctcgggctgagctgggacgaagaacccatccaccagagcgcgcgggtcgagcaccatcgccaagccatccagcagctgctggatgccggtttggcctaccgctgtttcgccagcgaggacgaactcacggccatgcgcgagacgcagatggctagcaagcaggcgccccgttatgacaatcgccaccgccatctcaatgccgagaagcaagcagcctttatggccgagggacgcatggccacggtgcgcttccggatcgatgatcagcgcaacatcgaatggaaggatttggtgcgcggtccgatgcgctgggccggagccgacctcggcggagacatggtgatcgcaaggcgtgcaccggccgaccagatcggtgatcccctctacaaccttgtggtggtctgtgatgatgcggccatgggcatcactcacgtgatccgtggcg

SEQ ID NO: 299972 - DNA, 734 bp, Unknown
  Bacterial polypeptide expressing nucleotide sequence isolated from the Sargasso Sea
catggtgcgcgttcgtctggcccccagccccacgggcacgcttcacatcggcacggcaagaactgcagttttcaactggcttttcgccagaaatcagaagggcagcttcctgcttcgcatcgaggacaccgacaaggagcgctccaaacccgaattcacccagaacatcctcgaaggcctccagtggcttggcatcgactgggacgaggaacccgtgatccagagcgagcgggtggagcagcatcgcgacgccatccggatcctgctcgagcaggggctcgcctatcgctgttacgccagcgagcaggagctggaggccatgcgggaagcccagaaggccgccaaccaagcgcctcggtatgacaaccgtcaccggcacctcacgccggaacaggaagaggccttccaacttgagggtcgggaagccgtcatccgctttcgcattgatgactccgaggagatccgctggacggatctcgtgcgaggaccgatgagctggcgcggatccgacctcggcggcgacatggtgatcgcccgcagagctgctgcggatcagatcggcgaccctctttacaacctcgtcgtggttgtcgatgacgccgccatggccatcacccatgtgatccgtggtgaagaccacatcgccaacaccgccaaacagctgctgctctatcaggctctgggactggcagttccggccttcgcccacgcgccgctgatcctcaacgcggagg

SEQ ID NO: 299973 - DNA, 883 bp, Unknown
  Bacterial polypeptide expressing nucleotide sequence isolated from the Sargasso Sea
gtgtataatcgaaaatggcgtgatatttctgaagatcaagccccaagggatataaagccagttataagatttaaaagtaaaatagaaggcacttctctattaaaagacttagttcaaggaaacgtggagattgaaaataatactattgaggattttgttattttaagaaatgacgaaacaccaacatataatttgtccacctcagttgatgatcataatatggaaatgactcatattataagaggagatgatcataaaattaatacttttaaacaaatacagatatatgaagcactaggatgggatattccacaatttgctcatatacctcttattcatacaatagatggtaagaaactatcaaaaagagataatgcctcaacattagaagattactcaaaaattgggattctacctgaatcacttagaaattacctacttaggttagggtggtcttataaagataaggaaatttttagcttagatgaaagtataaaactttttaatttagaaggaataggtaaatcaccttcaaaacttgatatgagtagaattctttcaatgaatgaatattacattaaaaatagtgaagaaaatatattgttcaaaaagctaaaagaatattgtgagatgtataaagatagaattaaagaagataaagaaaatacaataaagagctctttaacatttttaaaaaataaagcaaaaacacttgaggatatatttaacaattctaaatacatattaaatgataaagttatttttaacgacaatgataaagagctgataaacgatgaagcaaaaaaaataatacatttatttaaagagaagatttcagaattagaagtttttgatagagaaaatttagaacaaattataaatg

SEQ ID NO: 299974 - DNA, 861 bp, Unknown
  Bacterial polypeptide expressing nucleotide sequence isolated from the Sargasso Sea
ctccaacatataacctgtctgcatctgttgatgatcatcaaatgaatatgacacatatcattagaggagatgaccataaaataaatacctttaaacaaatacaaatttaccaagccatgaaatggaagcttcccttttttgcacatatacctttaatacatacaattgaaggaaagaaactatcaaaacgagataaagcttctacattggatgattattctaaaattggtattatgccagatgctcttagaaattatcttttaagattaggctggtcttataaagacaaagaaatttttacactagatgaaagtattaaatattttaatcttgaaggaattggtaaatctccttctaaattagatatgagtagaattttatcgatgaatgaacactacattaaaaatattgatgaaaatgatttatttaatcaacttactaattactgcaaattatataaaagtgaaattaaatcagataaaaaagataagattaaaaaatctctaactttcctaaaaaataaagctaaaaccttagaagatatatttaataacggtcaatatatattgcttgataatgttaattttaatcaagatgatattaaattaattgatgataaagcaataaaagtaatttctgattttaatgctaaattcaaaaaaatagatctgccttcgagagaaattttagaaccaatagtaaatgggcttatcaaaactcacgatacaaattttaagggagttggacaaccgttaagaattgctctaactggttcgaaatttggacctggtatatatgatataattttatccttaggtaaagaagaagttcaaaaacgactaagtgcaaagatagcttgaa

SEQ ID NO: 299975 - DNA, 922 bp, Unknown
  Bacterial polypeptide expressing nucleotide sequence isolated from the Sargasso Sea
aaaatttttctcagaatagaagatacagataaagagagatctaaagatgaatttaacttcaaatatataaattctttgaagtggttaagtattgattatgatggaaatgaatatattcaatctaaaaatatatctaagcatgtttctgtagcggaagaacttattaaaaaaggatttgcatatgaatgttattgttcggaagatgaaataaacgaacagaaagaaaaatgtaaaaaacaaggtattccttatgtttacaatagaaaatggagagactctaaagatttaaaaataccaaaagatgttaaaccagtgataagattcaaaagtaaaatttctggaaacacaactataggtgatttggttcaaggagaaagaaatatatcaaactctactattgaagattttgtaatattaagaaaggataaatctcctacttatcagttatctgcaactgtagacgatcatgatatgaaaataactcacgtgataagaggtgacgatcatatgattaattcttttaagcaaaaacaaatttacgatgcaatggaatgggaagttccgaaatttgctcatatacctttaattcatagtgagaaaggtaaaaaactatctaagagagatcatgcgtcaacaataaatgattatataaaaattggtatcattccagaagccttaagaaattatttattacgattaggttggtcctacaaagataaagaaattttttcacttaaagaaagtattgagttatttaactttgaaggaataggtaaatcaccctctaaattagatatgtctagaattttatcaatgaatgaaacttatataaaatctatgaacgaaaaagaattgttcgacaaactattagaattttctaataaattcaaaacaaatattgataaatctaaagaaagtataa

SEQ ID NO: 299976 - DNA, 421 bp, Unknown
  Bacterial polypeptide expressing nucleotide sequence isolated from the Sargasso Sea
aatgaaaccacgagttcgtttcgccccatcacctacaggttttttgcatgtagggagcgctcgaactgctttgtttaattggctttacgcccgatctacaggcggaactttcatacttcgtgtagaagacaccgaccaagagcgaaaccggcccgaactaacccagcaactgctgcaagaattggactggttaggtcttgactgggatgaggggcctatttatcaatcagagaaactggaaagacatcgtgaagtcgtacaagctttcttggaaaatggtcatgcatacctttgcgatagcgaaaataaagaagttcaaggaacttctttagtggaaggtatggcagttaggttccgcatgcctcaagataaaacaatttcctttactgacttagttcgtggagaagtgactttcaataca

SEQ ID NO: 299977 - DNA, 829 bp, Unknown
  Bacterial polypeptide expressing nucleotide sequence isolated from the Sargasso Sea
tctgtctgcaacggtagatgaccaccaaatggggatgacacatattattaggggagatgaccataaaataaatacatttaaacaaatgcaaatttatttagcaatgtcatgggaccttcctcaatttgctcatataccattaatccacactattgaaggaaaaaagctttcaaaaagagataatgcgtcaactctagatgattactcaaaaattggaataattcctgatgcattgagaaattatttactcagactaggctggtcatatcaggataaggagatatttactttaaatgaaagtataaaattatttaatttagaaggtgtaggaaaatcaccgtcaaaattagatatgagtcgtattttgtcaatgaacgaacactatataaaaacaatcgatgagaaagatctctacataaatttagagaaatattgtggaatttttaaagaaaaaattaatcctgaaaaaggagaaaaaataaaatcttcattatcttttttaaaaaataaagcaaaaactttagaggatatatttaataactcaaaatacatcataactgatgacgtgcagtttaatgaagatgatttaaaattaattgatgacaagtcaaaaaaaataattaatgaatttcaaaatcaaattaaatcattggaaattttaactagagataatctagaaccaatcgtgaataatttaatcaaaaactatgagacaaattttaaaggtgtaggtcaacctttgagagtggctctaacaggttctaagtttggaccaggcatatacgatattgttgtatcactaggaaaaagtgatgttgaaaaagactag

SEQ ID NO: 299978 - DNA, 727 bp, Unknown
  Bacterial polypeptide expressing nucleotide sequence isolated from the Sargasso Sea
catgacaaaagttacaagatttgctccaagcccaactgggtctttacatataggaggagtcagaactgctctattcaattatgtatatgcaaaacaaaataaagggaaatttttaattagagttgaggatacagatgctgaaaggtcaaaaaaagagtttgaagaaaatatattaaaaggactttccgatttaggaatcaatccagatgaacctcccgttcgtcaatctgagagatctgaactatacaagctcgctgcagaaaaaatctttgattcgggtaaagcatattggtgtgattgttctatagaaacgcttgataagatgcgtaaagagcaggaagcagctggcaaaaaacccatgtatgatgggagaagtagaaatctaggtcttgaacgaacaaataactcggtattaagactgaaaacccctcaagatggggagatagtttttaatgacttagtaagaggcgaagtaacttttcagaattctgaactagatgacttaattcttttaagaagcgatgggtcaccaacttatcatttatgcaatgttgttgatgattttaatcaaggagttactactgttgttcgaggagaagatcatttaagcaatacaccaagacaaatacatattcaaaatgcacttggctatgattctcttgaatatgcgcatttacctatggtgctagggcaggataaaaaagattatctaaaaggaatgcagtaa

SEQ ID NO: 299979 - DNA, 942 bp, Unknown
  Bacterial polypeptide expressing nucleotide sequence isolated from the Sargasso Sea
aaaggttttgcttataaatgttattgttctgaggaagaaattaatgaacaaaaagaaaaatgtaaaaaacaaggaataccgtatgtttataatagaaaatggagagatgctaaagatttaaaaattccagacggagtaaaaccaataataagatttaaaagtaaaatatcagggaatacgattataaaagatttagtacaaggggatagaaatatttcaaattctactattgaggattttgtaattttaagaaaagataatacgccaacataccagctatcagccacggttgatgatcatgaaatgaaaataactcatgttattagaggagacgatcatatgattaactcttttaaacaaagacaaatttacgaagcaatgggttgggaggttccaaactttgctcacattcctttaattcatagtgagaaagggaaaaaattgtctaaaagagacaatgcatctacccttgaagattatgttaaaattggaattatttcagatgctttaagaaattatttattaagattaggctggtcttacaaggacaaggagatttttactaagcaagaaagtattgacttatttgatttaagtggggttggaaaatcaccgtcaaaacttgatatgaataggatttattcaataaatgaaacgtacataaaaacaatggatgaaaaggatctttttaattttttcaaagaatacgtttcaaaatataaaaaacctatagatcaagcaaaagagaatatcctaataaaatcaataggttttttaaagaataaagcaaaaacacttgaggatatttggaacaatgctcaatatatcattaatgataaaattgaaattggtacagatgataaaaaacttattaatgatttatcaaagaaagtaattaacgactttattagtgaatatgaaaaactatcctcttatctaggg

SEQ ID NO: 299980 - DNA, 238 bp, Unknown
  Bacterial polypeptide expressing nucleotide sequence isolated from the Sargasso Sea
atgtcggttgttacacgatttgcacccagcccaacaggctatcttcacgttggtggcgcacgaactgcgctttattcttggcttcttgcaaaaagtaaaggcggtgaatttgttcttcgtatagaagacacggatattgagcgttcaactgaagaagcaaagcaagccattctggacggaatgctgtggttaggtttaacgtggaatacaggtcctatttatcaaacagagcgctttg

SEQ ID NO: 299981 - DNA, 886 bp, Unknown
  Bacterial polypeptide expressing nucleotide sequence isolated from the Sargasso Sea
ccatatcgtcaaagtgaacgagcagatatctactctaagcatatcgagatgttactgaataaaggaaaagcatttcgctgtttttgcactcccgagcggttagatcaattaagaaaagatcagttaaaggaaaaaactcaggttgggtatgatggtcattgcttaaatttgtctgaagaagaagtcgcagcaagaatagagcagggagatgattttgttgttcgaatgaaagtacctgatactggcgactgtgttttcaccgacttgttaagaggcgaggtcaggattagctggtcacaagtggacatgcaagtgttaatgaagtctgatggtttgccgacttatcattttgctaacgtcgtagacgatcatttaatgtctatcagtcatgtcattcgaggggaggagtggataaattcaatgcctaagcatgtgcttctgtatgactattttggctgggaactacccgtcttttgtcatatgcctctccttcgcaacccagataagagtaaattaagtaaaagaaagaatccgaccagtattggatattacaagtcgctaggttatgtgcctcaggccgtattaaattatctagggatgatgggttggacaatgccctcaggggaggaaaaattttcaatagaagacatgactaacaatttcgatattaatcgagtttcattgggtgggccgattttcgaccttgaaaaattaaactggttgaatggtaaatatattagagaagagatgtctgacgatgaattcgtgaatcaatttacggagtgggcttttgcggctgaagatctcaaaagtttgataccgctcgtgcgagaaagggtggataagttcagtgatgttgcaagcctgtgcagtttcttcttaagtt

SEQ ID NO: 299982 - DNA, 283 bp, Unknown
  Bacterial polypeptide expressing nucleotide sequence isolated from the Sargasso Sea
aatgaaggataattctataaaagtaagatttgcgccaagcccaacaggtgagctgcatttaggtggtgcaagaacagctctatttaattggctctattctcagaaattaaatggatcattttttcttagaatcgaagatactgataaagagcgatccagtgatatttatactaatcaaattatcgaatctttaaagtggttagggttaaaatgggatgagccaattatttatccatctggtcgagctgatcgctataaatattatttaaaaaaaactgctaga

SEQ ID NO: 299983 - DNA, 340 bp, Unknown
  Bacterial polypeptide expressing nucleotide sequence isolated from the Sargasso Sea
tttgaaaaagaaagaagttgtaacaagatttgcaccaagtccgactggagcacttcacataggtggcttaagaactgctttatttaattatgttttttcaaaacaaaataatggactttttttagttaggattgaggatacagatagagaaagatcatcaaaagaatatgagaaaaatattttaaataccttaacttcaattgggctttctccagataaagaaccaataaaccaatcagatagaaatgatatctatataaaagcggcaaaaaagatatttgaatctggaaacgcttattggtgtgattgttcgcctgaatccttagatgagatgcgaaaa

SEQ ID NO: 299984 - DNA, 793 bp, Unknown
  Bacterial polypeptide expressing nucleotide sequence isolated from the Sargasso Sea
atgaaaaaagtagcaactagatttgctccatctcctactggacctttgcatattggtggagttagaactgcgttgtttaattggttattttccaaaaatcaaaatggatctttttatttaaggatcgaggatactgataaagagagatctaaagatgaatacaaagatcaaatagtcaaatcactcatatggattggtattgaaaatgatggagatgaatatattcaatcaacaaaaatactaaatcatattaaaatagcaaaacaattacttgataaaggtcttgcttacaaatgttattgttcaaatgaagaaatagaggaacaaaaaaaaagagccaagcaaaaaaaaattccatatatttatgataggaaatggagagataaaaatgagtcagatgcccctcaagatgttaaacctactattcgcttcaaaagtaaaattgagggaacatctgtattaaaggacttagttcagggtaatgtggaaatccaaaataacacaattgaagattttataatccttaggaatgatggatcaccaacttataacttatctgcatcagttgatgatcatgatatgaatataacacatattataaggggtgatgatcataaaattaacacctttaaacaaatgcaaatttatcaagctatgaattgggaagtgcccacttttgcccatatacctttaatacatacatcagaaggaaaaaaattatcgaaaagagacaaagcttcaactttagacgattactctaaaattggaatattaccagaggcattaagaaatt

SEQ ID NO: 299985 - DNA, 733 bp, Unknown
  Bacterial polypeptide expressing nucleotide sequence isolated from the Sargasso Sea
tactcaacgttatgttccgggttccgaggaatacattatggaagctctggaatggattggtatggtaccagatgaaagtccgaaacacggaggtccttatgctccgtatcgtcaatctgaacgcagagacatctacgacagatatacagaacaaatcctgaaaacggattatgcttaccttgcttttgacacacctgaagaattggatcagattcgtgcagaatttgaagctagaggtgatgtttttgcctataactacgaaacccgtaacagactaagaaatagtatttctcttcctcaagaagaagtaaaaaaacttttggaagaaaaaacgccatacgtcatccgtttcaaaatgccattggacagaatcattaatcttaatgatatcatccgtgggaagtttagcgtaaatactaataccctggatgataaagttctggtaaaaaatgacggaatgccaacttatcattttgcaaacatcatcgacgatcatgagatgaaaattacgcatgttatccgtggtgaagaatggctgccatctatggcacttcacgtattattatatgaagcaatgggttgggatgcaccggagttcgctcacctttcacttatcctgaaacctgaaggaaaaggtaagctaagcaaaagagatggtgataaattcggtttccctgtattcccgcttaactttaccgatcctgctacaggaaacacctctgcaggttaccgt

SEQ ID NO: 299986 - DNA, 361 bp, Unknown
  Bacterial polypeptide expressing nucleotide sequence isolated from the Sargasso Sea
atgaaaaaagttgcaactcgttttgcaccctctccaacaggtcctttacatataggcggagttagaacagctctatttaattggttatattcaaaaaataaaagtggatccttttatcttcgaattgaagatactgataaagaaagatcaaaagataaatataaagaacaaattattaaatctcttaaatggattggtgtagaaaatgatggagacgaatatattcaatctaaaaaaattaatgatcatataaaaattgcaaacgaattacttaaaaatggtagtgcatataaatgttactgctctagtgaagaaatagaggaacaaaaaaaaagagcaaagcaaaaaaaaattccataca

SEQ ID NO: 299987 - DNA, 331 bp, Unknown
  Bacterial polypeptide expressing nucleotide sequence isolated from the Sargasso Sea
atgaaaaaagtagcaacaagatttgctccatcacctactggacctttacatattggtggtgtgagaacagctttatttaattggttatattctaaaaaccaaaaaggtaatttttgtttaagaatcgaagatactgacaaagaaagatcaaaagatgaatataaagatcaaattgttaaatccctcaaatggattggtattaattatgatggagaagaatatatacaatcaaaaaaaattgaagatcacataaaagttgcaaatgaattacttaaaaatggtcatgcctataagtgttattgttcaagtgaagaaatagaagaacaaaaaa

SEQ ID NO: 299988 - DNA, 937 bp, Unknown
  Bacterial polypeptide expressing nucleotide sequence isolated from the Sargasso Sea
agacgaatacacggcagaaattattgaaagttttaaatggcttggagtgaattttgaaaatgaggttatttaccaatcaaataatgcagatcggtataaagaaattatagatcagcttctagaccaaggttcagcttatatttgtaagggtgaagacttagagactgataaaaagtacagggaccaaaatcttccaagagataataaaacggtagtgcgctttaaaatgccagaagagggcaacacagtttatacggatattgtaaaaggccaaatagaagtcgcaaatgaacaattagacgattttattattgaaagaagtgatggttctgcaacttacaacctgtgtgtagtagtagatgacttagattctgatatttctcatgttatcagaggtgatgaccatgttaataatacctttaagcagataaatgtttttaaggctctcaacaaaaatgttcccacatatggacacgttcctatgattcttggcgaagacggaaaaagattatctaaaaggcatggagctttaggaatacgagagtatgccggcttgggtattttgcctgaagctttaaagaactacctgctaagattaggatggtccatgggtgatgacgaaatattcaatggagaagatatgaaaaaaaattttcagttaggaattttaaataagtctcctgctactttctcaatagataaattactttggtttaacaaatattatttggatcaaatgagcttagatcaattgatgaaagttgtaccgccgaaggattttgatggaagtgagtattctaaaactgtcttggaaacaattagagatagatgttcaacattaaatgaattctctacaaatgctgactatttcttcaaggatccagaagattacgagcagtcactgctattaaagcattgtaaagagaacacatttgat

SEQ ID NO: 299989 - DNA, 759 bp, Unknown
  Bacterial polypeptide expressing nucleotide sequence isolated from the Sargasso Sea
tgcttcccgtgcttctgctccgccgagcgcttcgatgaagtgcgcgcgcagcagatggccacaaaagaaactccgcgttacgacggtcactgcatgcgcctcgagccggccgaggcgcagcgccgcatcgccgcaggcgagtcgcacgtggtgcgcatgaaggtgccgagcgaaggcgtctgcgtggtgccggatatgctgcgtggcaatgtcgagatcccgtgggatcgcatggatatgcaggtgctgatgaaggccgatggcctgccgacctacttcctggccaacgtggtcgacgatcatctgatgggcatcacccatgtgctgcgtggcgaggaatggctgccgtccgcgcccaagctgatcaaactctacgaatacttcggctgggaacagccggcgctgtgttacatgccgctgctgcgtaatccggacaagagcaagctgtcaaagcgcaagaaccccaccagcatcaccttctatgagcgcatgggctacctgccgcaggccatgctcaactacctggggcgcatgggctggtcgatgccggacgagcgcgagaagttctccctggtcgagatgatcgagcacttcgacatcaaccgcgtgtcgctgggcgggccgatcttcgatctggagaaactgtcctggctcaacggccaatggctgcgtgaactgccggtggaaaccttcgccgctgaagtgcagaaatgggcgctcaatcccgactacctgatgaagatcgcgccgcacgtgcag

SEQ ID NO: 299990 - DNA, 580 bp, Unknown
  Bacterial polypeptide expressing nucleotide sequence isolated from the Sargasso Sea
atgtcaaaagtagcaacaagatttgctccctcacccacggggccgcttcatataggtggggtaagaactgctttatttaattggttgtttgcaaaaaatatgggtggaaattttcttctaagaatagaagatacagataaagaaagatcaaaaaaagaataccaaaatcaaattatccaatccttgaaatggattggtataaattatgatagtgatgagtacatacaatcaactaaaataaaaggtcatgttaaaattgtagaggaacttttaaaaaaaggaaacgcttataaatgttattgctcaaatgaggaaattgaagaacaaaagaaaagagctaaacaaaaaaaaattccgtatatttatgacagaaaatggagagacaagaacgaaaacgaggctccaaaaaatataaaaccagtaataagatttaaaagtaagatagatggtaaatctaaattaaaagatttagtacaaggtgatgtcgagatagataataatacaattgaagattttgtaattttgagaaatgacggtaccccaacatataatttatcagtgactgtagacgacccatgat

SEQ ID NO: 299991 - DNA, 216 bp, Unknown
  Bacterial polypeptide expressing nucleotide sequence isolated from the Sargasso Sea
catgacaaataacgaagtaagagtaagatttgctccaagtcccactggaaatctacatattggtggtgtacggacagcaatatttaattggcttttcgcaaaagccaactctggtaaatttatattacgtatagaagacactgatcaaaacagatatgatgaaaattctgaaaaatctattttatctagcttagagtggttaaatttagattggga

SEQ ID NO: 299992 - DNA, 837 bp, Unknown
  Bacterial polypeptide expressing nucleotide sequence isolated from the Sargasso Sea
cagggttcttcatcaattaaagatttggttcaaggcgaaatgaatgtttctaacttaacaatagaagattttgttattttgagaaaagataaaacacctacctatcaattatctgctactgtggatgatcatgaaatgaatattactcatgtaataagaggagatgatcacaaaattaatacttttaaacaaaaacaaatttatgatgctatgggttggaatgttcctgaatttgcccatattcctctaatacacagtgaaacaggaaaaaaactttccaaaagagataaggcatcaacaattgatgattatattaaaattggaatcttgtcagatgctcttagaaactatcttttaagactaggttgggctcataaagataaagaaatatttactctagatgaaagtattaaactttttgatttaaaaggagttggaagatctccatcaaaactagatatgtctagaatactttctattaatgaacattatataaaacatatagatgagaaagaattatttaaattgttgaaaatttactgccaaaaatttaaaagaaacatagattcttctaaagaaagtattctttttaaatcgatgaattttttgaaaaacaaagcaaaaacacttgaagatatttatcaaaatgcccagtatatccttcaagacaatattaaagtttctcacgaggacgccaagcttctagatgcttcatctaagaaaattataaaggactttcttgatgaatttaaaaaactgtcaaaaacaaacaaagaagatcttgaaaaagtagtaaattacttaataagcaaacataagacaaactttaaaggagtt

SEQ ID NO: 299993 - DNA, 624 bp, Unknown
  Bacterial polypeptide expressing nucleotide sequence isolated from the Sargasso Sea
aatgtcaaaagtagcaactagatttgctccatcgccaactggaccattacatataggtggagttcgaacagctttatttaactggctatattcaaaaaatcaaaatggtaatttttttttaagaattgaagatactgataaagaaagatccaaagaggaatatagaaaacaaattattaattcactagaatggataggtataaactttgatggtgaggaatatgtacaatcaaaaaaaatagatgatcatattaaagttgtccatgaattattaaaaaatggtaatgcttataaatgttattgttcatctgaggaaattgaggagcaaaaaaagagagctaaacaaaaaaaaattccatatatttacgatagaaagtggagagataaaaaggaaactgatgctcctaaaaatataaaacccgtaataagatttaaaagtaaaatagatggaacatctatattaaaagatttggtccaaggtgatgttgaaattgaaaataatacaatagaagattttgtaatcttaagaaatgatggtactccaacatataatttatcagcagcagtggatgaccatcaaatgaatatgtcacacataattaggggggatgatcataagataaa

SEQ ID NO: 299994 - DNA, 649 bp, Unknown
  Bacterial polypeptide expressing nucleotide sequence isolated from the Sargasso Sea
atgaatgtaaaagtaaggtttgctccaagtccaacgggatctcttcaccttggagctgttagaacagctatttttaactatcttttcgcaaaaaaaaataacggcaaaatacttattagaatagaagataccgataaagaaagatcatcaagtgaatctattgatgaaatattggaatctctacattggttaggtctagattgggatgaaggaccagttaagcagtctgataggcttgaaatttacagggcagctgcggataaattaattgaagaaggtttagcttatagatgttacatgactcaagatgaagctaagttattaaaagagaaagctaaggcggaaaataaaatatacaaatatccaaatacatggcgtgaaaaaaaagaagatccaaaaggcagagactttgttataagattcaaaacaccttatgagagtaagataaattttaatgacacacttagaggaaatatttcagttgattcaaatacattagacgattttataattataaaaagtgatggatttcctacttataattttgcttcagctttagatgatgctcaaatgggtataactaatgtaattaggggggaggaccatctatcaaatacaccaaagcaagttttaatatttaactcttaaa

SEQ ID NO: 299995 - DNA, 877 bp, Unknown
  Bacterial polypeptide expressing nucleotide sequence isolated from the Sargasso Sea
aaccaattgattaaagagggtaaggcctatgagtcggaaggtgccattagactcaaatcagatcgcacctcaaacatagtcattaaagatcgggtatttggtgatgttgaggttaataaagatgaattggatgattttattatcatgcgatcaaatggagctcccacctatcatctagctgttgtaattgacgatcatgaatcgggtattacacacgtgatgagaggcgatgatcatcttaagaataccgcaagacatattcagcttatgaatgcttttaattatccgattcctcaatttgttcatttaccaatgattttaggatcggatgggtcgagactctcaaaaaggcatggtgccatgaatgttcttcattatagagatgagggtttctcatccgaggctttacttaattatttggtaagacttggctggtctaagggtgaccaggagatattcagtattcaggaaatgactgatggatttgatctttcaggcattaataaagccagcgctaaatttgatattgaaaaactccgttgggtcaatcagcaacatctactaaatactgatgatagtgaattgaagatgatgcttgaagctggatctgctacagctaaagggctcaatgatgaggttatcacaaactttatcaatgcttataagaatagggcaagcaccattaatgatttgatctctagttgcgacagtcttttttcagatgaaattaaatatgatcaagctatagcagataagtttctgaaaaaagagattctctttgccttgaaagatgtagttgatgctctacaaggatctagatggaatcaagaatctatttcagaggcactgaagtcagtatgtgaaaaacatcaaatag

SEQ ID NO: 299996 - DNA, 817 bp, Unknown
  Bacterial polypeptide expressing nucleotide sequence isolated from the Sargasso Sea
tatgcagatctcacatgtctttcggggtgaggagcatctatcgaatacgttaagacaaatccttatcttaaatgctttaaaaatgccagttcctgaatacgggcatctttcaattatcttaggtcaagataaaaagaagctcagtaaacgtgatggtgcggtcagtgttgatgattatcgtcagcaaggttatttacctgaagctatgattaattatttatctctattaggctggacccctgagcatgagatcagccgattggatcagctatgtgcagcatttgatggtcaaaagttgcatgcagcggcgcctatatttgatccagttaagctacattgggtcaatgggcaatgggtacaggctatgtcagatgatgtattttggtctcagttactgaactatatggatcctgtttacctgaagcgtcttcctgaagacccagattggcgtcagcgctgtatcaattggctcaagcccttggcacatccattgaaagatatgaacgcacagcttgcccaagttatggaaacacccgtatggcctgatgaagagccgctcacagagcgtgaacaacatatttttcaagcttggtttcacggacttgaatcttattcagtaacttttttagatcctgaacaagtcaaaaaacagctcaaagaagtcggtgaacgggtgaacctaaaaggtaaggcactttttttgccgatgcgtctagtgatgaccggtcagaagcaaggtggtgatttaaccacgttactgtcactgatcccgattgagcgtcaaaaagcatatctcacgcaacgattatcttcatga

SEQ ID NO: 299997 - DNA, 787 bp, Unknown
  Bacterial polypeptide expressing nucleotide sequence isolated from the Sargasso Sea
accttatgtgtataatcgaaaatggcgagatatttctgaagataaagccccaaaagatataaaaccggttataagatttaaaagtaaaatagaaggcacttcaatattaaaagaccttgttcaaggaaatgtagagattgaaaataatgctatcgaggattttgtaattttaagaaatgacgaaacgccaacatataatttatctgcgtcagttgatgatcataatatggaaatgacgcatattattagaggagatgaccataaaattaatacttttaaacaaatacagatatatgaagcactaggatgggatattccacaatttgcccatatacctcttattcatacaatagatggtaagaagctatcaaaaagagacaatgcctcaacattagaagattattctaaaattggaattctacctgagtcacttagaaattatctattgaggttaggatggtcttataaagataaggaaatttttgacttaaatgaaagtataaaactttttaatttagaaggaataggcaaatcaccttcaaaacttgatatgaatagaattctttctatgaatgaatattacattaaaaatagtgaggaagatattttgtacaaaaaattaaaagaatactgtgagatgtacaaagataaaattaaagaggaaaaagaaaatacaataaaaagatctttaatatttttaaaaaacaaagcaaaaacacttgaagatatatttaacaattctaaatatatattaaatgataaagtaatttttaataacaatgataaa

SEQ ID NO: 299998 - DNA, 772 bp, Unknown
  Bacterial polypeptide expressing nucleotide sequence isolated from the Sargasso Sea
aatggttcgtttaagatttgcaccaagttttactggatttcttcacatcggcggtttacggacggcactgtttagctggcttttcgctagacgaaaacaaggaagttttatcttccgtctcgaagacacggatcgcaaccgactggttgaagcagcagaatcgaacttgctgaagatgctggaatgggcaggattggatatcgatgaggggccagggattggtggtgaatttggaccttatcggcagtccgaacgactcgagatataccgcgatcatgtagaccgacttttggggcaaggagacgcctatccttgtttctgcagtgaggaaagactggaaaaactcaaaactttccagcgttctgaagggctgacaccaagatacgacaatcattgtagaaagctgcaaaaaaaagaggttggaacaaaaatccaatcaggtgaaaagcatgtcatccgcatgaagattcctgagaaccaggaaaccttcagtttgaatgacctagtgcgcggaaccgtagcaatcgagagtactcaagtcgaagaccaggtaatcctgaaaagcgatggattcccaacctatcatctggctgtggtggttgatgatcatttgatgcagatcagtcatgttgtcagaggagaggaatggcttccttcttttcctaaacaccttttgctttaccgttattttggttgggaaccgcctgaattcctccaccttcctttgatcctaaatgaggaacgggcaaaactcagcaaacgccatggtgct

SEQ ID NO: 299999 - DNA, 651 bp, Unknown
  Bacterial polypeptide expressing nucleotide sequence isolated from the Sargasso Sea
tatgttaagaacacgatttgcaccctctcctactggcaatctccatcttggaggcgctagaactgctttaattaattatattgtaagtaaaaaatcagcatcatctaaattttacttgagaattgaagatacagaccatgaaagatcaaaacaagaatatacagataacataactaattctttaaaatggcttggacttaactgggatgaagacattcaagttcagtctaaaagattatctagacatcaagaagttgctaaagaattacttcaaaaaaaacgagcatttaaatgtgtatgttctgaagaaaaaatagctaaccgaagaaaaataattagagaaaataaaaactattctaaaaaaatatgtaatgaatgtaaaaataataatgatattcaaagtagagatgagaattttgtagttagattagatgtacctgatgaaggaaatttaaaaattaacgatacaattcaaggagatgtttctgtcgcaaatttagagttagatgatttcattttacttagaaaagatcaatcgcccacgtatatgttatctgtagtagttgatgatcatgatttaggaatcaattatattattagaggtgatgatcactttattaatacttatagacaatactacatttataaatt

SEQ ID NO: 300000 - DNA, 877 bp, Unknown
  Bacterial polypeptide expressing nucleotide sequence isolated from the Sargasso Sea
cgacttaaggcaccccatgacggggagactgtcattcaagatcttgttcaaggtgaggtaagggtcgagaacgctgaattagacgacatggttcttttacgcagcgatggcacacctacctatatgttggcggtcgtcgttgatgaccatgacatgggtgtcactcacgttattcgtggggacgaccatctcaccaatgcttttcgccaaacccagctgtttcaagccttgaattgggatacgccggcgtttgcccatattccgctgattcatggacaagacggtgcaaaaatgtccaagcgccatggggcgcttggggttgatgcttatcgggatcaaggtttcttgtcggagtcgatatgtaactatttgctgcgtttgggatggagccatggcgacgatgagatcatctccaaggaacaagccattgagtggttcaaccttaacagtgttggaaaatcaccggccaggttcgatttagataagctgacagctttgaacggtcaatacatccgggatactgcaccggagcagctaatgcgtttgatcttgccaaacctcaaagaccacttaggccacgatccgtcgaaaattgccgtcgaacgtctaattcaagggcttcccagtcttcgagaacgcgcgaaaacattactggaactcgttgaaagttcgttgttttatgcgcttaatcgccccatatcaatcaacgataaggcacgaaaactgattgatgttgacgggtgtcgttgtctggagtcggtgaaggacggcttcgcggcgttgaatgattggacggaagagaccctagagttgtgggttcgcgaattcagcgagcgcacgggcactaaattggggaaagtggcccagcccattcggg

SEQ ID NO: 300001 - DNA, 905 bp, Unknown
  Bacterial polypeptide expressing nucleotide sequence isolated from the Sargasso Sea
tggaggggttagaactgcattatttaattggttgttttctaaaaatcaaaaaggaacgtttcaccttagaattgaagatacggataaagaaagatctaaagatgagcacaaagtgcaaattattaaatcattaaagtggataggaattgaacatgatggcgaagaatacattcaatcaaaaaaaatagaagatcacattaaaattgctaatgaattattaaaaaatggtaatgcatataaatgctactgttctgctgaagagatagaagaacaaaaaaaaagagcaaggcaaaagaagatgccttatatttataatagaaaatggagagatgttgatgaaaatgaagctcctaaagatgttaaacctgtaattagatttaaaagcaaaattgaaggaaattctatacttaaagatctagttcaaggagatgttgaaattgaaaatagtacaatagaggactttgtaatattaagaaatgacggaactccaacttataatttatctgctactgttgacgattatcaaatgagaatgacacatataattagaggagatgatcataaaataaatacatttaaacaaattcaaatttataaagcaatgaattggaaagttccagaatttgctcatattccattaatacacaccattgaaggtaaaaaattgtcaaaaagagataatgcatcaactttggatgattactcaaaaataggaataatgcctgatgcgttaagaaattacttactcagactcggatggtcttatcaagataaagaaatatttaatctagaagagagtattgaacactttaatttagaaggtattggtaaatctccatcaaaattagatatgagtagaatattgtctatgaatgagcactatataaaaacaattaatgagaacg

SEQ ID NO: 300002 - DNA, 330 bp, Unknown
  Bacterial polypeptide expressing nucleotide sequence isolated from the Sargasso Sea
gatgtcaaaagtagcaactcgttttgctccctctcctactggagctcttcatattggtggtgttagaactgctttgtttaattggctatattcaagaaatcaaaaaggcacttttcatttaagaattgaagatactgacaaagaaagatcgaaagaggaacacaaaatacaaataattaaatccttaaattggttaggaataaatcacgatggtgaagaatatattcaatcgaataaaattgatgatcatataaaaattgcaaatgaattattaaaaaaaggatttgcttataaatgttactgttcacctgaagagatagaagaacaaaa

SEQ ID NO: 300003 - DNA, 935 bp, Unknown
  Bacterial polypeptide expressing nucleotide sequence isolated from the Sargasso Sea
tagtgatttagtacaaggagagatagaaattgaaaatcatacaattgaagattttataattttaagaagagatggaacaccaacatacaattgttcggctgcagtagatgatcatattatggatatgacacatataattcgaggtgatgatcataaaattaatacattcaaacagattcaaatatatgaagcactgcaatgggaaaagcctttatttgcacacatacctttaattcatacattggaaggtaaaaaattatcaaaaagagataatgcttcaacaattgatgattacgaaaaaattggaattatgcctgatgccctaagaaattatcttatgagattaggatggtcttataaagataaagaaatattttctctggaagaaagtataaaatattttaatttagaaggtattggaaaatcaccttcaaaacttgatatgtcacgaattttatcaatgaatgagtattatataaaaaataaaagtaacgatgatcttttccaaagtttcgaggaatattgtaaaaattttaaggaaaatattaacaatgaaaaactaaatattataaaaaaatcattaacttttttaaaaaataaagcaaaaacactggaagacatttataacaattcaaaatttattataaatgatgagataattattgaaaaagctgaaatgagtttactaactgaaaatgcaaaaaatataatcaaatctttcatgaaaaaagtaaatgaaatagaagtttttaataaagaaacattagaaccaataataaataatttaatatctgagaatcaaacaaactttaaaggtgtaggacaaccattaagaattattttaacaggttcaaaatttggacctggaatatatgatattataatatctttaggaaaaaaaagagttttagatagattaagtaaggtaggataaa

SEQ ID NO: 300004 - DNA, 916 bp, Unknown
  Bacterial polypeptide expressing nucleotide sequence isolated from the Sargasso Sea
atgccaacaatcacaagatttgcaccttcaccaacgggttcacttcttttaggtggggctagaactgctttgtttaactttatctacgctaaatctgttaatggattatttaaaattagaattgaagatacagataaaagtagaaatattaatgattctataaataatataacatcaaatctagaatggttaggaataagatcagacgatcaagtttattatcaaagtaaaaatgtcaaaaaacatatagaaattgcaaatgatttagtaaataaaggttttgcttataagtgttatcatacagaaaatgagctagaagaattaaaaaaaaaacacaataggaagattagaagttcttggagagaaaaagataaaattttaaaagggaataataaatattgtatcagaataaaagcacctctaaatggaaaaacttccattgttgataaaattcagggaaaagttgagattaataatgaagaacttgatgattacgttatcttgagaaaagatttgacaccaacttttcttctctcatctgcaattgatgatttcttaatgaatatcacagatattattagaggtgatgatcatttaactaattcgttaagacaaaaaataatttttgattttcttaattattccccctcttttgctcatatgtcccttattcataatgaaagaaatgaaaaactgtcaaaaagagataattcacaatctattgaagattataaaacgaagggattttttcctgaatctattataaattatttattaagaatgggatggtcttacggagacaaagaaattttttcaattaaagaagctattaaattttttaaaattgaaaacttaggtaaatctccctcaaaaatagatgaaaaaaaattattttatttaaataattattattaaa

SEQ ID NO: 300005 - DNA, 322 bp, Unknown
  Bacterial polypeptide expressing nucleotide sequence isolated from the Sargasso Sea
aatgttaaaagtagcaacaagatttgctccgtctccaacaggtccattgcatataggaggtgtaagaacagctttatttaattggttattttctaaaaaccagagtggtaatttttatttaagaatagaagataccgacaaagaaagatctaaagatgaatataaagagcaaattattaaatccttaaaatggataggtattgattataatgaagatgaatacatacaatctaaaaaaattgaaaatcatattaatattgctaaagaattgttaaaaaatggctatgcatataaatgttattgttcaaatgaagagatagaa

SEQ ID NO: 300006 - DNA, 498 bp, Unknown
  Bacterial polypeptide expressing nucleotide sequence isolated from the Sargasso Sea
gatgtcaaaagtagcaacaagatttgctccatctccaacaggacctcttcatataggtggagttagaactgctttatttaattggttatttgcaaaaagtaagggtggaaaatttcttttaagaatagaggatacagacaaagaaagatcaaaaaaaaaatatcaagatcaaattgttcaatctttaaaatggattggtataaactatgatagtagtgaatacatacaatcaaccaaaataagtacacatgttaaagttgcagaggaacttttaaataaagggtatgcttataaatgttactgttcaaatgatgaaattgaagaacaaaagaaaagagctaaacaaaaaaagattccatatatttataatagaaaatggagagataaaaacgagaatgaggctccaaaaaatataaaaccagtaataagatttaaaagtaagatagatggtaaatctaaattaaaggatttagtacaaggagatgttgaaatagataa

SEQ ID NO: 300007 - DNA, 842 bp, Unknown
  Bacterial polypeptide expressing nucleotide sequence isolated from the Sargasso Sea
aatttagatgataaaattatttataaaagtgatggtatgccaacttaccatttagcaaatatagttgatgatcatcttatgaaaattacccatgttgtaagaggagaagagtggcttccttctttagcattacatttcaaaatttatgaagcttttggttggaaaaagcctttttttgctcatttaccattgatattaaaaccatcgggacaaggcaaattaagtaaaagagacggtcaaaaatttgggataccggtttatccaattgaatggaatgactcaaaagaaaagataaaatatttaggttttaaagaaatgggttttgaaccagaagcaattctaaattttatttgtatgataggatggaatcctggtgatgaaaaagaagtattttcattgaaagaattagaaactattttttcattagacaaaataaacaaatcaggagcaaaatttgattttgaaaaagctaaatggtttaatcatgagcatgtaaaaaaaatatccgatgaatctacattaaaatttatgaatgaaaacatagataaaaactttttaaaaatagttagtaaaaaatctaaaagtaaaaaattaattgaattgataaaagagagggtaacatttaaaaaggaacttataaaagaagcaagaaatatactagatccaaaccatcaggacctagatcaaaattttattaaaaaaaaatggaatgaaaaaatttataattcgattattgaaataataaagctaattaagaactcaaaaaacatttcaataaaggaaataaaaaaatcttatttagatattttaaataaaaatgaaataaaaattggagatggcat

SEQ ID NO: 300008 - DNA, 763 bp, Unknown
  Bacterial polypeptide expressing nucleotide sequence isolated from the Sargasso Sea
aatgtctaaagtagcaacaagatttgctccgtcacctactgggcctcttcatataggaggggtaagaacagcactttttaattggttatattcaaaaaataaaaacggatctttttcattaagaattgaagatacagataaagaaagatctaaagatgaatataaaaagcaaatcataaaatctcttaaatggataggtgtagaacatgatggagatgaatatattcaatctaaaaaattagatgatcacattaaagttgctaatgaattgcttaaaaatggtcatgcatataaatgttattgttctaaagatgaaattgaagaacaaaaacttagagcaaaacaaaaaaaaataccttatatttatgataggaagtggagagataaaaaagaagaagaggctccaaaagatattaagcctgttataagatttaaaagtaaaataaatggaacttctatattaaaagatttagtacaaggtgatgtcgaaattgataataatactattgaagattttataatcttgagaaatgatggatctccaacatataacttatcagcgtcagtagatgatcatataatgaaaatgacacatataattagaggagatgatcacaagattaatacttttaaacaaatccaaatttatcaatctatgggatgggaattgcctttatttgctcatataccattaatacatacaatagatggtaagaaactatcaaaacgagataaagcttctacattagacgattattctcaa

SEQ ID NO: 300009 - DNA, 700 bp, Unknown
  Bacterial polypeptide expressing nucleotide sequence isolated from the Sargasso Sea
atgaatgtaaaagtaaggtttgctccaagtccgacgggatctcttcaccttggagctgttagaacagctatttttaactatcttttcgcaaagaagaataacggtaaaattcttgttagaatagaggatactgataaagaaaggtcatcaagtgaatctcttgatgaaatattagaatctctacattggttaggtctagattgggatgaaggaccaattaagcagtctgataggcttgaaatttacagagcagctgccgagaaattaattgaagaagatctagcttatagatgttacatgactcaagatgaagctaagttgttaaaagataaagctaaggcggaaaataaaatatacaaatatccaaatacatggcgtgaaaaaaaagaagatccaaaaggaagagactttgttgttagattcaaaacaccttataagagcaagataaattttaatgacacacttagaggaaatatttcagttgattcgaatacattggacgattttataattataaaaagtgatggatttcctacttataattttgcttcagctttagatgatgctcaaatgggtataactaatgtaattaggggggaagaccatctatcaaatacaccaaaacaagttctaatatttaactctttaaagaaaaatttgcctaatttcactcatgtatcaatgatttgggtaaagataa

SEQ ID NO: 300010 - DNA, 685 bp, Unknown
  Bacterial polypeptide expressing nucleotide sequence isolated from the Sargasso Sea
attccattaaatggtaatattttttttaaagatttggtttatgaagacataaatacagattgctctgaattagatgattttattattgctaggtccgatggcacacctacctacaactttactgttgttgttgatgatcatgatatgcaggtcagtcatgtgattcgtggagaggatcatatctcgaataccccaaaacagatccttatttataatgcactaaaatgggatgcaccagagtttgctcatttgccaatgatacttggctctgatggtaatcgtttaagtaaaagacatggagctgtaggtacgcagacctatcgggaacttggctatcttccggataccttgataaattatttatctcttttaggctggaacccaggaacagaggaagaggtttttaattttcaatttttattggataatttttctcttgaaaaggttaataaaaaagctgctgtttttgataataagaagttggattggttaagtgggcagcatattatgcaaaaagaatcagaatatttattggatttaattagatcaattaaaccagaatggggaagtagtatttcatctgaaaaatatttgatttcaataatttcgcatctaaaagaaagatcaaaaactcttctggatatcataagccaatctgaatattttttcaatgatccaggtaaat

SEQ ID NO: 300011 - DNA, 551 bp, Unknown
  Bacterial polypeptide expressing nucleotide sequence isolated from the Sargasso Sea
aatgaaaaaagtagcaacaagatttgctccatcacccactggagctttgcatattggtggagttagaacagctttatttaattggttatattctaaaaaccaaaaaggtgatttttatttaagaatagaagatacagataaagaaagatcaaaagatgagtataaaaatcaaataattaaatctcttaaatggattggtataaattatgatggagaagaatacatacaatcaaaaaagattgaagatcacataaaaattgcaaatgaattacttaaaaaaggtcatgcatataagtgttattgctcaagtgaagaaatagaagaacaaaaaaaaagggcaagacaaaaaaaaattccttacatttatgatagaaaatggagagacaaaaaagaaactgatgctccaaaagatataaaacctgttataagatttaaaagtaaaatagatggaacgtctgtattaaaagatttagtgcaaggtgatgttgaaatagataatgatactattgaggattttattattttaagaaacgatggtacaccaacataca

SEQ ID NO: 300012 - DNA, 793 bp, Unknown
  Bacterial polypeptide expressing nucleotide sequence isolated from the Sargasso Sea
atgaattctattattacaaggtttgccccttccccaacaggaagtttacatattggcagtataagaactgctttaataaattatataataattcagcaatctaaaaaacaatttcctaattcaaaattttatttaagaatagaagacactgatcaaaaaagatcaaaagaagaatacgttgaaaatataattaaaggattagaatggttgggtattaattttgatgataaaccgttcattcaatcaaaaaaattaaaaagacatagggatatagcctttgaaatgctttcaaaaaataaagcattcaagtgcatatgtagcccaataaaattggaaaaaattagaaattcaaatttaaaaaataaattaaattttaaaaaattatgtaatagctgtgaaaaagatagagatattcaagaatctgcaaaagattttacagttagaataaaaatacctgatgaaggctatacaaatatcgaagatataattcagggagaagtcaaagttcaaaataatcagctagatgattttattttattgagaaaagatggaactcctacttatatgttatcagttgtagtggatgattatgatatgggagttaatttaattattagaggagatgatcatttgaataatgcatttagacaaaattttatttatagaaatatgcaatgggaaattcccaactatgcacatttacctttaatacatggagaagatggtaaaaaattatctaaaagacatggagcagtagatgttaatgaatttaaagagaaaaggttatttaaat

SEQ ID NO: 300013 - DNA, 616 bp, Unknown
  Bacterial polypeptide expressing nucleotide sequence isolated from the Sargasso Sea
gatgtcaaaaatagcaacccgatttgctccatctccgacaggaccattgcatataggcggtgtaagaactgcattatttaactggttatttacaaaaaaacaaggtggtacttttttattaagaattgaagatacagataaggaaagatctaaagatgaatataaagatcaaataattaaatccttaaaatggataggcatcgattatgatggtaatgaatacatacagtctagtcaaattgataatcatattaaagttgctaatgagctattaaaaaacggacatgcttataaatgttattgttcaaatgaagaaattgaagaacaaaaaaaaagggctaaacaaaaaaaaatcccttatatttataatagaaaatggagagacaaagaagaagctgatgctccaaaaaacgtcaagccagttataagatttaaaagtaaaactgaaggatcagctgtattaaaagatttagtgcagggagatgttcaaattgaaaataataccattgaagattttattattttgagaaatgatggatcgccaacttataacctttcggcagcagtagatgatcagcaaatgatggtaactcatataattagaggagatgatcat

SEQ ID NO: 300014 - DNA, 821 bp, Unknown
  Bacterial polypeptide expressing nucleotide sequence isolated from the Sargasso Sea
agaagaacaaaaaaaaagagcaagacaaaaaaaaattccttatatctataatagaaaatggagagataaaaaagataccgatgctccaaaagatattaaaccagtcataagatttaaaagtaaaatagatgggacatcaatattaaaagatttagttcaaggtgatgttgaaatagataataatactatagaggattttattattttaagaaatgatggaactccaacatataatttatcagcatcggtcgatgatcaccagatgaatatgacacatataattagaggtgatgaccataaaataaatactttcaaacaaatacaaatttatcaagcaatgaaatgggagttacctgcgtttgctcatatacctttaatacatacaattgaaggaaagaaattatcaaaaagagacaaagcttctacattagatgattattccaaaattggtattatgcctgatgctcttagaaactatcttcttagattaggatggtcttataaagataaagaaatatttactttagatgaaagtattaaatattttaatcttgagggtattggtaaatccccgtcaaagttagatatgagcagaattttatcaatgaatgagcactatattaaaaatatcaatgaaaatgatttattcgttcaactaactgaatattgcaaattatataaaagcgagatcaaactagataaaaaagataagattaaaaaatcccttaacttcctaaaaaataaagccaaaactatggaagatatatttaataatagccaatatattatggtagatgaggtaaattttaatgaagatgatg

SEQ ID NO: 300015 - DNA, 914 bp, Unknown
  Bacterial polypeptide expressing nucleotide sequence isolated from the Sargasso Sea
tgctccatctcctactggacctttgcacataggtggtgtgagaacagctttatttaattggttgtattctaaaaaccaaaaaggtaatttttatttaagagttgaagatactgataaagacagatcaaaagatgaatataaaaatcaaataatacaatctcttaaatggattggcattaactatgatggtgatgaatatatacaatcaaagaaaattgaagatcacataaaagttgcaaatgaattactcaaaaatggtcatgcatataaatgttattgttcgagtgaagaaatagaggatcaaaaaaaaagagcgaggcaaaagaaaattccttatatttacgatagaaagtggagagacaaaaaagaaactgatgctccaaaagatattaaaccagttataaggtttaaaagcaaaatagatggaacttctatattgaaagatttagttcaaggtgatgttgaaattgacaataatactattgaagactttattattttaagaaatgatggaactccgacatataacttatcagcatcagttgatgaccatcaaatgaatatgactcacataattagaggtgatgaccataaaattaatacctttaaacaaatacaaatttatcaagctatgaaatgggagataccatcatttgctcatatacctttaatacacacaattgaggggaaaaaactatcaaaacgagataaagcctcaacattagatgattattcaaaaattggtattatgccagaagcactgaggaattatcttcttagactaggttggtcctataaagataaagaaatattcactttagatgaaagtattaaacattttaatctcgatggaattggtaaatctccatctaaattagatatgagtagaattttatcaatgaatgagcactata

SEQ ID NO: 300016 - DNA, 315 bp, Unknown
  Bacterial polypeptide expressing nucleotide sequence isolated from the Sargasso Sea
gatgaaaactgtagcaactagatttgctccgtcgccaacaggacctttacatattggaggagtgagaacagcattattcaattggctttattcaaaaaataaaggcggtaaattttatctaagaatagaagatacagataaagaaaggtctaaagacgagttcaaaaatcaaataattaattccttaaaatggataggaatttattacgaagataatgaatatattcaatcagataaaataaacgatcatataaatgtagctaacgaattactaaaaaaaggtttggcttataaatgttattgttctaatgaaga

SEQ ID NO: 300017 - DNA, 696 bp, Unknown
  Bacterial polypeptide expressing nucleotide sequence isolated from the Sargasso Sea
tttgaacgtaataacaagatttgcaccctcacctactggatatttacatattggcggtgctagaactgcaatatttaactatttatttgcaaaaaaacattttggaaaatatttagttagaattgaggacaccgacaaaaaaagatcttctgaagaggcaattaaagctatacataaaggtttaaattggctcaatataaattctgaatacgaaatagtttaccaatctcaaaattttaatacacacataaaagttgcttataagcttttagaaaaaggctttgcttacaaatgttttttaaattctgatgaattaaaaaaattaagaataaaaagccgtgaaaatggtttcccaattaaatcaccatggagaaataaaaaagaaaaagataaggataaaaataaagaatttgttatccgtttaaaaatgccatctgatggcacaacaacaattgatgatatagttcaaggaaaagtgtcaataaaaaatgaaatcctagatgatatggttattttgagatccgataacacaccaacttatatgttgtcttcggtagtagatgacaataacatgggaattacacatataataagaggtgatgatcacttcaataatgcatttaggcaaatacaaattattaaatatctaaactggaatataccatattacgcacatatacctctaattcatggaac

SEQ ID NO: 300018 - DNA, 856 bp, Unknown
  Bacterial polypeptide expressing nucleotide sequence isolated from the Sargasso Sea
gataaggttgaggaacttctcaataaagatttggcttattatgacaaggtcgagaaaaatgaaaagacgagagagactgatctagcgcttgcctatgataataggctcaacaaagatggacatgtgatcagatttagaaatcagagagaaaatataattagcatcagtgattctgttcacggagaaataaaatttgatccaaaagttttttttgatgttgtaatacttagatcaaatggtgtacccacttataatcttacgtctgtggtagacgacattgacatggaaataacacatctcattagaggcgatgatcacttaagcaacttacctgtacaagtaaatcttttcaaatcatttgaggcaaatgttcctatattttgtcaccttcccatgattcatggaactgacggaaagagattatcaaaaagacacggggcagttgatataaatcattttctcaaggagggctacagagtagatgctttgataaattatttagccaaaaccggttggtcgcatggtgataaagaaatttttagtattaatgaactgttggaactttttggtttagatcgggttaccaagtctgcggcaacttttgatattgataaattgaactggcttaatcaacactatataaaaagtgatgatattgataacgtggcagagcagatacttccatatttacaagatcaaaaccttccaaataaagtatctaatgatgattatctaaaaaatatattacttcttgggattgaaagagaatactctcttaaaaatattgctaaaagcattacatatttttatcaagatgagaatttgattatgaattttaatataattactaagtaga

SEQ ID NO: 300019 - DNA, 404 bp, Unknown
  Bacterial polypeptide expressing nucleotide sequence isolated from the Sargasso Sea
aatgactaaagtagcaactagatttgctccatctcccactggtccattacatattggaggaataagaacggcattatttaattggctgtattcaaaaaatcaaaaaggttctttttttctaaggattgaagatactgataaaaaaagatcaaaagaagaatataaaaatcaaataatacaatctcttaaatggataggtattcaaaatgatggaaatgaatatattcaatcaaaaaaaatagatgaccacattaaagtagctaacgaattactaaaaaatggtcatgcttacaaatgttattgttcaaatgaagaaatagaagaacaaaaaaatagagcaaaacaaaaaaagattccttacatatatgatagaaaatggagagacaaaagtgaggctgacgttc

SEQ ID NO: 300020 - DNA, 329 bp, Unknown
  Bacterial polypeptide expressing nucleotide sequence isolated from the Sargasso Sea
aatgtcaaaagtagcaactagatttgctccatcaccaactggtcccttgcatatcggaggaattagaactgctttatttaattggttgttttcaaaaaatcaaaaaggttcttttcatttaagaatagaagatactgataaagaaagatcaaaagatgaatataaagatcaaattattaaatccttaaattggataggcatccaatacgatgataatgaatatatacagtctactaaaataaaaattcatgttgatgttgtaaatgaattattaaaaaacggaaatgcctataagtgctattgttcaaatgaagaaattgaaagaacaa

SEQ ID NO: 300021 - DNA, 907 bp, Unknown
  Bacterial polypeptide expressing nucleotide sequence isolated from the Sargasso Sea
ttgtcgtctacttcatcgcgcgttcgtttcgcccctgcaccctcaggttatctccacgtagggtcagccagatcagctttattcaactggctattcgctaaaaaaacgaatggagtctttgtcctccgcatcgaagataccaatgctgaattagcaaagccggaattctacgacgccataaccgaaccattgaaatggcttggtctccaatgggatgaaggtcctctctatcaatctcacagatcagagaaatatctaaaagcaattgaggatttattgaagaaaggcttcgcctattgctgcgactgtagtcaagaaagtattgaggcgagaaatgaggttaatggatttaaagggggatacgacgggtattgtcgcaatagaggagtccaggacggtccgaacgtgagtatcagattcaaaacaccaaagaaccaattcgtaaagatacgggactccatacgaggcgaggtcacttttgataccaatgaactagaggactttatcattcgtcgtagcaatggaacccctgtcttcctcgtagcaaacgcagttgacgatgccgatatgggaatcacgcatgttattcgaggagaagacctccttaacacgacccctaaagtaatgcttatgtgggaagctttggactatggtcaaccgcccgaatacgcacatctgcctctccttgtcggtgaagacaagaaaaaactctcaaagcgaaaacattcagttgctttaggtgaatttaagacaatgggaatactcccagagtcaatggtcaactatctagccttgcttgggtggggaccaaatgatgacaaagagattaggcccattgaagagatagtgactcaattctctctcaaagatatcaataaggctcctgcatatttgatagaaaaaactc

SEQ ID NO: 300022 - DNA, 721 bp, Unknown
  Bacterial polypeptide expressing nucleotide sequence isolated from the Sargasso Sea
tatgaaggaaatggttattacaaggttcgcaccttcgccaacaggtaatttgcatattgggggttgccggactctactatacaattggttgtttgcaaaaaaacacaacggtaaactaattttgcgtattgaagatacagatctcaaaagatctaccgatgcagcacttcaaaatatcttagagggcataaaatggcttgggcttaactgggatgacgagattgcatatcagagcgctaacatcaacagacatagagagattgccttgcagcttctagaggagggaaaagcctacaagtgctattgtactgaggaagaattagttgagatgagggaagaggcaataaagaagaaaaaatcctcgttttataataataaatggcgtgaccgagagccaaatgagaaagataaaaacataaagccggtgattagaataaaaacaccacagggtggaataacggtaattaatgatagtgtacaaggcgcagttcgtttcgagaatgaagatctagatgattttatcattttaagaagtgatgaaagcccaacttatctcctagcatccgctgttgatgaccatgacatgggggttacacatattataagaggagacgaccacttaaataacgctgcaaggcaataccacattttcaaagcaatgaattggaaaataccagaatatactcatattccactaattcattcatctgatggtgccaaa

SEQ ID NO: 300023 - DNA, 773 bp, Unknown
  Bacterial polypeptide expressing nucleotide sequence isolated from the Sargasso Sea
ttaccgctattttggttgggaaccgcctgaattcatccacctccctttaatcttaaacgaagaacgagcaaaactcagcaaacgccatggtgccgtttccgtagaagaattcagcgaaagaggttatctgtctcaggcactgctgaatttcatagccctacttggttggaatcccggtgatgaccgggagctattgagtctggaggaaatggtggatgaattccgttttgagagggtgtccaagtcgggagcggtttttgatcgtgaaaaactgaattggatgaatcagcagtacctgcttaagttgccggaagaggattatttcagaatgattgatcatgtgatccggaaaggggattaccataatcaggatccgagaaaaatcaggcaggctgcagaaatccttaaaactcgcttagtgaccctttcggacctaaaccagaaattaggactttttttcgaagaaaatcctgaaatcaaagatcttcaggcgattgaggttttgaaagaagaaaattcaaagaccgtcttgaaagagttcctccaacaagcggaaaatcaagatcattttacttcggaaaatcttgggcaattgatgaaatccgtacaaaaagtcacagggatcaagggtcgtggtctctggatgccgcttcgttgtgctattacccgggaggtcagtggcccagaattacctgcgatgctcgattttttcggaggagaaaaatgtctccacctgattcgccagactttggagaatacttccctccattaaa

SEQ ID NO: 300024 - DNA, 910 bp, Unknown
  Bacterial polypeptide expressing nucleotide sequence isolated from the Sargasso Sea
gagattcaaaaatccacttgatggcagtgtgattgttgaagatgctgtcaaaggaaaagtagaattcaaaaatgatgagcttgatgatctgatcattttaagaagtgatggaacaccgacgtataattttactgtagtggttgatgatattgatatgaatatttctcacgtaattagaggtgatgatcatttgaacaatacgccacgacagataaatatatatgaggctttgggagctaaaccaccaacattcgctcatatacccatgacgcttggggaggatggctcaaaactttcaaagagacatggtgcaatggatattagagagtatcgagaaaaaggatatttgcctgctgcactgttaaattatatggctcgactaggctggtctcatggagatcaagaagtcttttctgttgatgaaatgatttcattatttgatataagagacatcaacaaggcttcctctactttcagttcggacaagcttttatggttaaaccatcagcatataaataaactcaattatgatgaaataattccactgcttaaatatcatatggctgttttagagattgattatgagtcaggcccagatcttaaagaaattatcgatgtttatagcgagagatcagaaacagttttagatatggcaaaatcatcgatatattgttttcaagatattgatgattatgatgataaggctgtcaagaagcatctcagaccagtcattcttgatccattgaatgatattaaaagtgagttcgaaaaaataaacaattggaaaaaagaaaacatcgactctgctatagaaaaaattgtaaatagatatgaaataaacatgggggaaattaggacaacctttgagagttgcagtaaccggttcatcaatgtcaccatctatcaataa

SEQ ID NO: 300025 - DNA, 529 bp, Unknown
  Bacterial polypeptide expressing nucleotide sequence isolated from the Sargasso Sea
atgtctgttcctgttaaagttcgctttgctcccagtcctacaggatatttacatattggaggagttagaactgccttatttaactggctttttgcaaggaaccatggaggcaagtttattttacgaattgaagataccgacctatcccgatcaactgaagagtcgattcaggaaattcttgagtcaatgcactggctgggattagattgggatgaaggtcccttcagacaaaccgagcgacaggaaatttattcgcaaaaagtagaacaattgctttcagcaggaaaagcctatttttgttattgtacccctgaagaactggaccgaaaacgcagcgaagcccagaaagcagggttaaaacccaaatatgacggtacctgtcgtaacctttcggatgcccccgagggagtgccttcagtcatccgcttcaaagcacctctggaaggttccgtgatagtggaagacctgctgcgtggaaaagtggtttttgatattactgagttggatgatttgatcatccagcgcaccg

SEQ ID NO: 300026 - DNA, 670 bp, Unknown
  Bacterial polypeptide expressing nucleotide sequence isolated from the Sargasso Sea
atgacaacgataacaagatttgcccctagtccaactggattattgcacttgggtaatatcagaacagccctcataaattggttgtatgctaaaaatagcggtggaaaatttattcttcgaattgatgataccgatcaagagaggtcaaaagatgaatacatttctcaaataaagtatgatttggagtggctaggaatagactacgacgagactttcaatcaatcttctagatttgaaagatataaagagcaattcgaaaaattaaaatctgatggcaggatatatgcttgctatgaaactcctgaggagcttgagagaaaaagaaagcttcaaatggctgccggtggaaaacaagtgtatgaccgttctgcattaaaattaacggagcaacaaataaaaaaatatgagaatgatggaagaaaacctcattggcgatttcttcttcaaacagaacgcatgaaatggaatgatttattaaagggtgaaattgatattgatttaacaagcttatcagatccagttttatttcgagaagatggtgttccactttatacattcagttctgctgtagatgacgttgattataatattactaatgtaattagaggagatgatcacactagcaatactgctgtacaaattgaaatcataaatgcattggataaaaata

SEQ ID NO: 300027 - DNA, 862 bp, Unknown
  Bacterial polypeptide expressing nucleotide sequence isolated from the Sargasso Sea
cttgcagttgtagttgatgataatttcatgaatattactcatgttgtaaggggtgaagaccacatctcgaacactgcaaaacaaatattgatttataaagcattaaattttaatttgccaactttttcacatacacccctaatactaaacagtgaaggaaaaaaattatctaagagagattgcgttacttcaatcgacgaatttagagatatgggatatttacctgaggccttatcgaactatatggcctttttaggttggtctccaaaatctgccgacagagaaatactttcacttgatgagatatccgaaatttttgatttatcagacataaataaagctggagccaaattcagttgggacaaactcaactggattaatgctcaatatataaaaaatatggaatcaacaaagttaagtgagatcatgaggaaatactgggatgataatggttgggagccgccatctcaaaaatgggcttataaattagcaatcttgcttagagactccattactcttttaaaagatgccattgatcaatcaaaaccatttttcttaatccctccaattcaaaaagaaggtcaagattttctggaaaacgaggatagcaaagcatctctcaaactaatcttaaattatttaattgagcaaaatcccataacacttaataaagagaaggcaaaagaaataattaacgaaatctcaaaaatgcataatgttaaaaaagggatattaatgaaatcattaagggtagccttttttggatctcttagtgggccagatttaattcaaagttgggagcttttctcagagagtaaaactgatatatctcgaattgaaagatgtcttaaatcaatctaat

SEQ ID NO: 300028 - DNA, 490 bp, Unknown
  Bacterial polypeptide expressing nucleotide sequence isolated from the Sargasso Sea
ctacattaactctctggcaccagaatatgtggcaacgcacctgcaatggctcatcgagcaggaaaatatcgatacccgcgtcggtccgcagctgtctgagctggtaaaactgctgggcgagcgctgcaaaacgctgaaagagatggcgcagagctgccgctatttctacgaagactttgctgagttcgacgcggatgccgcgaagaaacacctgcgtccggtagcacgtcagccgctggaagtggttcgcgataaactggctgctatcagcgagtggacggcagaaaacgtgcaccacgcgattcaggcgaccgctgatgagctggaagtgggtatgggtaaagttgggatgccgctgcgcgtagccgtaaccggcgcgggtcagtccccggcgttagacgtcacagtgcatgcgattggtaaatcccgcagcattgagcgtattaataaagcgctggcgtttattgctgagcgtgaaagccagcagtaa

SEQ ID NO: 300029 - DNA, 874 bp, Unknown
  Bacterial polypeptide expressing nucleotide sequence isolated from the Sargasso Sea
gatttagttcaaggtaatgttgaaattgaaaataacaccattgaggattttgttattttaagaaatgatggaactccaacatataatttatcggcatctgtagatgaccatcaaatgaatatgacacacattattagaggtgatgatcataaaataaatacttttaaacaaatacaaatttatgaagctatgaaatgggagttgccatcatttgctcatataccattgatacacacaattgaaggaaagaaactatcaaagcgagatcaagcgtctacattagatgattactccaaaattggtattatgccagatgctctaagaaattatcttttaagattaggatggtcttataaagataaggaaatatttacattagatgaaagtataaaattttttaatttagatggtatcggaaaatctccttctaaacttgatatgagtagaattttatcaatgaatgagcactatattaaaaatattaatgagaatgatttattcaaccaattaatagaatattgtaaattatataaagatgaaattgaatctgataaaaaagataagatcaaaaaatcattaactttcttaaaaaataaagcaaaaactttagaagatatatttaataatggtcaatatattattaaagatgaggttaattttaataaggatgatgtcaaattaattgacgataaagcaagaaaagtaatttctgatttttacgccaaatttgaaaagatagatctgccttctcgagagattttagaaccaataataaatgagcttataaaatctcatgacacaaattttaagggagtgggacaaccgttaaggattgctctaactggatcgaagtttggccctggtatatatgata

SEQ ID NO: 300030 - DNA, 843 bp, Unknown
  Bacterial polypeptide expressing nucleotide sequence isolated from the Sargasso Sea
agatgactttattattgaaagaagcgacgggtcagcgacatataatttttgtgtggttgtagatgatattgactctgaaattactcatgttatcaggggtgatgatcatgtgaataatacattcaagcaaattaatgttttcaaggcgcttaatgcatcaatacctgagtatggtcatgttccaatgattttaggtgaagatggaaaaagactctccaaacgacatggagcactaggtgtaggagaatatgcaaagttgggagtattacctgaagccctaagaaactatctacttcgactgggctggtccaaaggagatgatgaaatatttgatggtcaaaaaatgataattgattttaaaaaaggaactttcaatcaatcgccagccactttttctttggaaaagttgttatggttcaataaatactacattgatcaaaaaactattgatgaactcaataaattaatcaattctcctcaatttgataatggtcctttttcaaatagagtgctagaagttattagagatagatgtaattctatagaggatttttcaactcaatctcattacttttttacagatcctgaagaatttgatgaagttctcatgaataaacacataaaaccagagacctttcataacctttctttattattggacaaactaagaagcatagaagagtggacttctaataatattaaggaggctattgataaccttgtaaaggaactttcaataggttttgccaagattggcttaccgttaagacttgctttaactgcaacagttaattcaccctctatagatgtagtgtgtgaagtcttagaaaaagacgttacgat

SEQ ID NO: 300031 - DNA, 871 bp, Unknown
  Bacterial polypeptide expressing nucleotide sequence isolated from the Sargasso Sea
tacaatgtaaaaacaagaatgaggcttaacaactcttttacagtgtctgaagaagaaagaaaaaaaagagtagaagagggtaggtatgtggtaaggctagctattccagaaaataaaaaaatatctgctttcgatgagatacgcggagaattaacatttgattccaatgaactagaagacaaagttattcttaagtctgatggaatgccaacctatcatttagcaaatgttgttgacgataatgatatgaaaataacatcagtggttagaggtgaagagtggctctcgtcgcttcctgttcattatctcctttatgagttttttggatggaagcctcctaaattttatcacctccctttaattttaaaaactagtggagcggggaagctttcaaaaagagatgcagacgaacaaggacaccctatttttgctgttaaatgggaagactctaatggatttaaagaacacggtttcattcctgaaggtcttaataattacctggcacttttgggttggagcaacaaagaagaaaaggagaggtatacaatggaagagctggttgagtcttttagttatgaggaaataaacaaatcaggagctcgatttgattttaaaaaagcgctatggattaatcacctgcatttaaaagatcttgaatctaaaagaatattagacctctctgggcaaacaaaaaaattgctggttgaaaaatatagcgagacggaagctatagagattattgagttagttaaagagagattaaacaccaccaaagacattgataaagagctttcagtttttattaagcagcctaaggagattgatgtgtcagcaattgaaaaaattaacagagaggtaatatttagtgttt

SEQ ID NO: 300032 - DNA, 595 bp, Unknown
  Bacterial polypeptide expressing nucleotide sequence isolated from the Sargasso Sea
tatgatagttacaaggtttgcaccatctccaacaggttatcttcatttaggtcatgtttactctctagtttactcatatgaatattctaaaaaacataatggcaaatttattttaagaattgaagacattgatttcacaagatgcaaaaatcattataaagatcaaattatagacgatcttaattggcttagaataccttttttgagaactaaggatcaatctttaagaagaaaacaatataccgttgcattagattatttaaaaagtaaagatctaatttatccctgttggttatcgagaaaagaagcaaaagaggctttatctgcacctcaaaaagaaataaataataagcaaattactttaaataaaactgaagaaaaaaatagaaaaaaaattggcctaacaccagcctggagactcaataacaaaaattgcttaaaatatttagagttatctaaaaaaaatttctactggcatgatgaaaagatagggaaaataagaatggatattgagcaatttggtgatttaataattgctagaaaagatatttcaacaagctatcatttgtctgtaactatcgatgataatagtgat

SEQ ID NO: 300033 - DNA, 220 bp, Unknown
  Bacterial polypeptide expressing nucleotide sequence isolated from the Sargasso Sea
catgacctcaccttcctcaactgtcgtcacccgcttcgccccctcgccgacaggctatctgcatatcggcggggcgagaaccgctttattcaactggttgtacgccaagagacacgcagggcgtttcctgatccgggtcgaggataccgaccgcgaacgttcgaccgacgaggcggtgaaggccatcttcgacggtctgagctggctggaactgttcgcc

SEQ ID NO: 300034 - DNA, 508 bp, Unknown
  Bacterial polypeptide expressing nucleotide sequence isolated from the Sargasso Sea
gatggtgcgagttcgtctggcccccagcccaacgggaacgctccatatcggaaccgcccgcaccgcagtgttcaactggctgttcgcgcggcgccacagcggtgagtttgtcctgcgcatcgaggacaccgacaaggagcggagcaagagcgaattcaccagcaacatcctggatggcctgcagtggcttgggatcgactgggacgctgagccggtgatccaaagcgagcgcgtggagcaccaccgccaggcgatccaacagcttcttgatgctggtttggcataccgctgttacgcctcagaagacgaactcaacgccatgcgcgaggcccaaatggccagcaagcaagcgccgcgttacgacaaccgccatcgcaacctcagcccggagcaggtcgccgcttatcaggccgaaggccgtcaggccacagtgcgctttcgcatcgatgacagccgcagcatccagtggaaggatctggtgcggggagccatgagctggagcggggcc

SEQ ID NO: 300035 - DNA, 652 bp, Unknown
  Bacterial polypeptide expressing nucleotide sequence isolated from the Sargasso Sea
atgtcggttgttacacgatttgcacccagcccaacaggctatcttcacgttggcggcgcacgaactgcgctttattcttggcttcttgctaaaagcaaaggcggcgagtttgttcttcgtattgaagatacagatatcgagcgttcaactgaagaagcaaagcaggccattctagacggaatgcaatggttaggtttaacgtgggatacgggtccaatctatcagactgagcgtttcgatagatataaagaacttattcagcagcttttggatgaaggtaaagcgtataaatgctttatgagctctgaagagttagatgcgattcgtgaagcgcaaaaagaacgtggtgagaagcctcgctacccaggtacgtggagagacagaacggatcatccagaaggtcagccttttgttatccgcttcaaaaaccctttagaaggtaaagtggtaattaatgatcacgtgcgtggaaaaatcgagattagcaatactgagctagacgatcttattattcagcgctctgacggtacccctacatataacttctgtgtagttgttgatgattgggatatgggtattactcacgtagttcgtggtgaagaccatattaataacacgccacgtcaaatcaatattcttgaagcgcttggtg

SEQ ID NO: 300036 - DNA, 865 bp, Unknown
  Bacterial polypeptide expressing nucleotide sequence isolated from the Sargasso Sea
actccgacatataacctatctgcatctgttgatgatcatcaaatgaatatgacacatatcatcagaggagatgaccataaaataaatacctttaaacaaatacaaatttaccaagctatgcaatgggagcttccctcttttgctcatatacctttaatacatacaattgaaggaaagaaactatcaaaacgagataaagcttctacattagatgattattccaaaattggtattatgcctgatgcacttagaaactatcttcttagactaggatggtcttataaggacaaagaaatattcaccttagacgaaagcattaaacattttaatcttgaaggaattggcaaatctccttcaaaactagatatgagtagaattttatcaatgaatgagcactatattaagaatattgatgaaaatgatttatttaatcaattaacagaatattgcaaattatataaaagtgaaattaagtctgataaaaaagataagatcaaaaagtctctaaccttcctaaaaaataaagcgaaaactttggaagatatatttaataatggtcaatatattatgttagatgaggttaattttaatcaagatgatattaagttaattgatgataaggccaaaaaagtcatatcagattttagtgccaaactaaacaacgttgataaactaaacaaagaaacattagagccaatagttaacgaattgattaaatcaaatgatactaattttaaaggagttgggcagcctttaagaatagctttaacaggttcaaaatttggacctggtatatatgatataattatttcacttggaaaagaagaagtaataaaaagattaactaataagaaacttggttagt

SEQ ID NO: 300037 - DNA, 826 bp, Unknown
  Bacterial polypeptide expressing nucleotide sequence isolated from the Sargasso Sea
aaaatgccggaacaaggatctacctcttttactgatttagtaaaaggtgagattcaagtatcaaatgatcaacttgaagattttattattgagagaagcgatggatctgccacttataatttttgcgttgtagttgatgacctggactctaaaataacccatgtcataagaggcgatgatcatgtcaataatacttttaagcaaataaatgtatttaaagccttcaatgaagatgttcctacttatgggcatgttcctatgatacttggagaggatggtaagagattatcgaaaagacatggagcattaggagttggtgaatattcatcacagggaattttatctgaagctcttaaaaattatctattgcgtttaggttggtccaaaggtgatcaagaaatttttgatcatcatgaaatggaagaggcatttatagaaggtacccttaaccagtcacctgcaacattctcgatggataaattgctctggtttaataagcattacttagactcaaagagtgaagagcaattaactaatgcaataaacaaaaaagaatttgatggtggtgattattcaaataatgttcttttagcaatacgagacaggtgttcaactttaaatgacttcgtaattcattcctcttacttttttaaagacccagaagattatgaagatgctttaatcaataaacactgcaaggaaggaacccatggatatttatcattattgaagtcctatttatctgaacttgaaaagtgggatcaaatttcaataaaagaagttatagaaaagactgtttcagaactagatgttggcttggaaaaat

SEQ ID NO: 300038 - DNA, 380 bp, Unknown
  Bacterial polypeptide expressing nucleotide sequence isolated from the Sargasso Sea
aaagatttagttcaaggggatagaaacatttcaaattctactattgaggattttgtaattctaagaaaagataatactccaacataccagctatcggctacggttgatgatcatgaaatgaaaataactcatgttattagaggagatgatcatatgattaattcttttaaacagagacaaatttacgaagcaatggattgggaggttccaaactttgcacacattcctttaattcatactgagcaaggaaagaaattgtcaaaaagagataatgcttccacactcgaggattatattaaaataggagttatatcagatgcattaaagaattatttattaagattaggatggtcttacaaagataaagaaatttttacaaa

SEQ ID NO: 300039 - DNA, 448 bp, Unknown
  Bacterial polypeptide expressing nucleotide sequence isolated from the Sargasso Sea
atgaaaccagttgttaggttcgcacccagtccaacaggccagcttcatataggcggtgtaaggactgcgctttttaattatctatttgctttaaaaaataacggaactttcctcttaagaatagaagacacagatatagaaagatccaaagaggttcatacaaaacagattattgactcactaaagtggcttgggcttgaatatcaaggtgatcctataaagcaatcttcaagaatgaaaaggtaccaagaagtaattaaatatttacttaatactggtaatgcatatagatgtttttctacgattgaagagctaaagaagcttagatctgagagtgataaatatttatatcccagaatatggcgagataggtccgaacaggaaatagatgctaaactacaaaataaagaaaattatgtaattagaattaagattccattaaatggta

SEQ ID NO: 300040 - DNA, 847 bp, Unknown
  Bacterial polypeptide expressing nucleotide sequence isolated from the Sargasso Sea
gaaatagaaaataatacaattgaagattttgttattttaaggaaagatggaactcctacttataatttatcagcatcagctgatgaccatcaaatgaaaatgactcatattattagaggtgatgatcacaagataaatacgtttaagcaaatacaaatttatgaagctatgaattgggatataccattttttgcacatattcctctaatacatactattgaaggaaaaaaattatctaaaagagataattcatcaacattagatgactactcaaaaataggaataatgccaaatgcattaagaaattacctcctaaggcttggatggtcatataaagataaagaaatttttaatttagaagaaagtattaagtattttaatcttgaaggtataggaaaatcaccatctaaattagacataagcagaataatgtctatgaatgaacattatataaaaaatattgatgaaaaagacttatatgaaaatctcaggaaatatttaaacgaatataaagaaccaattaataaaaaaaaagaagaaacaatcaaaaaatctttatcatttttaaaaaataaagctaaaactcttgaagatatctatattaattcaaaatttatattaacagataatgtaacaataaataatgaggataaaaaattagtagatgatacatcaatgaaaataattaaaaattttttacaaaacattaaatcaatagaaaattttaaaaaagagaatttggaaaaaatagtaaatgatttaattaaatctaataatttaaactttaaaagtgttggacaacctttaagaatatgtttaacaggatctaaattggcccaggaatata

SEQ ID NO: 300041 - DNA, 784 bp, Unknown
  Bacterial polypeptide expressing nucleotide sequence isolated from the Sargasso Sea
actgctctctttaactggttattttcaaaaaataataaaggtaaattttatttaagaattgaagatactgatagagaaagatctaaagatgaatataaaaaacaaattatagagtctcttaattggattggtataaaccatgatgataaagaatacatacaatcaaataaaataaaagaacacaaagaaattgccaaagaacttttaaaaaatggttttgcttatgaatgctattgctctgaagaagaaattaaagatcaaaaagaaaaatgtaaaaaacaaggaatagcatatatttacaatagaaaatggagaaatcccaaagatcttgagattcctaaaaatatcaaacctgtaattaggtttaaaagtaaaatttctggtaattcaattgtaaaagatcttgtccaaggtgaaattaatatttcaaattctattattgaagattttgttatcttaagacaagatggttcaccaacttaccaactctctgctgtggttgatgaccatctaatgaaaataacacatgtaataagaggtgatgatcataaaataaatacttttaaacaaaaacaaatttatgaagctatgaaatggaatatacctgaatttgcccacatacctctaattcatagtgaaaaaggatccaaactttctaaacgagataaagcctcaacaatagatgactatataaagataggaattttgtctgatgctttaagaaactatctcctacgtttgggctgggcacataaagataaagagatttttaaccttgatgaaa

SEQ ID NO: 300042 - DNA, 408 bp, Unknown
  Bacterial polypeptide expressing nucleotide sequence isolated from the Sargasso Sea
catgaagccccgcttaagatttgcgccaagcccgacaggacaattacaccttgggggagccaggactgctttatcaaattatttatacgccaagaagaatggcggacaatttttagtaaggatcgaagacacagacctagaacgctcaaaaaaggaacatacagatcaaatttgtgattcgttgcagtggctggggctgaattgggatgaagagttggtctatcagtctaagcttggggaaagttataataattcattagaagacctattgtcatctggaaaagcatacagatgttttgcatcaaaagaagaattagagcagatccgcaaagaggcaggctcctatcattacagtggtctatggagaaataaaagtgacaatgatatcaatatagagttagaaaaaaa

SEQ ID NO: 300043 - DNA, 757 bp, Unknown
  Bacterial polypeptide expressing nucleotide sequence isolated from the Sargasso Sea
atgaagtgtaggttcgctcctagccctacaggaaaaatacatatcggtaatgctagatcagcaattttaaattggattttttgtcaaaaaaatcaaggtgagtttgtattaagaattgatgatactgatgccaataggagtactaaagaatttgagacaagtatcaaagatgatcttacatggcttggattaaattggagttatacttttaatcaatcttcaagaaaaaatatatacaatgagaaaatcaaaattctaaaagaaaagaaaagactttacccatgttttgaaacagaagaggaattagctttaaagaaaaaatctttattatcctcaggaaaaccacctatttatgatagatcttcactaaatctaagtgatgaagaagtagaaaaaaaaatagaagctggaatcaaaccccattggagattcaaattagatcatgaaaatattagttggaaagatattattaaaggagatgtttcatttgatgcaaaaaatttaagtgatcctgttttaattagagctgatggaacattgttataccatttaccttcagtcattgatgatattgaagaaaaaattacgcatattattagaggggaggatcacatagctaatactgcctatcatattcaaatttttaaggctcttgaatcttccattccatcatttgctcatcatccattcttagttgatgaaactggtaagggttttagcaaaagacttggaagtctttcaattgaaaattttagag

SEQ ID NO: 300044 - DNA, 402 bp, Unknown
  Bacterial polypeptide expressing nucleotide sequence isolated from the Sargasso Sea
aatgccaaaagtagcaacaagatttgctccatctccaactggtcctctacatatagggggtgtcagaactgcattatttaactggttgtattcgaaaaatcaaaaaggttcattctttttgcgaattgaagatacagacaaagaaagatcaaaagatgaatataaaaatcaaataatacaatctcttaaatggataggcatagaaaatgatggaaatgaatatattcaatcaaaaaaaatagacgatcacattaaagttgctaacgaattattaaaaaatggtcatgcgtacaaatgttattgttcaaatgaagaaatagaggaacaaaaaaatagagcaaaacaaaaaaaagttccatacatttatgataaaaaatggagagataaaagtgaaactgacgc

SEQ ID NO: 300045 - DNA, 652 bp, Unknown
  Bacterial polypeptide expressing nucleotide sequence isolated from the Sargasso Sea
aatgaaaaaagtggcaactagatttgctccttcccctaccggtcctcttcatattggtggggtaagaacagctctatttaattggttatattcaaaaaataaatccggtaaattttatttaaggatagaagatactgataaagaaagatctaaggaagaacataaaattcaaataattaactctctgaaatggatgggaattaaacacgatggtgaagaatatattcaatcaaaaatgattggtgaacacgtagctattgctaaaagattattagaaaatggaaatgcctataaatgttattgcagtacagaggaaatagaagaacaaaagaaaagagctaaacaaaaaaagattccctacgtttataatagaaaatggagagatattgctgaagatcaagctccaaaagatgcaaaaccagttataagatttaaaagtaaaacggaaggtacctctgtattaaaagacttagttcaaggaaatgtagagatcgataataatactatagaagattttgtaattttacgaaatgatgaaacaccgacgtataatttatctgcatcagttgatgatcataatatggaaatgacacatattattagaggtgatgatcataaaataaatacatttaaacaaatacagatatatgag

SEQ ID NO: 300046 - DNA, 904 bp, Unknown
  Bacterial polypeptide expressing nucleotide sequence isolated from the Sargasso Sea
tccaaaaaatattaaaccagtaattagatttaaaagtaaaattgatggatctactatattgaaagatttagtacagggagaagttcaaattgataataacactattgaagattttgttattttgagaaacgatggatcaccgacttataatttgtctgcatctgttgatgatcatcaaatgaaagtgactcatataattagaggtgatgaccataaaattaatacatttaaacaaatgcaaatatacttagcaatgaaatgggaacttccaaaattcgcacatattccattaattcatacctcagaaggaaagaagctatctaaaagagataaagcatcaactttagacgactattcaaaaattggcattatgccagatgctctaagaaattatcttttaagattaggttggtcctttaaagacaaagaaatttttacattagaagaaagcataaagcactttaatttggaaggtataggcaaatcaccttcaaaattagatattagtaggattttgtcaatgaatgaacattatattaagaatttaaatgaaaatgatctatttgataatctaaaaaaatattgcgaaaattataaagatagaattgatactaaatcagaaaaaattaaaaaatctttaagttttttaaagaataaagctaaaactcttgaagatatttataataatgcacaataccttataaatgacaaaataaaaatatctatagaagatcaaaaacttttagacaatttatcaaaaacaatcttaaaagattttttaaaagaatttgagaatttgtctgatataagtaaagaaaatttagaaaaaatttataataatttaataaaaaataataacactaactttaagggttataggtcacctctaagaatagctttagtg

SEQ ID NO: 300047 - DNA, 775 bp, Unknown
  Bacterial polypeptide expressing nucleotide sequence isolated from the Sargasso Sea
gatgtcaaaagtagcaactcgttttgctccctcacctactggagctcttcatattggaggtataagaacagctttatttaattggctttactcaaaaaatcaaaatggtacttttcatctaagaattgaagatactgataaggaaagatctaaagatgagtataaagttcagattataaattctttaaagtggattggaatagaatatgatggagatgaatatatacaatcaacgaaaattgatgatcatatcaaggtagcaaatgaattgttgaaaaatggcaatgcttataaatgttattgctctagtgaagaaattgaagaacaaaaaaaaagagctagacaaaaaaaattaccttatctctataatagaaaatggagagatgcagatgaaaaagatattcctcaagatattaaaccagtaattagatttaagagtaaaattgagggaaaatctatcctaaaagacctggtgcagggtgatgttgagattgagaacaatattatagaggattttattatattaagaaatgatggaactccaacttataacctttctgcaactgtagatgaccatcaaatgggaatgacgcacattattagaggtgatgatcataaaataaatacctttaagcaaatacaaatatatctagctatgggttgggagctaccaaattttgcacatatacctttaatccacacaattgagggcaaaaaattatctaaaagagataatgcttccactttagacgattactcaaaaattggaatttat

SEQ ID NO: 300048 - DNA, 592 bp, Unknown
  Bacterial polypeptide expressing nucleotide sequence isolated from the Sargasso Sea
aatgacaacagtaacaaggtttgcaccaagtccaacaggtttattacatcttggaaacattagaacagcattaattaattggctgtatacacgtaccaacaatgggaaattcattttaagaattgacgatactgatttagaaagatcaaaagatgaatatatttctcaaattaaatatgatcttgattggctggggattgattttgatgaaacgttcaatcaatcgtctcgtttcgacagatacagggagcaattcgagaaattaaaagctgatggcagaatctacccttgctatgaaacacccgaagaacttgaaagaaaaagaaaattgctcattgcagcaggcggcaagcaagtgtacgaccggtctgcaatggaattaacagaccaacaaaaaaaagattatgaagcagaaggaagaaaaccccactggagattcttattaaaaactgaacgtatgaaatgggatgatttacttaaaggagaaatagatatagacctcaccagtttgtctgatcctgtcttgtttagagaggacggcgttcctttatatacttttagttcagcggtagatgatattgattacggcata

SEQ ID NO: 300049 - DNA, 895 bp, Unknown
  Bacterial polypeptide expressing nucleotide sequence isolated from the Sargasso Sea
atgcgcgaagagcaaatggctgaaggtctgcgtcctaaatacgacggtcgtggtttaaaccacacagaagacgaaattaaagctaacctagctgcaggtaagccttacgttatacgtatgaaaattccaagcgaagggacctttaagttcaacgactacctacgcgacgagattgagattccgtgggaaaacgtagacatgcaagtgctattaaaagccgatggcttcccaacgtatttcttagcaaatgtggtagacgatcaccacatgcaaattagccatattttccgtggtgaagaatggattaactcagcacctaaattattaaagctttacgaagattttggttgggaagcgccagttcttgggcacctgccattattacgtaacccagataagtcaaagctttctaagcgtaaaaaccctacaagtatcaattactacaaagaaatgggttacctaccagaagcggtacttaactacttaggccgcatgggctggtcaatgccagacgagcgtgaaaagttcacacttgatgaaatgattgaacactttgacatgaaacgtgtatcgcttggtggcccagtatttgacgtagataagttaagctggttaaacgggacgtggatccgcgaaaacttgactgacgaagagcttgtgcagcgctttgttgattggaagtttaacggcgaaatgctagctaaagtattaccagaagctaaaacgcgtattaatacgctgtcggatatggttgatttagcaggtcattttgtaggtggtattccaacttacgacccagcactgttaacggcgggcaaagccgacgaaaatgtaatacgccaagcactacaattttttgtatggcaattaaaaggcttacgtagttttgataagc

SEQ ID NO: 300050 - DNA, 769 bp, Unknown
  Bacterial polypeptide expressing nucleotide sequence isolated from the Sargasso Sea
atgtcaaaagtagcaacaagatttgctccatcgcctacggggccgcttcatataggtggagtaagaaccgctttattcaattggttatttgcaaaaaataagggtggaaattttcttctaagaatagaagacacagacaaagaaaggtcaaaaaaagaataccaaactcaaattattgaatccttaaaatggattggaataaattatgatagcaatgagtatatacagtcaaccaaaataagtgaccatgttaaaattgtggaggatcttttaaagaaaggaaaagcttataaatgttattgctcaaacgatgaaattgaagaacaaaagaaaagagctaaacaaaaaaaaattccatatatttacgataggaaatggagggataagagtgaggacgaggctccaaaaaatattaaaccagtaatcagatttaaaagtaagataaacggtaaatccaaattaaaagatttagtgcaaggagatgttgaaatagataataatacgattgaagattttataattttgagaaatgacggtaccccaacatataatttatcagtgactgttgatgaccacgatatgaatgtaacacatatcattaggggagacgatcataaaataaatacttttaaacaaatacagatatatgaggctatgaattgggatctcccagtatttgctcatatacctttaattcatacaaaagaaggtaaaaaattatcaaaaagagataaagattctacattagatgattattcaaaaattggaa

SEQ ID NO: 300051 - DNA, 781 bp, Unknown
  Bacterial polypeptide expressing nucleotide sequence isolated from the Sargasso Sea
atgtctaaagtagcaacaagatttgctccatcacctacaggtcctcttcatataggagggataagaacagccctttttaattggttatattcaaaaaataaaaatggatctttttttttaagaattgaagatacagacaaagagagatctaaagatgaatataaaaaacaaattataaaatctcttaaatggataggtgtagaacatgatggagatgaatatattcaatctaaaaaattagataatcacattaaagttgctaatgaattgcttaaaaacggtcatgcatataaatgttattgttctaaagatgaaattgaagaacaaaaacttagagcaaaacaaaaaaagataccttatatttatgataggaagtggagagataaaaaagaagaagaggctccaaaagatattaggcctgtgataagatttaaaagtaaaatagatggaacttctatattaaaagatttagtccaaggtgatatcgaaattgataataatacaattgaggattttatcatcttgagaaatgatggatctccaacatataacttatcagcatcagtagacgatcatataatgaaaatgacacacataattagaggggatgatcacaagattaatacttttaaacaaattcaaatttatcaatctatgggatgggaattgcctttatttgctcatatacctttaatacatacaatagatggtaagaaactatcaaagcgagataaagcttctacattagacgattattctcaaattggtattatgccagaag

SEQ ID NO: 300052 - DNA, 889 bp, Unknown
  Bacterial polypeptide expressing nucleotide sequence isolated from the Sargasso Sea
tatgcacaggaaaaatcatgaaaaaaaaggaaagacttttatttataatgcgcacaacaggctaaaacttgtaaactcgttgtctttagacaaaaaaaaggttgaaaaacttttaaaaactgtgccttatgtggttcggtttaaaatgccggacaacaaaatggttgtttttgaagatgaaatccgtggtaaaattgaggtttcatcaagagagcttgacgacaaagttctctacaagtctgataagatgccaacctatcattttgcaaacgtggttgatgaccacatgatgaaaataactcatgttattaggggtgaagagtggttgccttcgcttcctttacacatgcttttgtatgaggcttttgggtgggagcctcctgtatttgcgcacattccgttaatattaaaacctacaggaaaaggcaaactttcaaaaagagatggtgaaaaatttggacacccagtctttccgcttgaatggagaagcggtgatgaaaaacacctaggatttaaagagtttggtgttttgcccgaggctttaataaactacatggctttgttggggtggtcgaaggaagacaataaagagatttattccttaacagatctgttgggctcgtttgagattaagtcagtaggaaaaagcggggccaaatttgattttgagaagctgctttggctcaactcacaatacatacaaaaaatgtcttcagaagaaattattaaaaggttttcatcaataaattcgggaaagaaatttaatctcacaaaagaagctgttgatctaattaagccacgaattgagagattagcaaatattgatactgattttaactacttgtttgaggctcaagagcccgaactggctctagaaaaaaactgttaa

SEQ ID NO: 300053 - DNA, 373 bp, Unknown
  Bacterial polypeptide expressing nucleotide sequence isolated from the Sargasso Sea
aatgtcgaaagtagcaacaagatttgctccatcacctactggacctcttcatataggtggggtaagaacagctttattcaattggttatttgcaaaaaataagggtggaaacttcctcctaagaatagaagatacagataaagaaagatcaaaaaaagaataccaaaatcaaattattcaatccttaaaatggattggtataaattatgatagtgatgaatacatacaatcaaccaaaataaataatcatataaaaattgttgaggaacttttaaaaaaaggaaatgcttatagatgttattgttcaaatgaggaaattgaagaacaaaaaaaaggagctaaacaaaaaaaaattccatatatttatgacaga

SEQ ID NO: 300054 - DNA, 878 bp, Unknown
  Bacterial polypeptide expressing nucleotide sequence isolated from the Sargasso Sea
aggattttgttatttaagaaacgacgaaacaccgacatataatttatctgcatcagttgatgatcataatatgaaaatgactcatattataagaggagatgatcataaaattaatacttttaaacaaatacagatatatgaggcgctaggatgggaaattccacaatttgctcatatacctcttattcatacaatagaaggtaagaagctatcaaaaagagacaatgcctcaacattagaagattactcaaaaatggggattctgcctgaatcacttagaaattacctattaaggctaggatggtcttataaagataaggaaatttttagcttagatgaaagtataaaactttttaatttagaaggaataggtaaatcaccttcaaaacttgatatgagtagaattctttctatgaatgaatattacattaaaaatagtgaagaaaaaatgttgtacaaaaagttaaaagaatattgtgagatctataaagatagaattaaagaagataaagaaaatacaataaagagctctttaacatttttaaaaaataaagcaaaaacacttgaggatatatataacaattctaaatacatattaaatgataaagttatttttaacgacactgataaacaactgataaacgatgaagcaaaaaaaataatacatttatttaaagagaagatttcagaattagaattttttgatagagaaaatttagaaaaaattataaatgcgataataaaattgaataatacaaattttaagggcattgggcagccattacgaataatgctaacaggatctaaatttggtccaggaatatatgatataatattatctcttggaaaaaacgaagtaataaagaagattaggtaat

SEQ ID NO: 300055 - DNA, 955 bp, Unknown
  Bacterial polypeptide expressing nucleotide sequence isolated from the Sargasso Sea
gataaagttttatttaaatctgacggaatgcctacttatcatttggccaatatgtttgacgatcatcaaatgaaaatcactcatgtaataagaggtgaggagtggcttccttctgctccattacatgtaattttgtataaagcttttgggtgggaatcacctgagtttgcccatttgccattgttgcttcgtcctgatggaaatggaaaattgtccaaaagagatggtgacagacttggttttccagtttttccattggattggaataccgctgaaggtgaattgtattcaggatatagagaaaaagggtactttgctgattcatttataaatatgcttgcctttttaggttggaatccaggtacatctcaagaaatattttctttaaatgaattggttgaatccttttctttagaacgtgtttcaaaatctggtgctaagtttgatccagataaaacacggtggtttcaacagcaatatttaagaagtaaatcagataagtctttggcaaatcttttaagagatcagattttagaaaatatagatttagataaattagaggtgatttgttctttaatgaaagaacgagccacttttattggagatatttcaaatgaaggttcttatttaattcacccccctaaaatttatgacacagctattattaataaaaagtggaaagataatacgactgaattaatgatagggtggaggtcagaattgaataatataaatacttttacttctgctgaaattgagaattcattcaaaacatatgttgccaaaatggatgctaaaataggagctgttttacttccatttagactattggtgaccgccgttcctatggggccaggaatgtttgatattgcttcttttttagggaaagaggaagttttaaatagaatggattttggattagaatctgtacaaaaaataattcatgaagcacacc

SEQ ID NO: 300056 - DNA, 806 bp, Unknown
  Bacterial polypeptide expressing nucleotide sequence isolated from the Sargasso Sea
aatgtctaaagtagcaacaagatttgctccatcaccaactggtcctctacatataggaggcgttagaacggctttatttaattggttatttagtaaaaaccaaaatggaacttttcacttaagaattgaagatacagataaagaaagatcaaaagatgagtacaaagatcaaataattaagtcactcaaatggattggtattggatatgatggtagtgaatatattcaatcttctaaaataaatgatcatgttaatattgctaatgaattactaaaaaatggtcatgcttacaaatgttattgttcaaatgaagaaatagaagaacagaaaaatagagcaaaacaaaaaaaaattccttatatttatgatagaaaatggagagacaaaagtgagaatgatgctccaaaaaatataaaacctacaataagatttaaaagtaaaattgatggatccactatattaaaagatttagttcaaggagatattgaaatagagaataatactattgaagattttattatattaagaaatgatggatcaccaacttataatttatctgcatcagttgacgatcatcacatgaatattacacatataattcgtggagacgatcataaaattaatacctttaaacaaatgcaaatttattcgtctatgaattggaaaatcccctcttttgctcatatacctttaattcatacaacagaaggaaaaaaactatcaaaaagagataaggcatcaacattagacgattattcaaagattggaattataccagaagcattaagaaattacctcttaagat

SEQ ID NO: 300057 - DNA, 315 bp, Unknown
  Bacterial polypeptide expressing nucleotide sequence isolated from the Sargasso Sea
tctgataaaaataaatcaaaaagcctctttaagaggcttttttgattttagaagaaaaagtaatttcatgaatacttttgaatcatctatcactaatatcatgaagccccgcttaagatttgcgccaagcccgacaggacaattacatcttgggggagccaggactgctttatcaaattatttatacgccaagaagaatggcggacaatttttagtaaggatcgaagacacagacctagaacgctcaaaaaaggaacatatagatcaaatttgtgattcgttgcagtggctggggctgaattgggatgaagagtt

SEQ ID NO: 300058 - DNA, 565 bp, Unknown
  Bacterial polypeptide expressing nucleotide sequence isolated from the Sargasso Sea
atgtctaaagtaagattaagatttgcgcctagtcctacaggacctctacatattgggggtctaagaactgctttatataattatttaatagcaaaaagactggacggaagttttatattaagaatagaagacacagaccaaaaaagatttaataaaaatgcagaaaaacatattttagactctttactttggtgcaaaatattacctgacgaaagcccaattagcccaggaaaatttgggccgtacagacaatctgaaagaaaagagatttataaaaattatgttgataaattaattgatcagggtaaagcttattacgcatttgatgatgttgaagaacttaacctgttgagaaaagcacatgaaaaaaagggagaaacttttatttataattgggaaaacagaaaagacctaaaaaactcaatttcacttagtgataaggaaactaaagtaaatttagataatggaaattatgttattcggtttaattcttttcaggaaaaatccgaaaatgaatttatagtttttcatgatgaaattagaggtgaaattaaggtagatctta

SEQ ID NO: 300059 - DNA, 420 bp, Unknown
  Bacterial polypeptide expressing nucleotide sequence isolated from the Sargasso Sea
catgaacgtcgtcacccgctttgcgccctcaccaactggatatctccacattggcggcgctcgcacagctttgttcaactggctattcgctaggcatcatggtggcacatatctgctgcgcattgaagatactgacaaagagcgctcaagccatgccgcggtggcagctattcatgaggggcttagctggcttggacttaacggagacaaaacagccgttagccaatcagcccaaatccaacgtcacatcgagattgccgacgaacttgtcaaaaaaggggcggcttaccgatgctttttgaatgacgctgaattacgagcacttcgcgaagaatgtaaggcaactggggctccactacgatcaccatggcgcgacaaagacccaggtagtgcgcctaagcggccattcacagtgcgtat

SEQ ID NO: 300060 - DNA, 547 bp, Unknown
  Bacterial polypeptide expressing nucleotide sequence isolated from the Sargasso Sea
aatgtcaaaagtagcaactagatttgctccgtcaccgacggggccattacatataggtggggttcgaacagctttatttaactggctatattcaaaaaatcaaaatggtaatttttttttaagaattgaagataccgataaagaaagatccaaagaagaatatagaaatcaaattattaagtccctcaaatggataggcataaactttgacggggaggaatatgtacaatcaaaaaaaatagatgatcatattaaagttgccaatgaattattaaataaaggtagcgcttataaatgttattgttcatctgaagaaattgaggagcaaaaaaagagagctaaacaaaaaaaaattccatatatttacgatagaaaatggagagataaaaaagaaactgatgctcctaaggatataaaaccagtaataagatttaaaagtaaaatagatggaatatcaattttaaaagatttggtccaaggtgatgttgaaattgaaaataatacgattgaagattttataatcttaagaaatgatggtactccaaca

SEQ ID NO: 300061 - DNA, 907 bp, Unknown
  Bacterial polypeptide expressing nucleotide sequence isolated from the Sargasso Sea
tcaatcgacaaccatactattgaagatttcgttattttgagaaatgatgggtcaccaacttataatttgtcggcatccgttgatgatcatgagatgaaagtgactcatataattagaggtgatgatcataaaattaatacatttaaacaaatgcaaatatatttagcaatgaattgggaacttccatcgtttgcacatattccattaattcacaccacagaaggaaaaaaactatctaagagagacaaagcatcaactttggatgattattcaaaaattggtattatgccagatgcactaagaaattatctcttaagattgggttggtcattcaaagataaagaaatttttactttagaagaaagcataaaacacttttctttagaaggtataggtaaatcaccttcaaaactagatataagtagaattttgtcaatgaatgagcattatattaaaaatatcaatgaaaatgatcttttaaatcacttaaaaaaatattgtgaaatttataaagataaaattgataacaaatctgaaaaaattaagaagtctttaaattttttaaagaataaagctaaaacacttgaagatatatataataactcacaatatcttataaaagataaaataaatatatcttcagaggatcaaaaacttttagatagtttagcaaaaaaaattttaaaagattttttaaaagaatttgagaacttatctaatataaataaagaaaatttggaaaaaattataaataatctaataaaaaataataaaacgaacttcaaaggggttggtcaacctctaagagtagctttagtaggttcaaaatttggtccgggaatatacgatataataatgtctctagataaaaatgaagtaattgaaaggttaaaggctattaattaaa

SEQ ID NO: 300062 - DNA, 913 bp, Unknown
  Bacterial polypeptide expressing nucleotide sequence isolated from the Sargasso Sea
tattgtgcaaggagatgtaagggtatcaaataaacaacttgatgattttgttttattaagaagcaatggactaccaacatatatgttagcagtagttgttgatgattacgacatgggaataactcatattattagaggagatgaccatcttaataatgcctttcgtcagttttggatttacaaagcattagattggaaagtccctgagtttgctcatatacctctaattcatggtgaggatggagcaaaattgtccaaaagacatggtgcacttggaattcaagagtataaagaaatggggtttttatctgaaagtataaactcttatttaatgaatttaggctggagagagcctgaaaaggattttatcgatttagatgaagcatcaaaaatatttgaattaaataaaataggaaaatcaccatcaaggtttaatattgcaaagttaaaaaaaattaattctcattttttgagatcaaaaaaacaaaaatttttaattaatcttattaaagaaaaaataattaactttacaactaattttgaagaaagattaattaaagtattaccattaattattgaaagagctgaaactttaaatgatataattagttcaactaactggtttagttcagacgattataaaataatttttaaagaaagaaatatttttaagaatgaagaagttagatttttagaattatttatagaaagtttttcagattgtaaaatagattcaaaaagtgaaatggagaatcattttaataaatggctatctcaagaaaatataaaaatgaaacaaataggaaagcctcttagactaagcctaacagggagaggatcttctattgatttgatatcgattttagatgttttaggggtagaagaaattaaaatagaattaattataatttaa

SEQ ID NO: 300063 - DNA, 938 bp, Unknown
  Bacterial polypeptide expressing nucleotide sequence isolated from the Sargasso Sea
ggacggatccgttatttttgacgaccagatccgtgggccaattgaattcagcaaccaggaacttgacgatctaatcatccgtcgtaccgacggttctccgacctacaacttctgtgtggttgtggatgactgggatatggagatcactcacgtgatccggggtgaagatcatatcaacaacaccccgcgtcagatcaacatcctgaaagcgctgaacgcgccggtaccggtatacgcccacgtttccatgattaatggtgatgacggtaagaaactctccaaacgtcacggcgccgtgagcgtcatgcagtatcgtgatgatggctacctgccggaagctctgctgaactacctggtgcgtctgggctgggccagcggcgatcaggagatcttcagccgtgaagagatgatcaagttgttctctctcggagcagtaagcaaatcggccagcgcattcaacacagataaactgctgtggctgaaccatcactatattaattcgatggcgccggaatacgtagcgacctatctgcagtggcatattgagcaggaaaatatcgatacccgtaacggcccgcagctggctgagctggtcactctgctgggtgaacgttgcaaaacgctgaaagagatggcggcaagctgccgctatttctacgaggagtttgacgagtttgatgcggacgctgcgaagaaacacctgcgtccggttgctcgtcagccgctggaagtcgtgcgtgacaaactggccgccatcactgactggacagcagaaaatgttcaccatgctattcaggcgacggcggatgagctggaagtcgggatgggtaaagtcgggatgccgctgcgcgttgcagtgaccggggcaggccagtcaccggctcttgatgtgactgtacatgcgatcggtaaatcccgcagcgtagaacgtatcaata

SEQ ID NO: 300064 - DNA, 736 bp, Unknown
  Bacterial polypeptide expressing nucleotide sequence isolated from the Sargasso Sea
atgaaaaaagtagcaacaagatttgctccatcacctactggacctttgcatatcggcggtgtgagaacagctttatttaattggttatattctaaaaacaaaaaaggagatttttatttaagagtagaagatacagataaggaaagatcaaaagatgaatataaaggtcaaataattaaatcccttaaatggattggtattaattatgatggagaagaatatattcaatcaaaaaaagttgaagatcacataaaagttgcaaatgaattattaaaaaatggtcacgcatataaatgttattgttcaagtgaggaaatagaagaacaaaaaaaaagagcaagacaaaaaaaaattccttatatttatgatagaaagtggagagataaaaaggaagcagatgcacctaaagatattaagccagtaattcgatttaaaagtaaaatagatggaacctctatattaaaagatttagttcagggtgatgttgaaattgataataacactattgaagattttatcatcttaagaaatgacggaacacctacatacaacctatcagcatcagttgatgatcatcaaatgaatatgacacacattatcagaggtgatgaccataaaataaatacttttaaacaaatacaaatttatcaagctatgaaatgggagttaccttcttttgctcatatacctttgattcacacaatgaaggaaagaaattatcaaagagagataaggc

SEQ ID NO: 300065 - DNA, 869 bp, Unknown
  Bacterial polypeptide expressing nucleotide sequence isolated from the Sargasso Sea
aagcgggggcaaattcattttaagaattgaagatactgatagcaagagaactgtcgatggtgctgagaaacatataattgattctcttgaatggttgggtcttgatgttgatgaaggtccaattaaacagagtaacagatccagcctttataaaaaacaggtagacaaattattaaagcaaggaaatgcttactacgcatttgactcacaagaagatcttgatggtgctagagaagctgggggtaaagattttaaatacaatgtaaaaacaagaatggggcttaataactcttttacagtatctgaagaagaaagaaaaaaaagagtagaagagggcaggtatgtagtaaggttggctattccagaaaacaaaaaaatatctgcttacgatgagatacgcggagaattaacttttgattccaatgaactcgaggacaaagttattcttaagtctgatggaatgccaacctatcatttagccaatgttgttgacgataatgatatgaaaataacatccgtggttaggggtgaagaatggctctcgtcgcttcctgttcattatctactttatgagttttttggatggagccctcctaaattttatcacctccctttaattttaaaaactagtggagcgggtaagctttcaaaaagagatgcagacgaacaggggcaccctatttttgctgttaaatgggaagattccaatggatttaaagattacggcttcattcctgaaggtataaataattacttagcgcttctgggctggagcaacaaagaagaaagagagaagtatacaatggcagagctggttgagtcttttaattataaggaaataaacaaatcaggagctcgtttgatttaag

SEQ ID NO: 300066 - DNA, 265 bp, Unknown
  Bacterial polypeptide expressing nucleotide sequence isolated from the Sargasso Sea
atgattactactagatttgcaccatcccctactggttttttgcatattggcggagtaagaactgcattatttaactggctttatgcaaaaaaaaattcaggtaaatttttattaagaattgaagatactgatagagaaagatctagcaaagaagcaattaaaaaaattattgatggtttgaattggttaggtttagaaaatgatggagaaatagtatatcaacacaaaaatgaagaaaggcatattgaagttgcccgatatactg

SEQ ID NO: 300067 - DNA, 895 bp, Unknown
  Bacterial polypeptide expressing nucleotide sequence isolated from the Sargasso Sea
tactgggcctcttcatattggtggtgtaagaactgccctatttaattggctgcttgcaaaaaaaaataagggaaaatatttcttaagaatagaagatacagataaagaaagatccaaagatgagtttaaaaaacagataatatcatcattagcctggctcggaattgaacatgatgataaggaatatattcaatcaaaaaatatcaataaacatgttgcagttgctgaagagcttcttaaaaaaggatttgcatataaatgctattgctctgaggaagaaattaatgaacagaaagcaaaatccaaaaaacaaggtatgccttatgtatataatcgaaaatggagagatgctaaagatcttgaaataccgaaaaacgttaaaccggttataagatttaaaagtaaaatttcaggtaacacaattataaaagatttggttcaaggtgaaagaaatatttctaattcaacaattgaagattttgttattttaagaaaagacaaatcacctacttatcaattatcagcaacagtagacgatcatgagatgaaaattacccatgttattagaggtgatgatcatatgatcaattcgtttaaacaaaaacaaatatatgatgccatgggttgggatgttccgaacttcgctcacattccgttaattcatagtgaacaaggaaaaaaattatctaaaagagataacgcctctacgcttgaagactatgttaaaattggaattatttcagatgctttaagaaattatttattaaggttaggatggtcttacaaagataaagagatttttactaagcaagaaagtattgatttatttgatctaagtggtgtcggtaaatcaccttcaaagttagatatgaatagaatttattcaataaatgaa

SEQ ID NO: 300068 - DNA, 793 bp, Unknown
  Bacterial polypeptide expressing nucleotide sequence isolated from the Sargasso Sea
tgcaactagatttgctccatcacctacaggcccattacatataggaggagttagaacagctctatttaattggctatattcaaaaaatcaaaaaggtaatttttatcttagaattgaagatacagataaagaaagatcaaaaaatgaatataaaaatcagataattcaatctcttaaatggataggcataagccatgaaggagatgaatatatacaatcaaaaaaaataaatgatcatataaaagttgcaaatgaattattaaaaaatggaaatgcctataagtgctactgctcaaatgaggaaatagaagaacaaaaaaaaagagcaaaacaaaaaaaaattccttatatttatgatagaaagtggagagataaaagtgaaggtgaagctccacaagacattaagcccgtaataagatttaaaagtaaaattgatggaactactttattgaaagatttggtacaaggagatgttgaaattgaaaataacactatagaagattttgttatattgagaaacgatggcactccaacatataatttatctgcttctgtagatgatcaccaaatgaatatgacacacataattaggggtgatgatcataaaataaatactttcaaacaaatacaaatttatgaagctatgaaatgggaagtaccatcttttgctcatatccctttgatacacactattgatggaaaaaagctttctaagagagataaagcttcaactttagatgattactctaaaattggtattatgccagatgcacttagaaattatcttcttaga

SEQ ID NO: 300069 - DNA, 564 bp, Unknown
  Bacterial polypeptide expressing nucleotide sequence isolated from the Sargasso Sea
catgtccgaaattattaaagttagatttgcccccagtcctactgggtttttgcatattggtggagtgcgaacagctttgtttaactggctgtttgccagacatcatggtggtaaatttattttaagaattgaagatactgacctttctcggtctactgaagaatccattcaagaaattcttgaatccatgcgctggttgggtttggattgggatgaaggcccatttcgtcaaaccgagaggcaaggaatttatgcaaaaaaaattatgcacctgttgtcaacaggaaaagcctatcattgttattgcactcctgaggagctagatcagaaaagaagcgatgctcaaaaagcagggcttaaacctaaatatgatggtacctgtcgtgagcgaacagatactcctgaagcgccctatgttgttcgattcaaagccccgcaggaagggtctgtagtcgtagaagatctgctgcgtggcaaagtgattttcgatattgctgaattggatgatctcattattcagcgaacggatggcactcctacttataacttcgttgtggttgtaga

SEQ ID NO: 300070 - DNA, 893 bp, Unknown
  Bacterial polypeptide expressing nucleotide sequence isolated from the Sargasso Sea
atctgtattaaaagatttagttcaaggtgatgttgaaattgaaaataacaccattgaggattttgttatcttaagaaatgatggaaccccaacatataatttatcggcatccgtagatgaccatataatgaatatgacacacattattagaggtgatgatcataaaattaatacctttaaacaaatacaaatttatgaagctatgaaatggaagttgccatcatttgcacatataccattgatacacacaattgaaggaaagaaactatcaaagagagatcaagcttctacattagatgattactccaaaattggtattatgccagatgctctaagaaattatcttttaagattaggatggtcttataaagataaggaaatatttacattagatgaaagtataaaattttttaatttagacggtatcggaaaatctccttctaaacttgatatgagtagaattttatcaatgaatgagcattatattaaaaatattaatgagaatgatctattcaatcaattaacagaatattgtaaattatataaaaatgaaattagatctgataaaaaagataagatcaaaaaatcattaactttcttaaaaaataaagcaaaaactttagaagatatatttaataatggtcaatatattattaaagatgaggttaattttaataaggatgatgtcaaattgattgacgataaagcaagacaagtaatttctgattttaaagtccaatttgataaaatagatctaccttctcgagaaattttagaaccaataataaatgagcttataaaatctcatgacacaaattttaagggagtaggacaaccgttaaggattgttctaactggatcgaagtttggaccaggtatatatgatattattt

SEQ ID NO: 300071 - DNA, 553 bp, Unknown
  Bacterial polypeptide expressing nucleotide sequence isolated from the Sargasso Sea
atgtcaaaagtagcaactcgttttgctccctctcctacaggagctcttcatattggtggtgtcagaactgccttattcaattggctatattctaaaaatcaaaaaggcactttttgtttaagaattgaagatactgacaaagaaagatcgaaagaagaacacaaaatacaaataattaaatccttaaattggttgggcataaaacacgatggtgaagaatatattcaatcaaccaaaattgataatcatgtaaaaattgcaaatgaattgttaaaaaatggacatgcttataaatgctactgttcacctgaagagatagatgaacaaaaaaaaagagctagacaaaaaaaaataccttatatttacaacagaaaatggagagatgcagacgaaaaagatgctcctaaagaaattaaacctgtaataagatttaaaagtaaaattgaaggaagctcaatgcttaaagatttggttcaaggtgatgttgaaattgaaaacaacacaatagaagattttgtaatattaagaaatgatggaactccgactttataat

SEQ ID NO: 300072 - DNA, 577 bp, Unknown
  Bacterial polypeptide expressing nucleotide sequence isolated from the Sargasso Sea
atgaaaaaagttgcaactcgttttgcaccgtcgcctactggtccattgcatattggaggtgttagaacagctctatttaattggttatattcaaaaaataaaggtgggtctttttttttaagaattgaagatactgataaagaaagatcaaaagatgagtacaaagaacaaattataaaatcgttaaaatggattggtgtagaaaaagatggagaagaatatattcaatcaaaaaaaattaatgatcacataaaaattgctaatgaattacttaaaaatggatatgcatataggtgctactgctcaagcgaagaaatagaggaacaaaaaaaaagagcaaagcaaaagaaaattccatatatttacgatagaaaatggagagataaaagtgaagcagaagctcctgctgatgttaaaccgacaataagatttaaaagtaaaattgatggaactacagttttaaaagatttagttcaaggaaatgttgaaattgaaaataatactattgaagattttattattttaagaaatgatggtacaccaacatataatttatctgcatctgttgacgaccatc

SEQ ID NO: 300073 - DNA, 885 bp, Unknown
  Bacterial polypeptide expressing nucleotide sequence isolated from the Sargasso Sea
aggcaatttttatttaagagttgaagatactgataaagaaagatcattagatgaatataaagatcaaataattaaatctcttaaatggattggtattaattatgatggagaagaatatatacaatcaaaaaaaatagaagatcacataaaagttgcaaacgaattactcaaaaacggtcatgcatataagtgttactgctcaagtgaagaaatagaagaacaaaaaaagagagcaaggcaaataaaaattccttacatttacgatagaaaatggagaaataaaaaagaaactgatgctccaaaagatataaaaccagttattaggtttaaaagtaaaatagatgggacatctgtattaaaagatttagttcaaggagatgtcgaaatcgataataatacaattgaggattttgttatcttaagaaatgatggttcacctacatataacttatcagcatcagttgatgaccaccaaatgaatatgacacatataattagaggtgatgatcataaaattaatacctttaaacaaattcaaatttatcaagctatgaaatgggaaataccttcatttgcacatatacctttaatacatactattgagggaaagaagctatcaaagagagacaaggcctctacgttagatgattattctaaaatcggtattatgcctgatgctcttaggaattatcttcttagattaggatggtcttataaagacaaggaaatatttactttagatgaaagtattaagcattttaatctcgaaggaattggtaaatctccttcaaaactagatatgagtagaattttatcgatgaatgaacactatataaagaatatcgatgaaaatgatttatttgatcaattaactgagtattgcaa

SEQ ID NO: 300074 - DNA, 501 bp, Unknown
  Bacterial polypeptide expressing nucleotide sequence isolated from the Sargasso Sea
tatgacttttttaacaaggtttgcaccgtcacctacaggatatttacacgttggtaatatcagaaccgctctttttaattttttactttcaaaaaagaataagggaaaatttttactaagaattgatgatacagatttagaaagatctaagcagatttatgaagatgaaattaaaagagacttagaatggcttggaattgaatgggatttttgtgaaagacaatcaactagatttgatcgatattacgaagctcttgaaaatttaaaatctgaaaataaaatttatccctgctatgaaactaaaagtgagcttgatttaaaaagaaaaaagcaacttaatatggggaaaccaccaatttatgacagaactgctttgaaactgtcccacgaggatcataaaaaatttaaagaaaaagggaagaatgctcactggagatttttattagataaaaaaaaggttggttggaatgatataattataggtagtgtatctattgatct

SEQ ID NO: 300075 - DNA, 518 bp, Unknown
  Bacterial polypeptide expressing nucleotide sequence isolated from the Sargasso Sea
tttggttcaaggtaatgttgaaattgaaaataatacgattgaagattttgtaatcttaagaaatgatggcacaccaacatataacttatcctcgactgttgatgaccatcaaatgaatatgacacacataattagaggggatgatcataaaataaatacttttaaacaaatccaaatttacgaagcaatgaaatgggatttacctgcttttgcgcatataccattaatacatacaattgagggaaaaaaattatcaaaaagagataaggcatcaacattagatgattattctaagattggtattatgcccgatgctcttagaaattatcttttaagattaggatggtcttataaagataaggaaatatttacaatggaagaaagtataaaacattttaatcttggagggattggtaaatctccatctaaactagatatgagcagaattttatctatgaatgaacactacattaaaaacatgaatgaagatgaattatttaatcaactaatagaatatt

SEQ ID NO: 300076 - DNA, 865 bp, Unknown
  Bacterial polypeptide expressing nucleotide sequence isolated from the Sargasso Sea
tgtaattttaagaaaagataatactccaacataccagctatcagccacggttgatgaccatgaaatgaaaataactcatattattagaggagatgatcatatgattaactcttttaaacaaagacaaatttacgaagccatgggttgggaggttccaaactttgcacacattcctttaattcatagtgaacaaggaaaaaaattatcaaaaagagataatgcttccactctcgaagattatattaaaataggagttatatcagacgctttaagaaattatttgttaagattaggatggtcctacaaagataaagaaatttttacaaaacaagaaagtattgatttatttgacttaagcggtgttggtaaatcgccttctaaattagatatgaataggatttattcaattaatgaaacatacataaaaacaatagatgaaaaagatctttttagtttcttcaaagaatacgtctcgaaatacaaaaagcctatagatcaagcaaaagagaatattattttgaaatcaatgaattttttaaagaataaagcaaaaaccttagaggatatttggaataattctcaatatattattaatgataaaattgagattggtgcagatgataaaaaacttattgatgatttatctaagaaagtaattaatgactttattaatgaatatgaaaaactatcttctttatctagagatactttagagcctataatcaaatccttaataaataagcataaaactaattttaaaggtgtgggtcagcctataagaatagcgctagtgggttcaaaatttggaccaggtctctatgatataatattatcattagataaagctgaggtaattaaagattaa

SEQ ID NO: 300077 - DNA, 571 bp, Unknown
  Bacterial polypeptide expressing nucleotide sequence isolated from the Sargasso Sea
atgaagcagctctttaagttagacgacatcaacaaagcgccttctgcctttaataccgagaaactggtttggttaaaccaacactatattaagacgctcgatcctgaatatgtggcgtcgcacttacaatggcatatggacgatcaaaagatcgatacctcaaatggccctgcgttatctgcggtagtgacggctctggctgaacgcgctaagaccttaaaagagttagccgcttctagccgctacttctatgaggacttcgcagagttcgatgccgagcaagcgaaaaagcacttacgtggtgtcgcgcttgagccattgcaattagtgcaacaaaaactggcagcattaactgagtggactgttgaagctatccaccaagcgattgaagccaccgcgaccgaattagaagtcggtatgggtaaagtaggtatgcctttacgtgtcgctgtgacaggtgcagggcagtctcctggcttagatatcaccttattcttaataggaaaggcgcgttctgagcaaagaatatccaaagcgattgaatttgtagcagatagaataaattcctaaa

SEQ ID NO: 300078 - DNA, 792 bp, Unknown
  Bacterial polypeptide expressing nucleotide sequence isolated from the Sargasso Sea
tcctttatataatcttgcggttgtagttgatgataatttcatgaatatcacccatgtagtgaggggagaagaccatatttctaatactgcaaaacaaatacttatttatgaagcactaaattttaatttaccaacgttttctcatacaccgctaatactgaacagtgaaggcaaaaaattatccaagagagattgcgttacttcaatcgacgaatttagagatatgggatatttacctgaggccttagcgaactatatgtcatttctaggttggtcaccaaaatctaccgagaaagaaataatttctcttgatgagatatctaaaatttttgacttatcagatataaataaagctggagccaaattcagttgggaaaaactaaactggattaattctcaatacataaaaaatatggagtcaattaatttaagtgagttaataagtaaatattgggacgatatggggtggaaaccgccatcaaaagaatgggctattaaattatcaattttgattaaagactcaatgacccgtttaacggactccattgatcaatcaaaaccatttttcttattgcctacgattcaaaaagaaggtcaagattttctcgaaaagaatgacggcaaaatatctctaaaactaatattaaattatttgattgagcaaaatactgcaaaattagacaaagaaaaagccaaagaaataataaacgaaatttcaaaaatgcataatgttaaaaaagggattttaatgaaatcactaagagtagccttatttggttctcttaatggacc

SEQ ID NO: 300079 - DNA, 529 bp, Unknown
  Bacterial polypeptide expressing nucleotide sequence isolated from the Sargasso Sea
atgtcttttaattgtaggtttgctccatcccctactggtccacttcatattggaggggtcagaacagcattatttaattggcttcttgcaaaaaaaaataaaggaaattattttttaagaatagaagatactgacaaagaaagatctaaaaatgagtttaaaaaacaaattatttcatcactagcgtggttaggtattgagcatgatggcgaagaatatattcagtcaaagaatattaaaaaacatatagcaatagccgaagagcttcttaaaaagggatttgcctataaatgttattgttctgaacaggaaattaatgaacaaaaagaaaaatgcaagaaacaaggaataccttatgtttacaatagaaaatggagaaacgcaaaggatcttcaaataccaaaagacatacaacccgtaattagatttaaaagtaaaatttcagggaatacaatcattaaagatttagtgcagggagatagaaatatttccaactctactatcgaggattttataatattaagaaaag

SEQ ID NO: 300080 - DNA, 684 bp, Unknown
  Bacterial polypeptide expressing nucleotide sequence isolated from the Sargasso Sea
attgagcatgatggatgaagaatatattcaatctaaaaatattgataaacatgttgcagttgccgaagaacttattaaaaaaggttttgcctatgaatgctattgtactgaggaagagataaatgaacaaaaagagaaatgtaaaaaacaaggtataccgtatgtttataatagaaaatggagagaagctaaagaacttaaaattccaaagggtgtaaaaccagtaataaggtttaagagtaaaatttcaggaaacacaattataaaagatctagttcaaggagagaggaatatctctaattctacaattgaagactttgtaatattaagaaaagacaaatcaccgacatatcaattatcggcaacagttgatgaccatgagatgaaaattactcatgtaataagaggtgatgatcatatgattaattcttttaaacaaaaacaaatctatgacgccatgggctgggaagttccttactttgctcatattccgctaattcatagtgaacaagggaaaaaattatccaaaagagataatgcctctacacttgaagattatgtaaaaattggaattatttcagatgcattaagaaattatttattaagattaggatggtcttataaagataaagagattttcaataagcaagaaagtattgatttgtttgatctaagtggggttgg

SEQ ID NO: 300081 - DNA, 756 bp, Unknown
  Bacterial polypeptide expressing nucleotide sequence isolated from the Sargasso Sea
tttgaattgttaaaaaaagataatgcatataaatgttattgttcaagtgaagaaatagaagaacaaaaaaaaagagcaaaacaaaaaaaaattccttatgtttatgatagaaaatggagaaataaaagtgaagatgaggctcctaagaatattaaaccagtaataaggtttaaaagtaaaattgatggaacaacgatattaagagatttagttcagggcgatgttcaaatagagaataacactattgaagattttataatattaagaaatgatggtacaccaacatataatttatcggcatctgtcgatgaccatcaaatgaatatgacacatattattagaggtgatgatcacaaaattaacacttttaaacaaatccaaatttatgaagctatgaagtggcaattaccatctttcgctcatattcctttaattcatactattgaaggaaaaaaactctcgaaaagagataaagcatctactttggatgattactctaaaattggtataatacctgatgctcttagaaattatcttcttagattaggatggtcttataaagataaagaaattttcactctagatgaaagtattaaacattttaatcttgaaggaataggtaaatctccgtcaaaacttgatatgagccgtatattatctatgaatgaacattatattaaaaatattgatgaaaatgatcttttcagacaattaacaaaatactgtgaaatttatcaggaaaaaatacctaatgaa

SEQ ID NO: 300082 - DNA, 922 bp, Unknown
  Bacterial polypeptide expressing nucleotide sequence isolated from the Sargasso Sea
taatttattagacgatttcattctaatgaaatccgacggatctccgacttaccacttagcaaatatcgtagatgatcatctaatggaaattagtcatgtaatgagggcggaagaatggctacccagtgcgccacgccatcaagaattgtataaagcatttggttatgaaatgccttgccttgtacacctcccaataatcttaggccctgacagatccaaattaagtaagcgtcatggagctacctcagttttgcaatttcgtgatactggctatcttccagaagcaatggtcaattttctcgcattactagggtggtcattggacgattctaccgaaatattttcaattaatgatctaatacaacatttctccatagataggatccttgccagcccgtctgtatttaatcacgagaaattagattggtttaatggtcaatacataaggcaacttaataatcaggatttagcgcaagcagtgcttccttggttgatagacggaagtagcaaaaacagctccttttacaaagcagtcaatattgaatacctagaatcgattgttccactcgagcgtgaacgattgaaagtgctatctgaagcccctgaattattctctttcttcttcaatgacgatttgggttacgataagaatcaacttatccagaaaggaatggatttagtttcgactaaaacagcgttaaatgctgcttatgatttgataaacaaagcagataactgggatattgaaacactagaaaatgctttcaggctattagcccaaacattagagattaaaactgggcaattatttgggagcatcagagttgccatcaccggaagaacggcggcaccaccattgtttgatactattcacgcattaggaaaacagcgttgtatcgaaagaatacataagcaaaagagt

SEQ ID NO: 300083 - DNA, 495 bp, Unknown
  Bacterial polypeptide expressing nucleotide sequence isolated from the Sargasso Sea
attggttagaactcgctttgcaccaagtccttctggctttcttcatattggaggtgttagaactgctctctattcttggctgtttgccagaaacaaaggcggacaatttctcttaagaatcgaagacactgatactgagcgatcaactgtggaatcgattgaggcaatattagctgggatgcaatggcttggcctagatcatgatgaggatattgtttatcaatcaaagcgattcggtatctaccaagagaaagcagaaggattgatccaagcagaccatgcttacaaatgttattgcactcctgatgaacttgaaaagatgagggctgaacaaactaagaagggagaaaaccctaggtatgacggacgctgtcgagacaagggtgatcaagacggtgaatttgttatccgtttcaaggtaaatgctaaagaaaacataaccattagtgactcagtctatggccagattacagtgcacaacgatgaactcgacga

SEQ ID NO: 300084 - DNA, 873 bp, Unknown
  Bacterial polypeptide expressing nucleotide sequence isolated from the Sargasso Sea
attgataatcatgtaaaaattgcaaatgaattattaaaaaatggatacgcttataaatgttactgttcagctgaggagatagatgaacaaaaaaaaagagctagacaaaaaaaaataccttatatttacaacagaaaatggagagatgcagacgaaaaagatgctcctaaagaaattaaacctgtaataagatttaaaagtaaaattgaagggagctcaattcttaaagatttggttcaaggtgatgttgaaattgaaaacagcacaatagaagattttgtaatattaagaaatgatggaactccgacttataatttatcagcaactgtagatgaccatgaaatgggaatgacacatataattagaggagatgatcataagataaatacttttaaacaaatacaaatttatcaagcaatgaaatggaatgtgccactttttgcccatatacctttaattcacacaatagaaggtaaaaaattatccaaaagagataatgcttcaacattagatgactattcaaaaattggaattatgcctgatgctttaagaaattatttactaagactgggatggtcatataaagacaaagaaatatttactttagaagaaagtatcaaattttttaacttagaaggtattgggaaatcaccatcaaaattagatatgagccgtattttatcaatgaatgaacactacatcaaaaatattgatgaaaatgatctctacgataatcttttaagatattgtgaggaatataaagataaaattcatacagaaaaagcaacaaaaataaaatcgtctttagtgtttttaaaaaataaagcaaaaacactggaagagatatttaataatgcaaaatatattattaat

SEQ ID NO: 300085 - DNA, 336 bp, Unknown
  Bacterial polypeptide expressing nucleotide sequence isolated from the Sargasso Sea
ttcgcatacacccttaatccttaatagcgaagggaaaaaattatctaagagagattgcgttacttcaatcgacgaatttagagaaatgggatatttgcctgaggccttatcgaactatatggcatttttaggttggtctccaaaatctgccgacagagaaatactttcacttgaagagatatctgaaatttttgacttgtcagaaataaataaagctggagccaaattcagttgggaaaaactcaactggattaattctcaatatataaaaaatatggaatcaataaaattaagtgagatcattaagaaatactgggatgacaatggttgggagcc

SEQ ID NO: 300086 - DNA, 940 bp, Unknown
  Bacterial polypeptide expressing nucleotide sequence isolated from the Sargasso Sea
aattggttatttgcaaaaaataagggtgggaattttcttctaagaatagaagatacagataaacaaagatcaaaaaaagaatatcaaaatcaaattattcagtccttaaaatggattggtataaattacgacagcgatgagtacatacaatcaacaaaaataaataatcacgttaaaattgcagaggaacttttaaaaaaaggaaacgcttataaatgttattgttcaaatgaggaaattgaagaacaaaagaaaagagctaaacaaaaaaaaattccatatctttatgacagaaaatggagagataaaaatgaaaatgaggctccaaaaaatattaaaccagtaataagatttaaaagtaagatagatggtaaatccaaattaaaagatttagtgcaaggagatgttgagatagataataatacaattgaagattttgtaattttgagaaatgatggaaccccgacatataatttatcggtgactgtagatgaccacgatatgaatgtaacacatatcattagaggagatgatcataagataaatacttttaagcaaatgcaaatatatgacgctatgagttgggatctaccggtatttgcccatatacctttaattcacacaaaagaaggtaaaaaattgtcaaaaagagataaagactctacactagatgattattcaaaaattggaataatgccagaagctttaagaaattatttgttaagattggggtggtcttttcaagataaagagatttttaatttggaagaaagtataaaacactttaatttagaaggtatcggaaaatctccttctaagttagatttaaaccgtattttatctatgaatgaatattatattaagaacatgaaagaggatagtttatttgatcaattaaaagacttttgtataaattataaagaaaaaattaccttctgaa

SEQ ID NO: 300087 - DNA, 208 bp, Unknown
  Bacterial polypeptide expressing nucleotide sequence isolated from the Sargasso Sea
attgtctgtagtcacacgatttgcaccctctcccactggctaccttcatatcggaggagctagaactgctttatttaattttatattttcaaaaataaacgaagggaagttcctattgagaatagaggacaccgatagagaacggtggagcaaagaagctgagactgcaatatttaaaggattatcctggctgggaatcgaacctgat

SEQ ID NO: 300088 - DNA, 885 bp, Unknown
  Bacterial polypeptide expressing nucleotide sequence isolated from the Sargasso Sea
cctttaagtggtaatattcactttgaagatttggtttatggagatataaatacagattgctcagaattggatgattttattattgctaggtccgatggcacaccaacatataactttactgttgttgttgatgatcatgatatgcaagtcagtcatgtgatacgcggagaggatcatatttcaaacacccctaagcagatccttatttatgatgcgttaaaatgggacacaccagagtttgctcatctgccaatgatccttggctctgatggtaagcgtttgagcaaaagacatggtgcagtaggtacacaaacctatcgagaccttggatatctcccgaataccttaattaattatttagctctattaggctggaaccctggaacagaagacgaggtttttaattttcaatttctaatggataatttttctcttgaaaagattaacaagaaagctgctgtttttgataataaaaagttggattggttaagcgggcagcatataatgaaaagcgaatcagaagaattattggattcaataaaatcaataaaaccagattgggcacctaatggcttatcagatgagtatctcttttcaataatttcacttttaaaaggaagatcaaaaacacttttagatattataaaccaatctgaatatttttttaatgaccccataaaatatgatcaaaatgcagttgcaaaatgctgggatgaagatacgtccgaattattaaaatcatttgctgaaaaagccctcacctgcttggactggaaagatgaatcaattgaagcatgtattaatgatttctcagaaaaaaaatatgtaagcaaaggtaaattaatacaatcacttagggttttcatatgtggctctcttactggt

SEQ ID NO: 300089 - DNA, 891 bp, Unknown
  Bacterial polypeptide expressing nucleotide sequence isolated from the Sargasso Sea
ctctttattatctctttgcaaaaagacgggcggtgaactggttctgagggtggaagacactgatcaagctcgtaaagtagaaaaaagtcaagagcatattgaaaactcattagcttggataggaatagattttgacgagtctagcaaaacaggcggtcaatttggtccttataaccaaagcgaaaggaaaggtgtttataaaaaacatgtaaacgttctaattgaaaagggttgggcatactatgcttttgataaaaaagaaaagcttgactttcacagactagaccatgaaaaaaaagggaaaaaatttatttataacgctcacaacaggctgaaactggacaactcgctgtctatggacaaaaaagatgttgaagaaagaatacaaaaagagaattatgttgttcgtttcaaaacaccttcagaaacaaacgttgtttttaatgatattattaggggaaagattctggtaggaactagagacattgacgacaagattctttttaaatcagacggcatgcccacataccatttagcaaatgttgttgatgatcatttaatggagatcacacatgtcataaggggtgaagaatggcttccttcacttgctctacatgtgttgctgtacagggcgttcgattggcaagagccaaaatttgcacacttgcctttaatattaaaaccaacgggtaaaggcaaactatctaaaagagatggtgataaatttggttttcctgtatatgctttggattgggcagatgaaaaggtttacaccggttttaatgagtcggggtttttagccgaagcgttaataaactatatggtttttttgggatggagcccaggaggtgaaaaagaaatatattcacttgatgagcttgtcaacgaatt

SEQ ID NO: 300090 - DNA, 800 bp, Unknown
  Bacterial polypeptide expressing nucleotide sequence isolated from the Sargasso Sea
aatgtcttttaattgtaggtttgcgccctctcctactgggcctcttcatattggtggtgttcgaacagctttatttaattggttactagctaagaaaaataaaggtaaatattttttaagaattgaagatacagacaaagaaagatcaaaagacgaatttaaaaggcaaattatttcatcgttatcatggctaggaattgaacatgatggtgaagaatacattcaatctaaaaatataaataaacacgtcgaggtagctgaaatacttgttgaaaaaggttttgcatataaatgttactgttctgaggaagagataaatgagcaaaaagagaagagtaaaaaacaaggtataccgtatgtttataatagaaagtggagagatgctaaagaccttaaaattccagaaggtgtagaaccagtaatcagatttaagagtaaaatttcaggaaatacaattataaaagatttagttcaaggagaaagaaatatttcaaattctacaattgaagattttgtaatattaagaaaagataaatcaccaacatatcaattatcagccacagttgatgaccatgagatgaaaattacacatgtaattagaggtgatgaccatatgattaattcttttaaacaaaagcaaatctatgatgccatgggttgggacgttccgaactttgctcacattccgttaatacatagtgaacaagggaaaaaattatccaaaagagataatgcatctacccttgaagattatattaaaattggaattatttcagacgcattaaggaattatttattaa

SEQ ID NO: 300091 - DNA, 592 bp, Unknown
  Bacterial polypeptide expressing nucleotide sequence isolated from the Sargasso Sea
aatgtcatttaattgtaggtttgcgccctctcctactgggcctcttcatatcggtggtgttagaactgctttatttaattggcttttagccaaaaaaaataaagggaaatattttttacgaattgaggatacagataaagaacgatcaaaggatgaatttaaaaaacaaattatttcatcgttggcttggcttggaattgagcatgacggcgaggagtatattcaatcaaaaaatatttcaaaacacattaaagttgcacaagaacttcttaaaaaaggatttgcttataaatgttattgttcagagaaagaaattaatgaacaaaaagaaaaatgtaaaaaacaaggaataccatatgtttataatagaaaatggagagatgcaaaagatttaacaataccaaagagtattaaaccagttataagatttaaaagtaaaatttcaggtaatacaattattaaggatttagttcaaggagaaagaaatatttcaaattctacaattgaggattttgttattctaagaaaagacgaaaccccaacttaccaattatctgcaacagtcgatgatcacgaaatgaaaatctctcat

SEQ ID NO: 300092 - DNA, 607 bp, Unknown
  Bacterial polypeptide expressing nucleotide sequence isolated from the Sargasso Sea
tatggtaattacgcgttttgctccttcaccaacgggcttcttgcacataggaaatgttagagcagctctaatgaactaccttcttgctaagaagagtagcggtatttttattcttaggatcgatgatactgaccaggagagatctaagcaggaatatgtagacgctatcaaggtagatttggagtggttaggtctcgaatgggatcgaattgaatatcagtcatctagattagacttatataattccgcatccgataagcttcgttctattgatttgctctacgaatgttttgagaccccctcagaactggatttaaaacgtaaaaagcaactgaatatgggcaaaccgccagtttatgaccgtgcggcaatggctttatcagatcaagaaaagtcaaatcttagaagtgatcgcggtgatggccactggagatttaagcttgagcgaaatcgtattgaatggaatgatggaatactgaaagatctttctatcgacgcggcatcagtttcagatcctgttttaataagagcggacggtcaatatttatatacacttgcatctgttgttgacgatatagacatggaaataactcacgtagtccgtggg

SEQ ID NO: 300093 - DNA, 835 bp, Unknown
  Bacterial polypeptide expressing nucleotide sequence isolated from the Sargasso Sea
tatgtcaactatcacaagatttgcaccaagtcctacaggcctattgcatctaggcaatatcagaactgctctaattaattggctttatgcaagaacaaataatggaaaatttatactgcgaattgatgatacagatctggaacggtcaaaagaagaatttacatcaaagattaaatatgatcttgagtggcttggaatagattatgatgaaactttcaatcaatcttcaagatttgatgtgtacaaggaaagatttaatcagctagttgaactaggaaggatttatccttgttatgaaaccccagaagaactagatagaaaaagaaagcttcaaatggcagctggaggaaagcctgtctacgatagatcatcattaaagttaaccgaaaaacaaaaaactgattttgagagtgaaggtcggaagcctcactggagatttttaatgaattctgagagagtgcaatgggatgatatccttaaagataaagttgatattgatctacttagtttatcagatccggttgtatatcgagaggatggagttccattatatacatttagttctgtggtggacgatattgattttaatgtaacaaatgtaattagaggcgatgatcatacaagtaatacagctgtacaaattgagttaattaattcacttgatcaaaacaagataacattcgctcatcatgcactacttacagcctcatctggtgataagctttcaaaaagagataatgtaatttcaatcgaaagttttcgcgataagcatattgaaccgcttgcgattctgagtttgttagcaactataggaacatcaaaatcgatagagtaa

SEQ ID NO: 300094 - DNA, 805 bp, Unknown
  Bacterial polypeptide expressing nucleotide sequence isolated from the Sargasso Sea
tgcccgcaggcaccagggcaagatggtcctgcgcatagaggacaccgaccgagctcgttccacccccggatccgagcaagcaatactcgacgcactctcctggctgggaatcgaatgggacgagggaccggactgcggtggagactacgggccataccgccaaagcgagcgactggagctccaccaggtggaaatcgacaggctccttgagcagggggacgcctaccggtgcttttgtacgcccgagaggctcgatgagctcaggaaggagcaaatggcgagaaaggaaacgccccgctacgacgggcggtgcctggctttgacccctgaggaatccaagcaaagggcggaaaacggggagcccttcgttgtgaggatgaagattcccagtgaaggcgagtgccggttcatggacgaattgcgtggggaagtcgtgatcgactggagccaggtggaccatcagattatccgcaagtcggatggctatcccacctatcacctagccaacgtggtggacgaccaccatatgcggatcagccacgtaatccggggggaggagtggatcaactccgttcccaagcacttgctcctctataagctcctcggttggaatcctcccgccttcgcccatttgccgcttttgcgcaaccccgacaagtccaagctttccaagcgccgcaacccaactggaatcttttactatcgcgacgccggtttccttcccgaggccatgatcaattaccttggcatgatggggtataccctgcccgaccagcgagaggtctttcgctcggcgatctcagcg

SEQ ID NO: 300095 - DNA, 809 bp, Unknown
  Bacterial polypeptide expressing nucleotide sequence isolated from the Sargasso Sea
taatggattaagatggctcggtttagactgggatgaaggtccagaaacaggtggttctcatggaccatattttcaatctgaaagattggaattataccagaatgcttctaatatactgatcgaaaataattgggcatacaaatgttattgcacaccagaagaattaactgaaatgagacaaaaccagcaaaagcaaaaacttccgcctcaatatgatcgacgttgtagaaatgcagatacttcagataaagctgcgaaaaatttaccctatgtaattagatttaaaatacctgaaaatattgacacaatagtagttgatgatttaattcgaggaagagttgaatttcaaaatacacttttagacgattttgtattattaaaatccgacggttttccaacttatcacctagctaacgtagtggatgaccatgaaatggaaatatcacatgtattaagagcagaagaatggctttctagtactccaaagcacctattgttatataaagcatttgggtatacaccaccagcttttgcacatctaccaatgatattaggaaatgacaaatctaaactttcaaaacggcacggcgctacctctatacttgaatatcaaactaatgggtacctgccagatgcaatgctaaactttttagttttattaggttggtcccttgatgataaaactgaaattttttcccttgaaaatttaatcaatgtatttactatagaacgaattggtaagtcaccttctatttttaatacagaaaagcttaattggatgaatagcctaatatataaaaacctctagt

SEQ ID NO: 300096 - DNA, 736 bp, Unknown
  Bacterial polypeptide expressing nucleotide sequence isolated from the Sargasso Sea
ttgcatattgggggagtcagaactgctttatttaattggctttacgcaaaaaaaaataatggtaaatttttacttagaatagaagacactgatcgaaagagatcaagtaatgaggctattaatataattttagaaggtctcgaatggcttggcttaaattttgatgataccccaatatatcaaaacaataatattaaaagacatagagaaattgttcaaaaactcttgaattatggtaacgcttataagtgttgggcctcagaagaggaactgacattaatgaaaaataaagctaaaaaagatggttcaaatattggttataatgggttatggcgcgataaagaaccaacagaaaatgaagagggaaaaccttatacagttaggtttaaatcagagcaaagtggtgaaacaatagttaatgataatgttcaaggcaatgtgatatttcaaaataataatattgaggattttataatcctaagatcagatgggtcaccaacttatatgctatcggctgtagttgatgatcatgacatgatgattactgatattattagaggtgatgaccatttaaataacacggcaaagcaaatacaaatatataaggctcttaattggaaagtacctaaattttctcatattccacttattcatggagatgatggttcaaaattatctaagcgccatggtgcattgggaattgattactatgaaaaaaaaaggttttctctctgaa

SEQ ID NO: 300097 - DNA, 505 bp, Unknown
  Bacterial polypeptide expressing nucleotide sequence isolated from the Sargasso Sea
aatgtcccaagttgtaactaggatagctccctctcctactggtttcatgcatattgggactgcaagaacagctttatttaactggctatatgcccgcggtagaaatggtaaattttatattcgtatagaagatacagatcgaaagcgatcaactgcagaggcaaatgaagtaattataaatggactaaattggttgggcttagattatgatggagatatagtaagtcaatttgaaagagcaccgcgacacgtagaaatagctgagaagttgttaaaaaatggaaaagcttacaagtgtttcacttctcctggagaaattcaaacttttaaagaaacagctttaaaaaatggcacatcaactctgtttaaaagcccttggagaaacgctgacccatcaagtcatcctaacagtccctatgtaataagaattaaagcccctgaaacaggtgaaacaattatacaagatgaggttcaaggaaaaattagtataaaaaataatcagtta

SEQ ID NO: 300098 - DNA, 346 bp, Unknown
  Bacterial polypeptide expressing nucleotide sequence isolated from the Sargasso Sea
atgtctaaagtagcaacacgttttgctccatcccctactggagctcttcatattggaggggttagaactgccttatttaattggttgttctctaaaaatcaaaaaggaacatttcacctaagaattgaagatactgataaagaaagatcaaaagaggaacataagatacaaattattaaatcattgaagtggataggaattgaacatgatggagaagagtatattcaatcacaaaaaatagatgatcatattaaaattgctaatgaattattacaaaaaggtaatgcatataaatgttactgctctgctgaagaaatagaagaacaaaaaaaaagagctaggcaaa

SEQ ID NO: 300099 - DNA, 831 bp, Unknown
  Bacterial polypeptide expressing nucleotide sequence isolated from the Sargasso Sea
gatggtgatgaatacttacaatcaaaagaaataaataatcatattaaaattgctaatgaattattacaaaatggtaatgcttacaaatgctattgttcaaatgaggaaatcgaggaacaaaaaaaaagagctaaacaaaaaaaaattccttatatctacaatagaaaatggagggataaaaaagaatctgaagctccagataatattaaacctgtaatacgatttaaaagtaaaatagagggatcaactactttaaaagatttagttcaaggagaggtacaaattgataataatactattgaagattttataataataagaaatgatggatcgcctacatataatttatctgcggcagtagatgatcataaaatgaaaatctcacatataattagaggagacgatcataaaattaatacatttaaacaaatgcaaatttatgaagcaatgaattggggtcttccttcatatgctcacatacctttaattcataccgctcatggaaaaaaactgtcaaaaagagacaaggaatcaactattgatgattattcaaatattggaataatgcctgaagcgttaagaaattacttactaagactgggatggtcctacaaagataaagaaatatttacccttgatgaaagtattaaatattttaatttgcaaggtattggaaaatctccctcaaaattagatataaatcgaattttatcaatgaacgaacattatattaaaaacattaatgaaaaagaattatacgaaagattagaagaatattgccttatatataaagaaaaaattgaaacaaataaaaaagataaattaaaaaat

SEQ ID NO: 300100 - DNA, 799 bp, Unknown
  Bacterial polypeptide expressing nucleotide sequence isolated from the Sargasso Sea
gacggtaatgaatatatacaatcaaaaaaaatagatgatcatattaaagttgctaacgaattattaaaaaatggtcatgcttacaaatgttattgttcaaataaagaaatagaagaacagaaaaatagagcaagacaaaaaaaaattccctatatttatgatagaaaatggagagataaaagtgatgctgatgctccaaaagatgtcaaaccagctataagatttaaaagtaaaatcgatggatcaacaatacttaaagatttagttcaaggtgatattcaaatagaaaataacaccatagaagatttcataatattacgtaatgatggatctccaacttacaatttatctgcatcagttgacgatcatcgaatgaatattagtcatataatccgaggagatgatcataaaattaatacttttaaacaaatgcagatttatttagccatgaaatggaaagtaccctcttttgctcatataccgttaatacatacaacaaaaggtaaaaaactttctaagagagataaagcatcaacattaaacgactactcagagattggaataatgccagaagcattgagaaactatcttcttagattaggatggtcttttaaagataaggaaatatttactgaagaagaaagtattaaacactttaatttagaaggaattggtaaatctccatcaaaacttgatatgagcagaatattatcaatgaatgaacattatattaaaaatattgatgaaaataaactttttaatcaattaactaaatactgcgaaatttataaagaaaaaa

SEQ ID NO: 300101 - DNA, 832 bp, Unknown
  Bacterial polypeptide expressing nucleotide sequence isolated from the Sargasso Sea
gggctgcattggcttaatttgcactgggataatgatatagtcttccaaaaagatggaattgaccgtcacagacatattgctgatactctccttcaaaagaataaagcctacaagtgctattcctctcaacaagaaatagaagaatatagaaaagaagcacgaaagtcaggtaaatcaacaatatttaactcaccatggcgcaataacactggaaaaaaaccaaagaaccaaaaatacgtaatacgtttgagagctcccgaacacggcaagaccagtatggtagatcagattttgggtgatgtagagtggaaaaacgaagcattagacgatcttattatacttagacaagacggctccccgacttatatgctggctgtagttgttgacgactacgatatgaatatttctcacgtaattcgagggaatgatcacctgacgaactcagcaagacaaattttgatttatgaagctatgaattggcatgtgcctcaattcgctcatttaccacttatacatggtagcgatggtactaagctgtcaaaaaggcatggagctttaagtattcttgaatataaaaaaatgggtttcccacctcaagctataacgaactatctagcaggattgggatggagtaaaagtgagttagagtatttttctttagaaactgccaagaaccagttctctttgaaagatgtcggcaaaagtccatcaagattcgatataaaaaaattagaaagtgtctcaaaaattcatgtaagttctacggatccaaaaatattaacagatctagtaattcaattcgttgagaggcaagcaatacacacctttaata

SEQ ID NO: 300102 - DNA, 841 bp, Unknown
  Bacterial polypeptide expressing nucleotide sequence isolated from the Sargasso Sea
tatggagaaaatttcagtgagtaaggtagtaacaagatttgctccaagcccaacaggaacccttcacattggaggagtgaggacagcattatttaactatatatatgcaaaacaaaataatggagaattcctagtaagaatagaggatacagatagagaaagatctactaaagcttatgaaaaaaatattttagatacactttcttctataggcctttcaccagataaaaaaccaattaatcaatcggaaagaaatgatatttatattaaggcagctgagcaaataatcgcatcaggtgacgcatattggtgtgattgttctgaagaagaacttgaaaagatgcgaaatcaacagatggctgacggggaaaagcctatgtacgatggcagaagtagacatcttggattagaacgttcctcgaacacagtactaagactcgccacaccagaagatggtgaaattgttatgcatgacatgataagaggagagattagattcaataatgctgaattagacgatttgattttattgagaagcgatgggacaccaacatatcatttgtgtaatgttgtagatgactttgaacaaggcgtaacagctgtaataagaggggaagaccatatttcaaacacaccaagacaaatacatatacaaaatgctttaggatacccagcacttgaatatgctcatcttccattggttttaggaccggataaaaaaagattgtctaaaagacatgcagcaaccagtttagaggaatataaagatatgggttatttagattcagcaattctcaattcattagcaagacttggatggtcaggtggtgataaagaggtc

SEQ ID NO: 300103 - DNA, 913 bp, Unknown
  Bacterial polypeptide expressing nucleotide sequence isolated from the Sargasso Sea
tggcgagatagaaaagaaagtgaggctcctaaagatgttaaaccagtaattagatttaaaagtaaaattgatgataaatctaaattaaatgatttagttcaaggagagatagaaatagaaaataataccatagaagactttattatattaagagctgatgggtcaccaacatataatttgtctgcttcagtagatgatcatcttatgaaaatgacacatataattagaggagatgaccataaaataaatacattcaaacaattacaaatttataaagctatgaattgggatgtgccctattttgctcatataccacttattcatacgatagaaggaaaaaaattgtcaaagagggataatgcatctactttagatgattattcaaaaattggaataatgccaaatgctctaaggaattatcttcttagattaggttggtcatacaaagacaaggagatttttgatctaaatgaaagcattaaatacttcaatttagagggaattggaaaatcaccatcaaaattggatatcagcaggatttattctattaatgagcattatattaagaacattgatgaaaatgacttatttaattttcttgaagattattgtgaaaactttaaagaaaaaattcctgatttaaaaaaggaaaaaatcaagacttcattaatttttttaaaaaataaagcaaaaactttagaagatatctacaacaactctaaatttttaataaatgacaagattgaaatcaatatagaggataaaaaacttttggatgaagctgcgaataaaattataaatttatttattgaagaaataaataaaatttcggattttaaaagggaaacactagaaccaataattaataatataataaaaaacaataaaacaaattttaaaggtgttggccaac

SEQ ID NO: 300104 - DNA, 901 bp, Unknown
  Bacterial polypeptide expressing nucleotide sequence isolated from the Sargasso Sea
aaaaaaattccttatatttatgatagaaaatggagagataaaaatgagactgatgctcccaaggatattaaacctgtcataagatttaaaagtaagattgacggaaaatcagtattgaaagatttggttcaaggtgatgttgaaatagataataatacaattgaagattttgtcatcttaagaaatgatggaactcctacatataatttatcagcatccgtggatgatcaccaaatgaatatgacacatattattagaggtgatgatcataagataaataccttcaaacaaatacaaatttaccaagccatgaaatgggaattgccattatttgctcacataccattgatacatacaatagagggaaagaaactttcaaagagagatcaggcctctacattaaacgattattctaaaataggtatcatgccagatgctcttagaaattatcttttaagactaggatggtcttataaagataaagaaatatttactttagaagaaagtataaaattttttaatttagaaggtatcggtaaatctccttctaaacttgatatgagcagaatcttatcgatgaatgagcattatattaaaaatattgatgagaatgatttgttcaatcaattaatcgaatattgcaaattatataaaaatgaaattcagtcttataaaaaagataagatcaaaaaatcacttactttcttaaaaaataaagcaaaaactttggaagatatatttaataatggtcaatatattataatagatgaggtcaattttaataaggatgatgttaaattaattgatgataatgcaagaaaagtaatttctgattttagtgctcaattcgagaaaatagacctgccttctcgtgagattttagagccaaatagtaaataat

SEQ ID NO: 300105 - DNA, 652 bp, Unknown
  Bacterial polypeptide expressing nucleotide sequence isolated from the Sargasso Sea
atgaaaaaagtagcaactagatttgctccatcacctacaggtccactacatattggtggagtaagaactgctctatttaattggttatattctaaaaaccaaaaaggtgatttttatttaagaattgaagataccgacaaagaaagatcaaaagatgaatacaaaaaacaaattatacaatctctaaaatggataggtattactcatgatggagaagaatatattcaatcaaaaaaaatagacgatcatattaagattgctaatgagttattaaaaaatggtcatgcatataaatgttattgttcaaacgaggaaatagaagaacaaaagaaaagatcaaggcaaaaaaaaattccctatatctacgatagaaaatggagggataaaaaagaaactgatgcaccaaaagatataaagccagtgataagatttaaaagtgaaatagaaggatcaaccgtactgaaagatttagttcaaggtgatgtaaaaatagaaaataatactattgaagattttataatattaagaaatgatggtactcctacatataacttatcagcttctgtagatgatcatcaaatgaatatgacacatatcattagaggagatgatcataaaataaatacttttaaacaaattcaaatttatcaag

SEQ ID NO: 300106 - DNA, 1159 bp, Unknown
  Bacterial polypeptide expressing nucleotide sequence isolated from the Sargasso Sea
taaacatgacgacaaagaatttattcaatctaaaaatattgttaagcatagagaaattgctgaggaacttttaaaaaaaggttttgcctataaatgttattgttcagaggaagaaataaaagaacaaaaagaaaaatgtaaaaagcaaggtatcccatatgtttataataggaaatggagggatcctaaagatcttcaaatgcctaaagatgtaaaaccagttatcaggtttaaaagtaaagtttcaggaaatactgtaattaaagatttggttcagggtgacattaatatatcaaattcaattattgaggattttgttatattaagacaggacggatctccaacttatcagttatctgcaacagttgatgatcattcaatgaaaatttcacatgttattcgaggtgatgatcataagattaatacatttaaacaaaaacaaatttatgaggcaatgaaatgggatagtcctctatttgcacatatacctttaattcatagtgaaaaaggatctaaactctcgaaaagggataaatcctcaactattgatgactatgttaaaattggaattttacccggagcacttagaaattacttattacgactaggttgggcatataaagataaggaaatcttttctctagatgaaagcattaaactttttgacctgaaaggtgttggaaaatctccgtcaaaacttgatatgtctagaatactttcacttaatgaacattatataaaaaatatagatgaaaaaattctttttgattttttgaagagttatgctcaaaagtataaaaaaactatcgatccatctaaggaggatgttgttattaagtccttaaatttcctgaaaaataaggccaaaactcttgatgatatttaccaaaattcacaatacatactaaacaaagaaataactatttcccgtgaagatttgaagcttttagatactaattctaagaaaattattggtgatttcctcaatcaatttaaaaatattaataacccaaacaaagaaagtgttgaaaaattaattaatagtttaatcagtaaatacaaaactaactttaaaggtgttggtcaaccactaagaattgctttagttggttcaagatttggccctggtatttataatatcatcttatcacttacaaaa

SEQ ID NO: 300107 - DNA, 958 bp, Unknown
  Bacterial polypeptide expressing nucleotide sequence isolated from the Sargasso Sea
atgtctaaagtagcaacaagatttgctccatcaccaactggtcctttgcatataggtggaataagaactgctctatttagttggttatattcaaaaaatcaaaaaggtaaattttgtctaagaattgaagatacggataaggaaagatcaaaaaatgaatataaagagcaaatcataaattctcttaaatggataggaattattcatgatgggaatgagtatatacaatcaaaaaaaattgatgatcatgttaaaattgctaatgaattattgaaaaataactttgcttataaatgttattgttcaagtgaggaaattgaagagcaaaagaaaagagcaaaacaaaaaaaaattccatatatttataataggaaatggagagatctttcagaggaagatgcacctaaagatattaaaccagtaataagatttaaaagtaaaattgaaggttcatatattttaaaagatcttgttcaaggagatattgaaattgaaaatagtacaattgaagatttcgttattttgagaaatgacggtacacccacatataatctatgtgctgctgttgatgatcatcaaatgaatatgactcatataataagaggtgatgatcataaaattaatacttttaaacaaattcaaatttatgaagcaatgaaatggaaactgcctttatttgcacatatacctttaatacatacaattgagggtaaaaaattatcaaaaagagataaagcttctacattagatgattattctaaaattggtattatgccagatgcacttagaaattatcttttaagattaggttggtcttataaagataaagaaatatttacattagatgaaagtataaaatattttaatttagagggtattggcaaatccccctctaaactcgatatgagtagaattttgtcaatgaatgagcactatattaagaacataaatgagaatg

SEQ ID NO: 300108 - DNA, 1309 bp, Unknown
  Bacterial polypeptide expressing nucleotide sequence isolated from the Sargasso Sea
tatgaaattaagaattgcgccatcacctaccggagagcttcatattggcaatgcaagaacggcattatttaactggctttatgcaagaaaaaataatggtaaatttcttctcagaatagacgatactgatactgaaagaagcaccccagaatacattgaaaatattgtacaaaatctttcatggcttggtatcgactgggatgagggttatgaattaagtgattcaaattcttataaacagtcagatagatttggcaggtatgaggaaatagcaaatcaactactggaaaatgattttgcatatgaagatgatggagcagttaggtttagagtcgaaaaagataaagagatatttttccaagactatataagaggagatatgaaatttaataccaatgatgttgaggattttgtaattttaagatctgataaaagcccaacatatcacttagcttcgactgtagatgatattgactatgaaataacaataatcgctagaggagaggacatcctttcttccactccaaaacatataatgataatgaatgcattaaatgcaaaagttcctgatttttgccatcttcctttattgtttggtccagatggaaaaaaattaagtaaaaggcatggtgatacttcagtctcatcttttagagaacgtggagttttatctgaaacaatgtttaattatatgtcgattcttggttggtccccaggaaatgatttagaaatatttgacaaagaatttgcaattaataattttgatttaaaaaatgttttagctaatccagcaatttttgatacacaaaagcttctttggatgaatggtcaatatataagagagtttgatgaaaaaacatttaataagattgctcttgagtcaattgaaacttcattatcaagggagctatttagcgaggaaattgaaaggatcaatttaattctttctgttgtccaagagcgccttgaaacattaaaggacttaatgggacaggttgaatttctactcgatgagccttttaatgttgacaaggacgaatgggaagaagttaattcaaaatctgcacaggattatcttacgaacattcgaaatgaatttaaaacaatgaaagatttcgaactagacaaaattgaagcaatgatgcgtgaacaattaaagaaacttgatttaaaacctaaagaaggattccaggctgcaagagttgcaataactggtacaaaaataagtccaccgttatttgaatcgatttacgcactaggtcaatcttctacaattgcaagaattgcggaaaagattgttaatttgtaa

SEQ ID NO: 300109 - DNA, 769 bp, Unknown
  Bacterial polypeptide expressing nucleotide sequence isolated from the Sargasso Sea
atattgatttataaagcattaaattttaatttgccaactttttcgcatacacccttaatactaaatagcgaagggaaaaaattatctaagagagattgcgttacttcaatcgacgaatttagagaaatgggatatttacctgaggccctatcgaactatatggcatttttaggttggtctccaaaatctgccgacagagaaatactttcacttggagagatatctgaaatttttaacttatcagaaataaataaagctggagccaaatttagttgggaaaaactcaactggattaattctcaatatataaaaaatatggaatcaataaagttaattgagatcatgagaaaatactgggatgaaaatggttgggagccgccatctcaagaatgggctaataaattagcaattttgattagagactctatgactcttttaaaagattcaattgatcaatcaaaaccatttttcttaatacctacaattcaaaaagaagggcaagattttttggaaaaccgggaaagtaaattatctttaaagctaatcttaaattatttaattgagcaaaatacaacaaatctaaataaagagaaagccaaagaaataattaacgaaatctcaaaaaagcataatataaaaaaagggattttaatgaaatcattaagagttgccttttttggatctcttagtgggccagatttaattcaaagttgggagcttttcgcagagagtaaaactgatagaactcgaattgaaagatgtctttaat

SEQ ID NO: 300110 - DNA, 637 bp, Unknown
  Bacterial polypeptide expressing nucleotide sequence isolated from the Sargasso Sea
atgtctgctgttcgaacccgatttgcgccgagccccactggatacctgcatatcggcggggtacgaacggctttattctcctggctctatgcccgccatcatggtggcgaatttgtgctgcggatcgaggatactgaccgtgagcgctctacccaggcctcagtcgatgcgattttggaaggcatgtactggatgggcctcgatgcggatgacggtccaatttatcagagtgaccgcctcgctcggtatcgtgaagtgctggatcagcttttggatcagggccttgcttattgctgctattgcaccccagaagagttggatgcggtgcgggaagagcagcgcgcgcagaacatcaaaccccgctacaaccgaaaatgccgagatgcggaggatcccccccggccgggtatcgatcctgttattcgattcaaaaatcctctggaaggaccagtcattttcgaagacctcgttcgcgggcgaatcaatatcagcaacgatgagcttgatgacctcgtgatcgcgcgagcggacggcatgccgacctacaactttgctgtagtggtggacgacatggacatggggatcactcatgtcatccgtggagatgaccatgtgaacaatacgccacgacaggtca

SEQ ID NO: 300111 - DNA, 935 bp, Unknown
  Bacterial polypeptide expressing nucleotide sequence isolated from the Sargasso Sea
atggcaagggaaggatttgggcggtgatttagttttatcaagaagggctaagggatatgagattggtgatcctttgtataatcttgcagttgtagttgatgataattttatgaatattactcacgttgtaaggggtgaagaccatatctcgaacactgcaaaacaaatattgatttataaagcattaaattttaatttgccaactttttcgcatacacccttaatactaaatagcgaagggaaaaaattatctaagagagattgcgttacttcaatcgacgaatttagagaaatgggatatttacctgaggccctatcgaactatatggcatttttaggttggtctccaaaatctgccgacagagaaatactttcacttgaagagatatctgaaatttttgacttatcagaaataaataaagctggagccaaatttagttgggaaaaactcaactggattaattctcaatatataaaaaatatggaatcaataaagttaattgagatcatgaaaaaatactgggatgaaaatggttgggagccgccatctcaagaatgggctaataaattagcaattttgattagagactctatgactcttttaaaagattcaattgatcaatcaaaaccatttttcttaatacctacaattcaaaaagaaggtcaagattttctggaaaaccgggaaagcaaattatctttaaaactaatcttaaattatttaattgagcaaaatactataaaactaaataaagagaaagccaaagaaataataaacgaaatctcaaaaaagcataatattaaaaaagggatattaatgaaatcattaagagtagccttttttggatctctaagtgggccagatttaattcaaagttgggagcttttctcagagagtaaaactgatagaactcgaattgaaagatgtatgtaat

SEQ ID NO: 300112 - DNA, 1390 bp, Unknown
  Bacterial polypeptide expressing nucleotide sequence isolated from the Sargasso Sea
aatgaaagaaattgttacaagatttgctccaagtccaaccggcactctccacattggaggtgtcaggaccgcattatttaattatgtatacgcaaaacaaaataatggaaaatttttaattagaattgaagataccgacactgaaagatctacaaaagaatttgaaaaaaacatactagataaccttatatctatagggcttgaacctgatgaagacccaattaatcaatctgaaagaaatgatatatatttgaaagctgccgaaaaaatatttaagtctggtaatgcatattggtgtgattgctctcaagaagaacttgaagaaatgagaaaggcacaagcttcagctggcaaaaaaccaatgtatgacggtagaagcagaaatcttggattagaacgatctgataggactgttttaagattagcaactcccgaagatggtcaaattattgtaaatgatcttattagaggtgaaattaaatttgataacaatgaattagacgatcttatattacttagaagcgatggttctccaacatatcatttatgtaatgttgttgacgatttcgagcaaaaagttactacagtgatcagaggagaagatcatataagcaataccccaagacaaattcatattcaaaatgctttaggttatccagaattagagtatgctcatttaccattagttttaggaactgataaaaaaagactttccaaaagaaatgctgcaacaagtttagaagactaccgtaataaaggctatcttgattcagctatcctgaatactttagcaagattaggatggtccaagggcgataatgatgttttttatatgaatgattttataaaagaatttgatataaaagatgttcagaaagctggtgcaatttttgatattactaagttagattggttaaattcacaacatcttgcaaatttgacctttcaaagttttaaaaaacaattacaaccattcttgcaagaattagatattgatattgaggatcatgaaaattctgacaaactaattgaagctatgagaacttctgataataacttttcaggaatagcaaagtcattgattccttattacaaagatattaaagaatatgatgaaaaggcaattgaaaagtttattaatgataaaaacatactaattgaattaagggatttgctaagcgaaatagataattggaatcaagaggtaattgatagcgttttaaaagagtatcaattgaaaaatgaacttagcgtaccttcagtaaatcaaccaattagaatttcgttaacaggttcaacaaaatcgcccggattaggtctaactttgagtatttttgcaaaaaatacagctctggagcgtatgaatacacttatagaaaaactttcctga

SEQ ID NO: 300113 - DNA, 1411 bp, Unknown
  Bacterial polypeptide expressing nucleotide sequence isolated from the Sargasso Sea
tatgacccgtcctgtccgtacccgcttcgcgccgagtcccaccggcttcatccacctcggcaacatccgctccgcgctctatccgtgggcgttcgcccgcaagatgaagggcacgttcgtgctgcgcatcgaggataccgacgtcgagcgttcgtcgcaggaagcggtcgatgcgatcctcgaggggatgcaatggctcggcctggatttcgacgaaggcccgatctaccagatgcagcggatggaccgctatcgcgaggtgcttgcgcagatgctcgagaagggcctcgcgtacccgtgctacatgtcggccgaggaactcgacgcgctgcgtgagcgccagcgcgaggccggcctgaagccgcgctacgacggtacgtggcgtccggagcccggcaaggtgctgccggagccgccggccggcgtgaagccggtgctgcgcttccgcaatccgttgaccggcacggtcgtgtgggacgacgccgtgaaggggcgtgtcgagatctcgaacgaggagctcgacgacctcgtgatcgcgcgcccggacggcacgccgatctacaacttctgcgtggtggtggacgacatggacatgggcatcacgcacgtgatccgcggcgacgaccacgtgaacaacacgccgcgccagatcaacatcctgaatgcgctcggcggcgagccgcccatgtatgcgcacctgccgaccgtgctgaacgagcagggcgagaagatgagcaagcgtcacggcgcgatgagcgtgatggcgtaccgcgacgcgggcttcctgcccgaagccgtcgtcaactatctcgcgcgcctcggctggtcgcacggcgacgcggagatcttctcgcgcgagcagttcgtcgaatggttcgatctcgagcatctcggcaagtcgcctgcgcagtacgaccacagcaagctgagctggctgaacgcgcattacatcaaggaagccgacaacgcgcgcctcgccgaactggcgaagccgttcctttccgccctcggcatcgacgatgcggcgatcgcgacgggccctgcgctcgaagcggtggtcgggctgatgaaggatcgcgcgacgacggtcaaggagatcgcggaaggcgccgcgatgttctaccgtgtgccggcaccggaagccgatgcgctcgcgcagcacgtgaccgatgcggtgcgtccggcgctggccgatctcgtcgccgcgctgaaggcggccgactggacgaaggaggcggtgtccgccgcgctgaagtcgacgctcggcgcgcacaagctgaagatgccgcaactggcgatgccggtgcgtctgctggtggcgggtacgacgcatacgccgtcgatcgatgcggtgctcgtgctgttcggtcgcgatgtcgtggtgtcgcgcatcgaggcggcgctggcctga

SEQ ID NO: 300114 - DNA, 1232 bp, Unknown
  Bacterial polypeptide expressing nucleotide sequence isolated from the Sargasso Sea
gatgacaccaattattactcgatttgcaccatctccaactggtaacttgcatattggaagtgccagaacagctttgattaactttatagtaaatcaacaaaatcccttatcaaaattttatatcagaattgaggataccgataaagaaagatccagatctgaatttagccaaaatattctaaagggattagaatggctaggtttaaattgggaaaatgaaatacaaattcaatcacaaagaataaaaagacatcaagaaattgccaacaagttattagaaaataaatttgcttataaatgcatttgttcagaggaaaagcttaaaaaacaaagagagctgattaaatctaataaaaatttatctaaaaaaatatgtacagaatgtaaaattaataatgaagtccaagagttgaaagaaggttttgttattagaataaaaattcctgatgatggaagtttaaagatagaagataaaatccaaggaaatgtagaagtattaaataaggaactcgatgattttatattattaagaaaggatcattcaccaacatacatgttatcagttgtggttgatgacaatgatttaggtgttaattttattattagaggagacgatcatttaaataatactttcagacaaaattatatatacaaatatttaaattggaattcaccagtatatgctcatataccattaatacatggagaagatggttcaaagctttcaaaaaggcatggagctgttgatgttttagattttaaagaaaagggatacctacctgaagctataataaataatttaatattacttggctggtctccaggtaaagaaaatgaattaatagatataaatgaaattatagaaaaatttgaaattacaaaattatctaaatcttcaagtatatttagttataaaaaattgaatttttttaataattattacttaagaaaccaatcaggtttaaataaattcttagaatattgtaaaaataataaaaaattaaaagatttaattttaaaaaatgaaaataaaataaaaacaatctttgaggtatataaaaaagatttaaataattttgcagaaattcttgatattgtagatgtctattttgataaaaacttcaaacttgaccaaaatgaagtatttagtgatgaatttaaaagtttatacaaagactttttaaactccatttcaaatattgataattgggataaagaaaatatttcaaata

SEQ ID NO: 300115 - DNA, 673 bp, Unknown
  Bacterial polypeptide expressing nucleotide sequence isolated from the Sargasso Sea
gatgcaataccgtgacaacggtttcctgccagaagctttgatcaattacttagtacgtttaggctggtctcatggtgatcaggagattttcagcaaagaagaattggtccagctgtttgatttaagcaactgtaatcgcgctccttcggcctttaacaccgataagctgatttggttaaaccagcattatatgaaaacgctggcaccagactatgtagctaaacatttagcctggcatgtggctgagcagaagctggatatcagcactggcccggcgctgactgaactggtgaaagtgcaggctgaacgggtgaaaaccttaaaagagctggtcgaagtcagtcggtatttctacgaagacttcagcgagtttgaagaaaacgcggcgaaaaaacacttacgcccagtggctgcagaacctctggttgctgttcagactaaactggctgaactgagcgactggtcggtagaggctttacatcaagccattaacgatgctgctgaaagcctgggcttaggtatgggcaaagtaggtatgccattgcgcgtggctgtaacaggcggtggcaactcaccagctttggatgcaactttggcactgattggcaaagagcgggtgttaaaacgcatcagcatggcgctggagtacatcagcaacagagctggcgaataa

SEQ ID NO: 300116 - DNA, 868 bp, Unknown
  Bacterial polypeptide expressing nucleotide sequence isolated from the Sargasso Sea
atgtcaaaagtagcaacaagatttgctccatctccaactgggcctctgcacataggcggagtaagaactgctctatttaattggttattttcaaaaaatcaaaaaggttctttttttttaagaattgaagatacagataaagaaagatcaaaagatgaatataaaaatcagataatacaatcccttaaatggataggtattgaacaagatgggaatgaatatatacaatctaaaaaaatagatgatcatattgaagttgctaatgagctattaaaaaatggtcatgcttacaaatgttattgttcaaatgaagaaatagaagagcagaaaaatagagcaaaacaaaaaaaaattccatacatttacgatagaaaatggagagataaaagtgaaaccgatgctccaaaagatataaaacctacaataagatttaaaagtaaaattgatggatctactatattaaaagatttagttcaaggcgatattcaaatagaaaataacactatagaagatttcataatattgagaaatgatggatccccaacttataatttatcagcatctgttgacgatcatcaaatgaatattactcatataattcgaggagatgatcataaaattaatacttttaaacaaattcagatttatttagctatgaaatggcaaatcccctcattcgcacatatacctttaatacatacaaccgaaggtaaaaagctttctaagagagacaaagcatcaactttagatgattattcaaaggttggaataatgccagaagcattaagaaattaccttctaagattaggatggtcctttaaagataaggaaatatttaccgaagaagaaagtattcaatactttaatt

SEQ ID NO: 300117 - DNA, 790 bp, Unknown
  Bacterial polypeptide expressing nucleotide sequence isolated from the Sargasso Sea
catgaatccagttgttaggtttgcacccagtccaacagggcaactccatataggtggtgtaaggactgctctttttaattacttgttcgccttaaaaaataatgggatttttcttttaagaattgaagatactgatatagaaagatctaaggatatctttacagagcagattatagaatcacttggctggcttgggtttaaataccaaggtaatcctataatacaatcctcaagaacaaaaaggtatcaagaaataattgaatatttaattaaaactggtagtgcatacaggtgttttgctactatcgaagagctagagaagcttagaaatgagaaggataattatttataccccggaatatggagagataggtccgaacaagaaatagaggctaaactacagaaaaaagaaaattatgtcattagaattaaaattcctctaaatggtaatatacattttaaagatctggtttatgatgacataaatacagattgctctgaattggatgattttattattgctaggtctgatggtacaccgacttacaattttactgttgttgttgatgatcatgatatgcaagtcagtcatgtaattcgtggagaagatcatatatcgaacaccccaaaacagatcttaatttatgatgcgctaaagtgggatataccagagtttgctcatttaccgatgatccttggctctgatggcaagcgtttgagtaaaaggcatggttctctaagtacacaaacttatcgagatcttggatatctcccgggataccttaattaa

SEQ ID NO: 300118 - DNA, 800 bp, Unknown
  Bacterial polypeptide expressing nucleotide sequence isolated from the Sargasso Sea
tatgaaaaaagttgcaactcgttttgcaccctcacctacaggtccattacatatcggaggtgttagaacagctttatttaattggttatattcaaaaaaccaaaatggatcattttatttaaggatcgaagatacagataaagaaagatctaaagacgagtacaaagatcaaattataaaatcacttagttggatcggtattgaaaaagatggagatgaatatattcaatcaaaaaaaattaatgatcatataaatgtcgcaaaacaattactgaaaaacggacatgcatataaatgttattgttcgacagaagaaatagaggaacaaaaaaaaagagcaaaacaaaaaaaaattccttatatctacgatagaaaatggagagataaaaaggaaaccgatgctccaaaaaatattaaaccagtaataagattcaaaagtaaaattgatggaacatcagtattacaagatttagttcaaggaagtattgaaattgacaataatacgattgaagattttattatcttaagaaatgatggatctccgacatataacttatcagcatcagttgatgatcatcaaatgaatatgacacacataattagaggtgatgaccataaaataaataccttcaaacaaatacaaatttatgaagctatgaaatgggagctaccttcgtttgctcatatacctttaatacacacaattgaagggaagaaattatcaaagagagataaggcatccacgctagatgattattcaaaaattggtattatgccggatgctcttagaaattatcttc

SEQ ID NO: 300119 - DNA, 1089 bp, Unknown
  Bacterial polypeptide expressing nucleotide sequence isolated from the Sargasso Sea
gatggtaaagaatatattcagtctaaaaacatatcaaaacatataaatattgcagaagatcttcttaaaaaaggatttgcatataaatgttattgtactgaagatgaaatcacagaacaaaaagaaaagtgcaagaaacaaggtataccctatgtttataacagaaaatggagggatgcaaaagatcttaaaattccacatgatataaaacctgttataagatttaaaagtaagatttcaggaaatacaattattaaagacttggtccaaggagaaagaaatatttcaaattcaacaatagaagattttataattttaagaaaagataaaactccaacttaccagttgtctgctacagttgatgatcattcaatgggtataactcatgttataagaggagatgatcatatgattaattcatttaaacaaaagcaaatttatgatgctatgggatggaaggttcctaattttgctcacataccattaatacatagcgaaaaaggtaaaaaactatctaaaagagataatgcctctactctcgaagattacattaagattggaattatctcagatgctttgagaaactatctcttaaggttaggttggtcgtataaagacaaagaaatttttaccaaacaagaaagtattgaattatttaatttagaaggtgtgggaaaatcaccatcaaaactagatatgactagaatattctcaattaatgaaacttatataaagtctgtagatgaaaaagatttgtttaaatttttaaaagattatgtctctaaatacaaaaaacctatagaaccatctaaagaaactatccttttaaaatcaatgatttttttaaaaaataaagctaaaactttagaagacatttggaataatgctcaatatattatcaatgataatattcaaatagataagaatgacaaaaaacttatcgatgatttatcaaaaaaagttataaaagattttatttctgaatatacaaaactaacaaaattatctagagaaactctagagcctgtaattaaatctttaattgataaacataaaactaacttcaaaggtgtaggtcagcctttaaga

SEQ ID NO: 300120 - DNA, 1393 bp, Unknown
  Bacterial polypeptide expressing nucleotide sequence isolated from the Sargasso Sea
aatggcttttatttgtaggtttgcgccctcacccacaggacctttgcacattggtggtgttagaacagctttatttaattggttattggcaaggaaaaataaggggaaattttatctaagaatagaggatacagataaagaaagatctaaagatgagtttaaaaaacaaataatcgaatctctgtcatgggttggaataaaccatgacgataaagaatttattcaatccaaaaatattgataagcacaaaaaaattgcagaggaacttttaaaaaaaggttttgcctataaatgttattgttcagaggaagaaataaaagaacaaaaagaaaaatgtaaaaagcaaggtatcccatatgtttataataggaaatggagagatcctaaagatcttcaaatacctaaagacataaaaccagttatcaggtttaaaagtaaagtttcgggaaatactgtaattaaagatttggttcagggcgacattaatatatcaaattcaattattgaggattttgttatattaagacaggacggatctccaacttaccagttatccgcaacagttgatgatcatttaatgaaaatttcacatgttattcgaggtgacgaccataaaattaatacatttaaacaaaaacaaatttatgaggcaatgaaatgggatattcctctatttgcacacatacctttaatacatagtgaaaaaggatctaagctctctaaaagggataaatcatcaactattgatgattatgtaaaaattggaattttaccagatgcacttagaaattacttgttgcgactaggttgggcgtataaagataaggaaatcttttctctagatgaaagcattaaactttttgacctgaaaggtgttggaaaatctccgtcaaaacttgatatgtctagaatactatctctaaatgagcattatattaaaaacatggatgaaaaaatcctttttaattttttgaagaattattctcaaaagtttaaaaaagctatggatccatctaaagagaaagttgttgttaagtctttaaatttcctaaaaaataaggccaaaactcttgatgatatttaccataattcacaatacatactgagcaaagaaataagtatttcaccagaagatttaaagcttttggatgctaattctaagaaaatcattggtgacttcctaaatgaatttaaaagtatcaataacccaaacaaagaaaatattgaaaaattaattaatagtttaatcagtaaatacaaaactaactttaaaggtgttggtcaaccactaagaattgctttggttggttcaagatttggccctggtatttataatatcatcctatcacttacaaaagatgaagtcgtaaaaagaatttctaaaattaattaa

SEQ ID NO: 300121 - DNA, 1399 bp, Unknown
  Bacterial polypeptide expressing nucleotide sequence isolated from the Sargasso Sea
atgtctaaagtagcaacacgttttgctccatcgccaactggagctcttcatattggagggattagaactgccttatttaattggttgttctctaaaaatcaaaaaggaacttttcacttaagaattgaagatactgacaaagagagatccaaagaggaacacaaaatacaaattattaaatcattaaagtggatagggattgaacatgatggtgaagaatatattcagtcacaaaaaatagaagatcacattaaaattgctaatgaattattaaaaaatgggaatgcatataaatgctactgctctgcagaagagattgaggagcaaaaaaaaagagctaggcaaaaaaagttgccatatatttataatagaaaatggagagatgctgatgaaaaagatgctcccaaagatataaaacctgtaatcagatttaaaagtaaaatagaaggaaattctcaaattaaagatttagttcaaggagatgttgaaattgaaaataatacaatagaagactttataattttaagaaatgatggaacaccaacttacaacttgtctgcaactgttgacgataatcaaatgggaatgactcacataatcagaggagatgatcataaaataaatacttttaaacaaatacaaatataccaagcaatgggttgggatgttccagaatttgcacatattccattgattcatactattgaaggcaaaaaactttcaaaaagagataatgcctcaacgttggatgattactcaaaaataggcataatgcctgatgcattaagaaattatctacttaggttgggatggtcatatcaagataaagaaatatttacccttgaagaaagcatacagcactttaatttagaaggtattggtaaatctccatcaaaacttgatatgagtagaatattatcaatgaatgagcattatataaaaacaatagatgagaacgatctttatcaatgtctagtcaaatattgcaaaatttataaagaagaaattcaagatgataaagaaacaaaagttaaatcctcattatcatttttaaaaaataaggctaaaaccttaaaagatatttataataatgcgaaatttatcataaatgacgaagttaacttcaatgaggatgattttaaattaattgatgataaagcaaaaaaaattatttcagaatttattaaagaattatcatctatatcaaatataaataaggagaatttagagcctgtggtaaataatttaataaaaataaatgatacaaattttaaaggagtaggtcagcctatacgaattggtttaacaggatcaaaatttggtcctggattatatgatatagttatagctcttggtaaagaagaagttttaaaaaggctagctaagataatttcttaaa

SEQ ID NO: 300122 - DNA, 1408 bp, Unknown
  Bacterial polypeptide expressing nucleotide sequence isolated from the Sargasso Sea
atggagaaaatttcagtgagtaaggtagtaacaagatttgctccaagcccaacaggaacccttcacattggaggagttaggacagctttatttaattatatatatgcaaaacaaaataatggagagttcctagtaagaatagaggatactgatagagaaagatcaactaaagcatatgaaaaaaatattttagacacactttcttctataggactttcaccagataaaaaaccaattaatcaatcagaacggaatgatatttatatcaaggcagctgagcaaataatcgcatcaggcgatgcatactggtgtgattgttctgaagaagatcttgaaaagatgcgaaatcaacagatggctgacggaaaaaagcctatgtacgatggcagaagtagacgtcttggattagaacgttcctcgaagacagtgctaagactagctacaccagaagatggtgaaattgttgtgaatgacatgattagaggggagattagatttaataatgctgaattagatgatctaattttactaagaagtgacggaacaccaacatatcatttgtgtaatgttgttgatgactttgaacagggtgtaacaactgtcataagaggagaagatcatatttcaaacacaccaagacaaatacatatacaaaatgctttaggatatccagctcttgaatatgctcatcttccattggttttgggaccggataaaaaaagattatctaaaagacatgcagccacaagtcttgaagaatataaagacatgggttatttagattcagcaattcttaattcattagcaagacttggatggtcaggtggtgataaagaagttttttatatagatgatttgataaaagattttgatattaaagatgttcaaaaggccggagctatttttgatattactaaactggattggctaaatgcacaacatttatcacatttgtcacttgaatcatttatagaacatatcaaaccatttgcaaaaaaaatcaacatagatataaacgatcatcaaaatgctcatctacttattgcttcaatgagaacctctgaaaatactttatttgatatagcaaaagcactcagaccttatttcatggatgttagtgactatgatgaaaaggctatagagagatttctttcaaatggaactaagaatcttgaagatatttgtgacttattagaaaccatcgatgaatggaatgaagaacaaattgatttattgcttaaagagtatcaaacaaataacaacttaaaagtacccgaagtcaatcagcctattagaattgctttaacaggctcaacaaaatcaccatctttaggtctaactttaactttttttgataaaaaagaagcagtttcaaggattagaaaacttaaaagttttttaagttaaa

SEQ ID NO: 300123 - DNA, 1249 bp, Unknown
  Bacterial polypeptide expressing nucleotide sequence isolated from the Sargasso Sea
taaagatgaatataaagaccaaataataaaatcactaaaatggattggtatcaattatgacggagaagaatatattcaatcagaaaaagtaaatagtcacattaaagttgcaaatgaacttcttaaaaatggtcatgcatatagatgttattgttcaagtgaagaaatagaagaacaaaaaaaaagagctagacaaaaaaagattccttatatttatgacagaaaatggagagataaaaaagagactgatgctcccaaagatattaaacctgtcataagatttaaaagtaagattgatggaacatcaatattgaaagatttagttcaaggtgatgtcgaaattgaaaataatactattgaggattttattatcttgaggaatgatggaactcccacatataatctatctgcatcggtagacgatcaccaaatgaatatgacacatattattagaggtgacgatcataaaataaacaccttcaaacaaatacaaatttatcaagctatgaaatgggatttaccctcattcgctcacataccattaatacatacaatagaaggaaagaaactatcaaagcgagatcaagcttctacattagatgattattccaaaataggtatcatgccagatgctcttcgaaactatcttttaagactgggctggtcttataaagataaagaaatattcacattagaggaaagtataaaattttttaatttaaaaggcatcggtaaatctccctctaaactagatatgagtagaattttatcaatgaatgaacactatattaagaatattgatgaggatgatttattcaaccaattaactgaatattgcaaattatataaaagtgaaattcaatcagataaaaaagataagattaaaaaatctcttaccttcctaaaaaataaagcaaaaactttggaggatatatttaataatggtcaatatattataaatgacaaggtagattttaataaagatgatcttaaattaattgacgataaagctagaaaagtaatttctgattttaagagtcagtttgaaaaaatagacctgccttctagagaaattttagaaccaataataaacgagcttataaaatcgcatggcacaaattttaaaggtgttgggcaaccactaagaattgcactaactggttcaaagtttggacctggtatatatgatattattttgtcattaggaaaagaagaagttcaaaaacgattaagcgctaagatagtttga

SEQ ID NO: 300124 - DNA, 757 bp, Unknown
  Bacterial polypeptide expressing nucleotide sequence isolated from the Sargasso Sea
catgagtgaattttcagtccgaacaaggtttgcccccagtccaacaggtctactgcatatcggaggggcaagaacggctttatttgcatggctctatgcaaaatctaattcaggctcttgtctacttagaatcgaagatacagacaaggaaagatccaagcaagaatacacagatgagattattaatagctttaattggatgggggttaattttgatgaggacgtagtttatcagtcaaaaaattatgatcgccacctggaagtagcaaaagaattactaaagaatggaaaagcatatgtttgtaattgtcctaaagaaagattagatcaattgagaaaagagcaagagaaaaggggcgagaacgcaaagtatgatggtaaatgtagaaatctttccgttagcgaatcagagaatacagttataaggtttaagaaccctgaagaagggagtgttgtctttaaagacttaattaaaggtcaaatagaatttagtaatgaggagatggatgatttcataattgtcagaagcgacggagctccaacatataacctttgtgtggttgtagacgatctggatatgaagatttctcatgttattcgcggggatgaccatctaaacaatacccctaaacaaataaatgtttttgatgctcttggaataaaacctcctatttatggacatgttccaatgattcttggagaagatggaaaaaggatgtccaaaaggcatggtgctgttggcgtgtctgaatatcgt

SEQ ID NO: 300125 - DNA, 955 bp, Unknown
  Bacterial polypeptide expressing nucleotide sequence isolated from the Sargasso Sea
aatgaccacctctgttcgcacccgtttcgcaccgagtcccaccggcttcatccacctcggcaacattcgctccgcgctttatccgtgggcgttcgcgcgcaagatgaaagggagcttcgtgctgcggatcgaggacaccgacgtcgagcgctcgagtaccgaagccgtcgacgccattctcgaaggtatggagtggctgggcctcgatttcgacgaaggcccgttctaccagatgcagaacatggaccgttatcgcgaagtgctcaagcagatgctggatgccggcctcgtgtacccgtgctacatgtcgaccgaagaactcgacgcattgcgtgaacgtcagcgtgaagcgggcgaaaagccgcgttacgacggtacgtggcgtccggagcccggcaaggtgttgccggcgccgccggcaggcgtgcaaccggtgctgcgcttccgtaatccgttgacgggtgtcgtggcatgggacgacgcagtgaaaggccgcatcgagatctcgaacgaagaactcgacgacctcgtggtcgcacgcccggacggcacgccgatgtacaacttctgcgtggtggtggacgacctggacatgcgcatcacgcacgtgattcgcggcgacgatcacgtcaacaatacgccgcgccagatcaacattctgcgtgcgcttggtgccgagccgccggtgtatgcgcacttgccgaccgtgctgaacgagcagggcgagaagatgagcaagcgtcatggcgcgatgagcgtgatgggttatcgcgacgccggttatctgccggaagcggtggtcaactatctggcgcgtctgggctggtcgcatggtgacgcggaaatcttcacgcgcgagcagttcgtggaatggttcgatctggagcatctgggcaagtcgccggcgcagtacgaccacgacaagctgaactggctcaacgcgcactacatcaag

SEQ ID NO: 300126 - DNA, 1294 bp, Unknown
  Bacterial polypeptide expressing nucleotide sequence isolated from the Sargasso Sea
atgacaaaaaaaattgttacaagatttgcaccaagcccaactggctatcttcatattggtggcgttagaacagcactttttaatttcgttttttcacgaaaaaataatgggacctttttagttcgcatagaagatactgataaagaaagatctgaggagcagtacatagcggcaatcatggatggtttagattgggttgggcttaacccagatcatgaaccaatcaaacaaagcgacaggtttgatgtttataaagaagaagccttcagattagtggaagagggcaaggcgtataaagatgacggggcaataagacttaagatcaataaagaaggttcaacattagttaaagatttagtctatggggacattgagtttctcaataaagaattagacgatttagtaattttaagaagtgataattcaccaacttatcatttttgtaatgtaatcgatgacaattatcaacaagtgacacacattattagaggggaggaccatttacctaatactcctaaacaaatccaaattattagtgcgcttggctatgatggttttgaatatgctcatttaccactagtacttggagaagataaaaagagattgtcaaaaagacatgcggccacagacttgatgtcttataaagaagaaggatatttacctgaagctgttttaaatatgctggcaaaattaggttggtcaaatacagagaaagatatatttacaactgatgatctaattaaaatatttgattttggtgacattcaaagatcaggggctgtattcgataaagaaagacttaattttattaaccagaatcatatggccatgaaaactgatgatgaattaatggacttacttaaaatttttaatgaaaaaaatggattttcattatctgaccatcatgatcctgaaagattagtacggctttgtgtgggaagtggcaataatttttcagagatatcaaattttataaaaccatttgtaattgactttgatgaatacgacaaagctgactttgaaaaacatctattagaaagcgagagcgtcttaaattattttaaagaatcaattcattcaataagtgattgggatgaagcagtatttgaagaaattattaattccgctatgaaagatttaggtctacctatgcctaaaataggcctgcctcttagagtggctctagtgggtagagcaaaatctcctcctcttagctcaactatatatctaattgaaaaaaataaaacaattgagagattagataaagccttaaaggttatttctgaacactgac

SEQ ID NO: 300127 - DNA, 775 bp, Unknown
  Bacterial polypeptide expressing nucleotide sequence isolated from the Sargasso Sea
atgaaatgtaggtttgcacctagccctacaggaaaaatacatattggtaatgccagatcagctattttaaactgggtattttgcaaaaaaaataatggtgaatttgttttaagaattgacgatactgatattagtaggagcacaaaagagtttgaggaacaaattaaaaatgatcttaaatggcttggtttaaactggagttatacatttaatcaatctgcacgatcagatatttacaacaaaaaaattcaacttctaaaagataataatagactctatccatgctttgaaactgaagaagagctatccttaaagaaaaaatcattattgtcatcaggaaagccaccaatttatgatagatcttctttaaatctatcaaacgaagaaattgaaaaaaaaattagtttaggaattaagcctcattggagatttaaattaaccaatgaagtaataacatggaatgatattattaaaggaacagtttcatttgatacaaaaaatttaagtgatccagttttaataagagccgatggatctttactatatcatttaccttctgttgttgatgatattgaagaagaaattactcatataataagaggtgaagatcatatagctaatactgcttatcatattcaaatttttaaagcacttgattcttctgtaccatcttttgctcaccatcctttcttagttgacgaaacagggaaaggctttagtaaaagacttgggagtttatcaattgaaaattttagaaatgatggatttgaaaata

SEQ ID NO: 300128 - DNA, 1303 bp, Unknown
  Bacterial polypeptide expressing nucleotide sequence isolated from the Sargasso Sea
atgaccgtaataacccgctttgcaccatcaccaaccggtttcctgcatattggaggcgcaagaaccgctttattcaactatctttttgcgcgaagcaacaatggaaaatatgtccttcgtatcgaagatacagatcgtaagcgttctacagaagaggcggttgaagcgatagtaaatggacttgactggctaaaactttcaggtgatgagcaaccagttttccagtattcaaggcaagaacgacataagcagattgcaaacacactcctcgaacaaggaaaagcctacaagtgttattgttcagctgatgaactggaggaaatgcgcgccctagcccgacgtgaaggtaaaactgctttatacgatcggaggtggcgagaaaaagaccctactacggtgccacctaacgttaacccagttgtgcgtctaaagagcccattgaaaggttcgacaattataaatgatcttgtacaaggtcgtgtagaggtaaacaatgaacaattggatgattttgtaattttacgtgcagacggtacgcctacatatatgctttcagtagttgttgacgaccatgacatggagatttcgcatgttatccggggcgacgatcaccttaacaatgcatttagacaataccaaatttatgctgccatggattggccaactcccaagtttgcccatatacctttgattcacgggcaggacggcacgaaactatcaaaaaggcacggcgctcttgggattgatgtctataaagatcaaggataccttccagaagctttgtgcaactaccttttaagacttggatggggttacgaaaatgaagagatcataacaagaaaacaagcgatatccttatttgaaataggttcggtaggtaaatccccttctagatttgatataaaaaagcttgacaatataaattcggcatacatgagagaagtgagcgaggcgcgtttatcccatttgcttgaaactcacctttttaaaaacctaaatgtgactttggacccaatcaaattagaacgactgaataggggtttaagtggactaaaaatacgggctaagaatattaatgaactagcagccagtgccatgatatacataattagtccaccaataaacatggatgagaaagctgatagtattttgagcaaagaggctcgacagttgattaggggtcttttagaaccatttaatgaactgacaaattggaacaaaactgaaatcgaagaaacccttaagaattttgcaacgtgtcgtgatatcaagttcggttcagtcgctcagccactgagggcgg

SEQ ID NO: 300129 - DNA, 901 bp, Unknown
  Bacterial polypeptide expressing nucleotide sequence isolated from the Sargasso Sea
aatgaaggtaactagatttgctccaagccctacaggtaatctgcatataggaggagttagaactgctttatttaattatgttttttcaaagcaatccggcggtttattcttaataagagtcgaggatactgacagagaaagatcaaagaaggaatatgaagaagacataatatctggattagaatggcttggtatatctcccgataaaacacctataagacaatcagaaagatcagatatatatcaaaaagctgctgaaaagcttattgattctggaaatgcctattggtgcgactgttccccagaagatttagaagaaatgcgtgaagagcaagctgccgcaggtaaaaagccaatgtatgatggaagaagtagaaaccttggtcttgaaagatcagacaaaactgttcttagattagcaacgccacttgaaggagaaacggtagtaaatgatttaataagaggcgagataacttttaacaatagtgaattagatgatctaattctattgagaagtgatggtactcccacataccatttctgtaatgttgtcgatgatttcgatcagggtgtcaccacagtaatccgaggagaggatcatattagcaatacaccgagacaaatccatatccagaaagcacttggctatccagatcttgagtatgctcacttacctttagttctgggtgaagataaaaaaaggctttcaaaaaggcatgctgcaactagcttaaatgcctataaagaaatgggatttacaaaagaaacaattataaatgccttagcattgcttggttggtcaactgaaaatgaaattttctcaattgatgaattgattgaatcattcaagctagaaaatgttcaaaaagctgcagcggtatttgatctaaaaaagatttaa

SEQ ID NO: 300130 - DNA, 928 bp, Unknown
  Bacterial polypeptide expressing nucleotide sequence isolated from the Sargasso Sea
cttgggtggtgatttagttttgtctagaagggcaaagggatacgatattggaaatcctttatataattttgcagttgtagttgatgataatttcatgaatattactcatgttgtaaggggtgaagaccatatctcgaacaccgcaaaacaaatattgatttataaagcattaaattttaatttgccgactttttcgcatacacccttaatactgaatagtgaaggaaaaaaattatctaaaagagattgcgttacctcgatcgatgattttagagatatgggatatttacctgaggccttatccaactatatggcctttttaggttggtctccaaaatctgccgacagagaaatactttcacttgatgagatatctgaaatttttgacttatcagacataaataaagctggcgctaaattcagttgggaaaaactcaactggattaattctcaatatataaaaaatatggaatcaataaagttaagtgagatcatgaaaaaatactgggatgataatggttgggaaccgccatctcaagaatgggcatataaattagcaattttgcttagagactctatgactcttttaaaagatgctatagatcaatcaaaaccatttttcttgatacctagaattcaaaaagaaggtcaagattttctggaaaacaaggatagtaaagcatctctaaaactaatcttaaattatttaattgagcaaaagactataaaactaaataaagagaaagctaaagaaataataaacgaaatctcaaaaattcataatcttaaaaaagggatattaatgaaatcattaagagtagccttttttggatctctcagtgggccagatttaattcaaagttgggagcttttcgcagagagtaaaacagataaaactcgaattgagagatgtcttaaatcaatctaa

SEQ ID NO: 300131 - DNA, 1414 bp, Unknown
  Bacterial polypeptide expressing nucleotide sequence isolated from the Sargasso Sea
aatgagtaatccacgcgtaagatttgcaccaagtcctactggatatttacatatcggaggcgccagaacagctctttttaattggctttttgccaaacaaaacaatggaaaatttcttttaagaattgaagatactgaccttgaacgttcaaaggaaaagtacgttaatcaaataacagatgctcttaaatggcttggtttaaattgggatgaagatattattttacagtcaaaaaataattccagacaccaagagatggtttctaggatgcttaaagatggaactgcttataaatgttttcttcaaaaagatgagctagataagctcagacgagagtctgaaaagaaaaaagaagtatttcgtgttcctcgaacatatagagatttacctgttgaaaaagaaaaagagttaatcaaaaaaggtaagtcttttactattcgaattaaagtcccagatggagaaacagaatttaatgatttggtgtatggttctataaaggttcaaaataaagatttagacgactttattattgctaggtcggatggatcgcctacttacaactttgtagtagcagttgatgatgcagatatgaaaattactcatgttgttagaggggatgatcatttggcaaatactcctaaacaaattcttgtatatagagctttaggactagatgaaccaatttttgcacatctacctatgattctaggttcagataaaaaaagattaagtaaaagacatgccgcaacaaacgttcaagagtataaagaaaagggttttactccaaaagtaatattaaactatttatcacttttaggttggaatcctgattctgatcaagaaatctttaatgaaaacgatctagttaaaagttttcaatttcaacaggttcaaaaaaaatctgcagtattcgatgaaaaaaaattattatggatctcacaacaacatctttcagagatgaatgtaagagatctcatgaatgaaatttatgctttaagcccaggatggggagatggtttagaatgggattatttaaaagaagttgtaaagttaatcaaagataggtgtaaaactatcaaagaggttgcaactatgtctgagttgtttttcacagacaaaatagattatgatccagatttattatcaaaaacctttaataatgaatcaattgcaattattaaagattttcatactgcattaaatacagttgaagattggtccagggttgagttagaaaatatttttgaaaatataatggagcaacatgaagtagttataggaaaagtaatgaagcctataagagttgctcttagtggtattccgtttggacctggaatttttgatttaattctattgttaggcaaagatgtttgtttaagaaggttaaggcatacactttcagaaattgaatga

SEQ ID NO: 300132 - DNA, 939 bp, Unknown
  Bacterial polypeptide expressing nucleotide sequence isolated from the Sargasso Sea
aagatttggttcaaggtgatgttgaaattgaaaatagtacaattgaagattttataatattaagaaatgatggttcaccaacatataatttatctgcgactgtagatgatcatcaaatgaaaatgacacatataattagaggagatgatcataaaattaatacatttaaacaaatgcaaatttatgaagcaatgaactgggatttaccaaagtttgcacatataccccttattcatacaatagaaggtaaaaagttatcaaaaagagacaatgcatcaacattagatgattattccaaaatcggcataatgcctgatgcattaaggaattatttacttagattaggttggtcttatgaggataaggaaatatttactttagatgagagtattaaacacttcaacatagaaggtataggaaagtcaccatctaagttagatatgagtagaattttatcaatgaacgagcattacattaaaaatattgatgaaaatgatttattcaatcaacttactgaatattgcaaattatataaaagtgaaattaaatcagataaaaaagataacataaaaaaatctctaactttcttaaagaacaaagcgaaaacattagaagatatatttaataatgctcaatatattatggtagatgaagtaaagtttaatcaggacgatattaaactaattgatgacaaggcaaaaaaagttatttctgattttgctactaaatttgctgccgttgataaaattagcaaagaaacattagagccgatagtaattgatttaattaaatcaaacgatacaaattttaaaggtgtaggacaacctttgagaatagctttaacaggttcaaaatttggacctggaatatatgatataattatttctctggggaaaaaggaagtaacaaaaagattaagtaacaagataattgtttaat

SEQ ID NO: 300133 - DNA, 1249 bp, Unknown
  Bacterial polypeptide expressing nucleotide sequence isolated from the Sargasso Sea
gctgtatgcacgtaccaacaatgggaaattcattttaagaattgatgatactgatttagaacgatcaaaagatgaatatatttctcagatcaaatatgatcttgattggctgggcattgattttgatgaaacgttcaatcaatcgtctcgtttcgacagatacagggagcaattcgagaaattaaaagctgatggcagaatttacccttgctatgaaacacccgaagaacttgaaagaaaaagaaaattgctcattgcagctggtggcaagcaagtgtacgaccggtctgcaatggaattaacagaccaacaaaagaaagactacgaagcagaaggaagaaaaccccactggagattcttattaaaaactgaacgtatgaaatgggatgatttacttaaaggtgaaatagatatagacctcaccagtttgtctgaccctgttttgtttagagaggacggagttcctttgtatacttttagttcagctgtagatgatattgactacggtataaccaacgtaattagaggagacgatcatacgagcaatacggctgttcaagtagaaattattaatgcgttggaccaaaataaaataacctttgcccatcacgccttactaaaagcatcaagtggagataaattatcaaaacgagacaatgtcatatccattagtagtttcagggaggcgaatatggagcccatatcaatactaagtttattggcgaccatcggtacgtctaattctatcgaattaaaagacaatatagatcaaataaaaagtgaatttaaattgagtacaatttcaacgtcacctggtcgaattgaaattgatgtattgaatgctctcaataaaaaacaggttcaaaaatacaattttagcgagatcgaagagagattaaaaaagattgatgaaaaaattgatcgaaagttttgggaaacaatcagaggcaatctgaatgttgttgaagatataaaacaatggacggatattgtatttaatagtgagaccattaagccttctgataaagattatattaagattgcaatagaattgatccctgatgatccatggaatgatgaaacatggggactatggacttcggctataaaagagaaaactggcagaaaaggaaaagatttattcttgcctcttagagaagcctttacaggacttaatcatggtccagaaatgaaactacttatccaattactgggcagagaaaaaatcatagaaagagttgagttataa

SEQ ID NO: 300134 - DNA, 808 bp, Unknown
  Bacterial polypeptide expressing nucleotide sequence isolated from the Sargasso Sea
atggtaattacgcgttttgctccttcaccaacgggcttcttgcacataggaaatgttagagcagctctaatgaactaccttcttgctaagaagagtaatggtatttttattctcaggattgatgacactgatcaggagaggtctaagcaggagtatgtagacgctatcaaaacagatttggattggttgggtctcgaatgggatcgaattgaatatcagtcatctagattagacttatataattctgcgtgcgataagcttcgttctattgatttgctctatgaatgttttgagactccctcagagctggatttaaaacgtaaaaagcaactgaatatgggcaaaccgccagtttatgatcgtgcggcattggctttatcagatgaagagaaattaaacctcagaaataatcgcggtgatggtcactggaggtttaagcttgagcaaaatcgtattgaatggaaggacggaattctgaaagatctttctatcgacgcggcatcagtttcagaccctgttttaataagagcagatggtcaatatttgtatactcttgcatctgtggttgacgacatagacatgggaataacacatgtagtccgtgggtcagatcatgttacaaacacagcgacacaaatccagatgattaaagctcttgggggtgatatacctaaatttgctcaccactctctgttgactggtccaggtggggaggccttatcaaaaaggttaggcacgttagccctaaaagatttgagagaagccggtattgaaccagccgccctatgcagcttgatggcacgtttgg

SEQ ID NO: 300135 - DNA, 1396 bp, Unknown
  Bacterial polypeptide expressing nucleotide sequence isolated from the Sargasso Sea
gatgccaaaagttgcaactagatttgctccgtcaccaacaggacctctacacataggcggggtaagaacagcattgtttaattggttatattcaaaaaaccaaaatggtacttttcacctaagaatagaagatacagataaagaaagatctaaagatgaatacaaagctcaaattattaaatccttaaaatggataggtattcaatatgatggagctgagcacatacaatctaaaaatattgataatcatattaaaattgcaaatgaattgttaaaaaatggcaatgcttataaatgttattgttcaagcgaggaaatagaagaacaaaaaaagagagctaaacaaaaaaaaattccttatatttatgatagaaaatggagagataaagatgaaactgatgcacctaaagatattaagccagttataagatttaaaagtaaaattgatggatccacagatttaatggatttagtgcaaggtattgtaaaaattgacaacagcactgttgaggattttattattttaagaaatgatggatctccaacttataatttatcagcagctgtagatgatcatgaaatgaaagtatcacatataattagaggcgatgatcacaaaataaatacttttaaacaaatgcaaatatatttagcaatgaaatgggaaattccaacttttgctcatattcctctaattcataccacagaaggaaaaaaactatctaagagagataaatcttcaactcttgatgattattcaaaaattggaataatgcctgatgcgttaagaaattatttattgagattaggttggtcttttaaagataaggaaatattcactttagaagagagtattaaacattttaatttggaaggtattgggaaatctccttcaaaattggatataaaccgtattttatcaatgaatgaatattatatcaaaaacattaatgagagcgaactttataaaaggttatatgagtactgcaatgaatacaaagaaaaaattgagagtaataaagaagaaaagattaaaaattcactatcatttctaaaaaataaagcaaaatctttagaagatatttataataattcaaaatatataatttttgatgaagtaaaatttaatgatgatgatttaaaacttatagatgaaaaagcaaaaaaaatattaaatgattttaaagataaaatatctaagttgaatgaattaaataaaagtacattagaacctataatcaataatttaatcaaaaataatgagactaattttaaaggtgttggtcagcctttaagaatagctcttacaggttctaaatttggtcctgggatttacgatataataatttctttaggtaaattaaatatagaaaaaagattaaaaaagataatttag

SEQ ID NO: 300136 - DNA, 904 bp, Unknown
  Bacterial polypeptide expressing nucleotide sequence isolated from the Sargasso Sea
aatgattactactagatttgcaccatcccctactggttttttgcatattggcggagtaagaactgcattatttaactggctttatgcaaaaaaaaattcaggtaaatttttattaagaattgaagatactgatagagaaagatctagcaaagaagcaattaaaaaaattattgatggtttgaattggttaggtttagaaaatgatggagaaatagtatatcaacacaaaaatgaagaaaggcatattgaagttgcccatatactgctagaggcaggctttgcctacagggattgggaattagaaaatgactatggtgatttagaaaaaaatcacgctattagatttaaaacacctaaagagggagaaaccatcataaatgataaagttcaaggtgatgttgaaattaaaaataaagaaattgaagattttgttttattaagatcaaatggaactccaacatacatgttatcagtagtagtagatgattacgatatgaatgtaactgatatcataagaggtgatgatcaccttaccaacgctgctaaacaaaaattaatttatgattctcttaaatgggaatgtccgacttttacacatatacctttaattcatggtcaagacggatcaaagttatcaaaaagacatggtgctttaggcatagaattttataaagaagagggttatttaccggaagcactaattaattatcttcttagacttggttggagtcatggagatcaagaaattttcagtttagaagaaatgataaaatatttttcaatagaaaaaataagaaaatctccatcaaaatttgatatagataaactaaatgatattaattcaatttacctaaaaaatacccctattgaaactcttataagtaaaattgatagctcacaatag

SEQ ID NO: 300137 - DNA, 1381 bp, Unknown
  Bacterial polypeptide expressing nucleotide sequence isolated from the Sargasso Sea
atgaatgtagtaacaagatttgccccctcacctacaggtttccttcatatcggtggtgctagaacggctttatttaattatcttttcactagaagatataaaggtaaatttttgcttagaattgaagatactgacaaagttagatctacagataaagctattaaagcaataatatcaggattagagtggttaaatttaaatcatgatggaaaaattgttttccagtcaaataattcattaaggcacaaaaacatagcagatgaattattgaaaagcggtaatgcctatcgttgttatctttccaatgaagagcaaaatcaaataagaaatgattgtatgaaacgtggactaccctttagaagcccatggagaaataagaaatataatagtgaaaatgaaaattcgtatgtaattagaattaaaatgccagatgaaggatttacagaaattaaagatttagttcaaggtaaagtgaaatttgcaaataataaacttgacgattttgttttattaagaagtaatagccttccaacttatatgctagcagttgttgttgatgattatgatatgggtataacgcatattattagaggagacgaccatcttaacaatgcattccggcagtactggatatataaatatttagactggaaagttcctgattttgcacatatacctctaatacatggggaggatggatcaaagttatctaaacgtcatggagccctaggcgttgaagagtacaaagaaatgggatttctatcagacagtattaattcatatcttatgaacttgggatggagagcttctgaaaaagaaccaattacattatgtgaagcatcaaaaatttttgaaattaaatcagttggaaaatcttcatcgaaatttaacatctcaaagttaaaaaatattaactctcattttttaaaaattgaaaatccaaaaaatattattaatttaattataagcaacaacgagttggggattgagaaatacaaaaaaagaattataaaagctttaccatatctaattgaaagagcaagcacaataaatgatctagttgatgcttctacatggttaaaaaatgataactatgaggttatctttaaagaaaatttaaaatttaatacaaatgatttgtccctcttaaaatcttttaaagaatacttaagagacttaaatatcgatagcaagattgaaatcgaagaccattttaataaatggcttacgaaagaaaatttaaaaattaaggatattggcaaaaatttaagactttgcttaacaggttcaggctcttcaatagatttaattacaatacttgatattctaggcattgaagaaattattcgtcgattatcttataatttagatagatcataat

SEQ ID NO: 300138 - DNA, 1459 bp, Unknown
  Bacterial polypeptide expressing nucleotide sequence isolated from the Sargasso Sea
atgaacgatataagagtacgatatgcgccaagtcctacaggtcaaccgcacataggcaatataagaacggcattttttaattggttatatgcgaggcataacggtggaaaatttgtagttcgaatagaggacactgatcaggaaagacttgtggaaggagcctatgaaggtattcttgaagctttaagttggctcaacatcgattgggacgaaggtcctgataaaggtgggccttttggaccttacctacagtcggaaagattggaggtttacaattctgcagcgaacattttgattaccaaaggtgttggatattattgtttctgcgatagagatcggctgaacaatctgagaaaacagcaacaagaaaataaatccgatatcaaatatgatcgaaagtgtttaaacctttcgaatgatgaaattgaacaaaatttaagtaacaatattccacacgtgatacggtataaaatcccagcagataatactattcaactaaacgatatagttagggatgaagttgaatggaatacaaatttgctagacgattttgtacttattaaatctgatggattcccaacttatcatctagctaacgtagtggatgaccatagcatgaatatctctcacgtgttaagggcagaagaatggctccccagtacccctaggcacttgcttctttatgatgctctaggatatgaacctccacaatttggacatttaccgatgattttaggtcctgacagatctaaattatctaagcgccacggggctacttccattcttgaatacagagacttaggatacctgccggaggcggttattaattttatggttctgcttgggtggtccattgatgaccatacagagattattaaccgacaagaaatggtgaaattgtttgatttaggacgggtagggaagcctgcggctgtttttgatattgataaactagattggatgaatggtaattatattagagatttatctgatgaagatctttttgagcatgttaaacatgcatgtattggtgagtttggagaaaatattgtagatcaatattcagatcggttgacgaaaatgactcctttgatatctcccagaatgaaatatgtgactgatgcacctgatatggtgtcttacattctcactgacaacttgtcggtagagaaagaatttatagaaacttgtaaattatctagttcagacatagcgatagccctcacagcaactataaagtatgtacaagaagaaattgatttctctaaagacacccttgaatctgagatgaggataatttgtggtcagcttgaatattctcccagaaattactttggattaattcgtaacgtattgacttctcggtctgctactcccccattgtttgatatcatggaaatcttgggccccagagacactttgagtcgactggataatgcattaaaactgtttcaataat

SEQ ID NO: 300139 - DNA, 1316 bp, Unknown
  Bacterial polypeptide expressing nucleotide sequence isolated from the Sargasso Sea
aatgacagaaagaactagatttgcgccgagtccaacaggccatctacatattggtggtgccaggacagcattgttttcatggctattcgcaaaatctaaaggcggccaatttcttcttcgattcgaggatactgatacagagagatctaaagatgaattcaaagactcaattttaaaatcattagaatggcttgatttaaatccagacgaggaaccagtacatcagtctagaaatttagagagacacagatctttagccttatccctatttgagaaaggtgcagcttattattgtgattgttcaattgaggagttggaagaacttcgtgctactcagataaaaaataaacaaaaaccaatgtatgacgggcgaagcagagagaaaaatttggattacgaaggaaaaaatgttctgcgctacaaaatgcctgatgtttcaacttcatttgaagatctaattcttggcgacattaccgtagataatagagaattagatgattttattatcttaagagcagacggaactcctacctataatttttgtgcggcagtagatgatcttgacatgaaaatatcaacggttattcgaggagacgatcacttaactaacactattaagcaactcaacataattaagtctcttgaaggaaatctacctaactatgctcatcttcccatggttttatcagaatcaggaaaaagactttctaaaagagatggtgctttagacataatggactataaatctgagggatatttaagcggagcgttactgaattacatagttagactaggatgggcaaaagatgaagttgaaaaatttacaatgaatgaacttatagatttttttgatctatcagatgttaattcttcaccgtcgaaattttcactgcaactattagattggtacaacaatgaatatttgaaggaaatggacagtttaactttactcaaattattaaatgaaattggaagtaatataaatgaaaactttaaaaacattctcggcataatcgatgttctaaaagtaggagcaaaaagtttaaaagaaattgaggaaagctttgatatgtttcttaagagtccttcaatagataagtcggattcattagccagtgaagaaaataaaaaaattattaaagatttttttgataactttgatttttctaatgatgaaaatttagagtctatcagtcaaagattaaaagactatatcaataacaatgatcttaaatttcctcagttaggaaagcctttaagatatgcattgactgcgagaactaatgctccaggaataggtgaacttttataccttt

SEQ ID NO: 300140 - DNA, 1354 bp, Unknown
  Bacterial polypeptide expressing nucleotide sequence isolated from the Sargasso Sea
atgaataaatcatctgtaagaacaagatttgcacctagccctactggctacctgcatattggtggagcaaggacggcattatttgcttggttatttgcaaagtctcatgagggcgattgcttattaagaattgaagatactgataaagaaagatctaaagaggagtataccgaagagattattcgtagttttgagtggttaggtatcgaattcgatgaagaggttgtttaccaatcaaaaaatgccgatagatacaaagaagtgatcgattcactgcttgaggaaggtttggcatatgtttgtagaggagaggatcttcaggatgacaaaaaatttagagaacagagtctcgtaagagacgaaaacactgtggtcaggtttaaaatgccagaaaaaggctcaactcagtttattgatctagtaaagggacaaattgaggtttcaaatgaagaattagaggattttataattgaaagaagtgatggttccgcaacttacaacttctgtgttgttgtagatgatatagattctaaaatttctcatattattagaggtgatgaccatgttaataacacgtttaaacagatcaatgtctttaaagctttaaatgtaaatattcctgaatatggacatgttccaatgatcttaggagaagatggaaagaggctttccaaaagacatggtgctttaggtgttaaagaatatgcaaaattaggaatattgcctgaagctttaaagaattatctactgcggttgggatggtctctgggggatcaagagactttcgatgatgaaaatatgaaaaaaaattttcaatacggaaccttaaataagtctccagcaacattttctatggagaaattactttggtttaataagtattatctagatcaaatgaacgaagacaaattaattgaaatacttaatcaggaaaactttgatggcagtcaatattcaaaagacgtaattaatgcagtacgagatagatgtgaaactattaatgatttttccacgaattcattttatttttttgatgagccatcagtttatgatgaagcgcttattttaaaacattgtaaaaaagagacttatggtcacctttcgttattaagaaattatttagatgaacttgagaactggaaacaatctttgattaaagatgttattgattcagtagcttcagagcttgatgtaggttttggaaaaataggtttacctttaagacttgctctaacggctaatactaactcgccttcgattgacttagtgtgcgaattgctaggcaaagaagcttctcttaaaagattagatagtttcttaattaatattaaagatcaagaaaagactctatagc

SEQ ID NO: 300141 - DNA, 1315 bp, Unknown
  Bacterial polypeptide expressing nucleotide sequence isolated from the Sargasso Sea
gatgacaacgacaacaagatttgcgcctagtccaacaggattattgcacttgggtaatatcagaacagccctaataaattggttgtatgcaaaaaatagtggtggaaaatttattcttcgaattgatgatactgatcaagagaggtcaaaagatgaatacatttctcaaataaaatatgatttggagtggctgggaatagactacgacgagacatttaatcagtcttctagatttgaaagatataaagagcaattcgaaaaattaaaatctgatggcaggatatatgcatgctatgaaactcctgaagaacttgagagaaaaagaaagcttcagatggctgccggtggaaagcaagtgtatgaccgttctgcattaaaattaaccgagcaacaaattaaagattatgagaatgatggaagaaaacctcattggcgatttcttcttcaaacagaacgcatgaaatggaatgatttattaaagggtgaaattggtattgatttaacaagcttatcagatccagttttatttcgagaagatggtgttccactttatacattcagttctgctgtagatgatattgattacaacattacgaatgtaattagaggggatgatcacactagtaatactgctgtacaaattgaaatcataaatgcattggatgaaaataaaatttcatttgcacatcatgcccttttaaaggcatctacaggagacaaactatcaaaaagagacaatgtaatatcaatcgatagtttcagaaaagataatattgagcccatttcaattctcagcttactagcaacgattggaacttcaaattcaattgaactaaagagtgggttaaaacaaatcattgaagaatttaaacttgagacaatttcaacatcaccaggacgtattgaaattgacgtcctaaaggcacttaacaaaaagcaagtccaaaaatttcattatgaggaaattcaatcaagacttactgagattgatgaaaatgttgataaaaagttttgggacaccataaaaggtaatttggaaactgttgaagaaatatcttcttggactgacattgtatttaacagcaagcctgctgagtctgatgataaagattacataaaattagcattagagttaatgccagaggaaccgtgggatgatgatacttggaccacatggacgaatgccataaaagaaataacaggacgcaaaggcaaagaattatttcttccattgcgagtagcattcacaggactgacacatggtccagaaatgaagcttctaatacaactaattggtagagacaaagattgttga

SEQ ID NO: 300142 - DNA, 1129 bp, Unknown
  Bacterial polypeptide expressing nucleotide sequence isolated from the Sargasso Sea
attggtaaaggaagttgtaacaaggtttgcaccaagccctacaggatatttacatataggaggtgttaggacagctttatttaattatatttttgcaaaaaaaaatcaaggtaaattcctagtacgtatagaggatactgataaagagcgatcggaagagcagtttattgaagctattatggagggtttagattgggtaggtttaaatcctgattttgatcctattaaacaaagcgaaagatttgatatttacaaggaagaggccactagattaatggatttaggagaggcatatgaggatgaaggagctgtaagattaaaggttaaaagagaaggctcaactcttgttaaggacttagtctatggagatatcgaatttcttaatagcgaattagatgacatagtgattttaagaagtgatggatcaccaacatatcatttttgtaatgtaattgatgataactctcagggtgtatctcacattattcgaggagaggatcacttaccaaatacgccaaaacaaatacaaatagtaaatgcgcttggctataaagagttccaatatgcacatttgccccttgttcttggcgaggataaaaagagactatcaaaaagacatgcagccacagatcttatggcatataaaaatttaggatatcttcctgaagcggtaaagaatactttgactagattagggtggtcaaaaggtgataaagaaatttttacaatttcagaaattattaacacatttgatattaaagatgtttctcgttcaggagcagtattcgatataggcaaaatgaattttgtaaatcaacatcatctttcatctctcacagatgaggaattaatcacactattaaagccttttaatgaaatgaataattttgacctatcaaatcatcatgatccaaaaaaattaattcgactttgtgtaaccagtggcaacaatttaagtgaaatttctaagtttattcagccttttattaatgattttgagaattacaatgaagatgatttaaataaacatttattggaatcaggagatgtcatagacttctttttatccgaacttgtaggaattgacgaatggagcgaagaatcttttgaatcagttataaataaagct

SEQ ID NO: 300143 - DNA, 1225 bp, Unknown
  Bacterial polypeptide expressing nucleotide sequence isolated from the Sargasso Sea
atgtcatcatatagatcaagattttgtccaagtcctacagggcttttacacttaggaaatttaaggacagctcttttaaatgtgcttttggcaattaagtcagggggtacgtttatattaagaattgaagatactgatatagaaagatcgaagaccgaattttctgaagctgtttgtgatgatatggagtggatgggtcttcattggcaggaaggtccaagaatcggaggtccagaagattcttattatcaatctgaaagaaattcaatctaccaagctttctatgacaaattacttgaagacaacctaatttatccatgcttcaccagtgaagaagagttaaaaataattagaagaaatcagatgtctgctggcgaacctcctagatacactgggatttgggcaaatgcctctaaagaagaaattgaggaagaattagaaaaaggcaatcaacctgtatacagatttaggattccaaaagatgaaaatataatttttaaagatttagtaaaaggtgagcagtcttttcataccagtgacctagatgatttcattgtaagaaaaaaggatttaagtccaacttttatgtttgctaatgcaatagacgattctttgatgggggtaaatatagttttaagaggagatgatcacttaagtaatacaccgagacaaatagctttactacaagctctcaatctagagataccagaatttattcatgtggctttatttacaggtgatgatggagctcctttgtctaagaggaacggtagcctctctgtaaaagaattaagggagataggatactttcctcaggcagttataaattatctatcgagagtaggacacactatttctgataatgaattgcgaaatatccatgagttatcttcagtatttaatgtcagtaatatctcaacttcacccagtaaaatagaccatgctcaattaaatttttggcaaaaaaatgtaattgaatcactgtctattgaggaactgagctattggcttgaaagttccttagaagacctgcccaaagatgttaacaaagacagttttgttggattgataagagacaatataatctttccttctgatgcagttagatatttaaagaatctatttataaatccattagattctgaaaaagaagtggaagatcttattaaacaaacaggatctcatttctttaaaatagctgagaaaattatagaaaataattggg

SEQ ID NO: 300144 - DNA, 1309 bp, Unknown
  Bacterial polypeptide expressing nucleotide sequence isolated from the Sargasso Sea
tatgaaattaagaattgcaccgtcaccaactggtgagcttcatattggcaatgcaagaacagctttatttaattggttgtatgcaaggaagcataatggaaaattcctattacgaattgatgacaccgatgttgagagaagcacccctgagtttcaacaaaatataattgaaggtcttgaatggctaggaattgattgggatgagggatttgataaaaattcttcaatatcttacaaacaatcagatagatttgaacgatatgaaaaaattgctcaagatttagtcgaaaaaggcttagcttatgaagacgatggagcaataagattcaaagttcaagatggtcaaaatatctattttgaagactatatccggggtgatatgaatttcaacacaaatgatattgaggactttgttattcttcgttcagacaaaactccaacatatcatttagcctcaacagttgatgatatagattatgagatatcaattattgctaggggagaagacatactttcatctactccaaaacacatcatgataatgaaagcacttgatgcaaaaattcctgacttctgtcatttaccattgttgtttggacctgatggtaagaaattaagtaaaagacatggtgatacatctgtctcatcatttagggatcaaggaatattagcgaatgcaatgtttaactatatgtcaatacttggctggtcgccaggtgacgatttagagatattccaaagagatgtagcaatagataattttgatcttaaaaatgttcttccaaatccagcaatttttgacactgtaaagttactttggatgaatggtcaatacattagaaatcttagcaaagatgaattttcaaaaaaagctaccgataatatatcggcgagtttgggaagagagatatttaaagaggaattagaaagaattaatataattctcccagtcgtacaagagcggttggagacattgaatgacataacagaccagattaaatttcttctagatgaaccattcactgttaacactgaagaatggaatggtgttaacagtgaaaatgtccaaaattatcttaaaaatattcgagaaaattttaagttgatggaaaaatttgatttagaaaacattgaaaacatgatgagagatgaattaaaagaattaaatatgaaacccaaagagggatttcaaggaaccagaattgcagtaacaggtacaaaaattagccctcctttatttgagtcaatctttgctctaggaaaacctgcaacgatcgcaagacttgctgaaatgattgaaaatttgtaa

SEQ ID NO: 300145 - DNA, 1408 bp, Unknown
  Bacterial polypeptide expressing nucleotide sequence isolated from the Sargasso Sea
atgaaggtaaataaaactagattttgtccaagtccaacaggtcttttgcatcttggaaatctacgtacatctctttttagttcccttatagcaaagaaggataatggatctttcctcctaagaattgaagatacagacttagaaaggtctaaaaaggagttttctacagcaatttgtaatgacttgaaatggatgggcttagattgggatgaaggtccagaagtaggtggtaaagaagattcttattatcaatctgagagagtcgatttatatgaagagttttacaaggctcttttagaaaaaaaccttatatacccttgcttcactagtgaagaggaattaaaaattattagacgaaatcaaattgcatctgggcagccgcctcgctatacgggagtttggtctaatgctactgaaaaagaagtaaaagaagaactggataaaggaaacaaaccggtatatagatttaggatccccaaagatagcacaatcgagtttcaagatttagttaagggagagcagtctttttctactgatgatctcgatgattttattgtaagaaaaaaagataatacgcccactttcatgtttgcgaatgcaatagatgattctttaatgggagttgatcttgtattgagaggagacgatcatcttagtaatacacctagacaaatagcacttcttgaagcattaggtctttcactgccaagatatgctcatgtttcactatttacgggctctgatggagctcctttgtcaaaaaggaacggcagtatttcgattaatgatttaagagagcaaggatatctacctattgcagttagtaattatctttctagagttggtcacaccatagttgataatgatctgaagacgcatagtgagttagcagatgaattcaaaatagataatatttccagttcaccaagtaaattcgatatggatcaactcctctattggcaaaagaaagcggttgaagaattgaatatcaatgaatgcagtatttggctgaaagattctctcgaagggttgcctgcttcggttaataacgaaaactttgttgctctaattaaagataacattaattttccccatgaggctcaagagtatttaaataacttattcttaactccattggtgcaaagagaggaaattatcaatatcattaggtccgctggaaaggagttctaccttcaagcatgtgatgctatcccatctgaaatcctagactggaatgaaacagctaaaaatattggttctataactggcaagaaaggaaaagaactattcatgcctttaagatgcgcaattacaggccaaactaaaggcccagaactggatagagttgttaatttgattggtacagagcaagttctaaaaaaattaaaagaggcatctgagctgtgaa

SEQ ID NO: 300146 - DNA, 832 bp, Unknown
  Bacterial polypeptide expressing nucleotide sequence isolated from the Sargasso Sea
atgattgttacaaggtttgcaccttctcccacaggattactgcatattggacatgtttactctttggtattttcttacgaatttgcaaaaaaaaataatggtaaatttattttaagaattgaagatatagattttactagatgcaaagatttatttattgagcaaataattgacgatataaattggctaaaaattccttttaaaagaactaacaatcagtcattaagaacaaagcaatactcaaaggctttagactatttaaaagataaagatctagtttatgcttgctggttgactagaaaagaggcgtcttcaactttaaacgcaccccataatcatatttctcaaaatgcaagtttgagggtaaatgatcaggaacttaaaaatagaaaaagcttaggtcttacaccagcttggagattaaatattaaaaattgcttgaaatacattaattcacaaaaagaaaaaatctattgggaagatattaaacaaggaaaaaatcttttaaatttagatcagtttggtgatgttgtaattgctagaaaggatattttaacaagctatcatctatctgtaacagttgacgacaatagtgatggtgtaacccacataataagaggtaatgacttagaaagttatactaacatacatcgattgcttcaagttttgttaaatttaagagagaccaaatggtttcatcataagttgataaaagacaagaatggtaaaagaattgcaaaaagatcaaattctaaacttactattaaagaattaagagaaaatggctattctgcaaaagaggttataaaacgtgcaaaatcaaatacataaa

SEQ ID NO: 300147 - DNA, 1369 bp, Unknown
  Bacterial polypeptide expressing nucleotide sequence isolated from the Sargasso Sea
atggaagtagttacaagatttgcaccaagtcccacaggactactccatctgggagctgttaggacagctatatttaatttcctttatacaaaaaaaaataatggaaaatttattttaagaatagaagatacagatcaagagagatctactaaagaatcgttaaatcaaatactcgagtctctgagttggctgggaattgaatatgatcaaggtccatatgtccaatctgataggctagaacattatataggagttgctcatgcgcttatagataagggtttggcctataaatgttttatgacaaatcaagaagttgaagagctgaaaattaaagctgcaaaagaaaaaagagtttataaatatccaaggacttggagagataggaaagatcatcccaaaaactcaccatatgtcattaggtttaaaacaccagataacctaaatattgaatttgtagatactttaagagggaagataaaagttgaatcgaataatcttgatgattttataataattagaagcgatggttatccaacatataacttttctaccgcaattgatgatgctgaaatgtgtataactaatgttattagaggagaggatcatttatccaacacatcaaaacaaatactaatttttgaatcaatagaaaaaaagccaccagtttttacacatgtttcaatgattttagggaaagataaatcaaaactaagtaaaagaaatggttcaaaatcaattaacgatttcaaaaaagaaggaatattaccaatttctatattgaactacttagctcgtctcggatggtcacatggtgaccaagaaatatttaccttaaatgaaatgatggaactgtttgatataaacaatttaacaaaatctcctgcaatttttgatgaaaataagttgaaatgggtaaacacccaacatataaaagctttaaagaatactgatttacttagtatgttagggatgaaatttatcgaaaatatcaatatagacttagctttatccgtttctaaggaaaaagggaaagatattgcatcgataaaagagtcgctgcacttttgtcaaatagaatcaataaaaataggaaaagagtttgaagatatagtttcaggcgaagaaactagaaaaatgataaaggaattttatataaaaatttccgatatagatatgttcaacatagatgaaataaagaattgtatgcaaatctttttagaagaaaaaaatttaaaaatgaaagaattaggtttgcctttaaggataatacttactgggtctaaagtttctcccggcatttttgagattatttctattttaggaaaagcagtttttcagaagagagtagaagattatcttagattatgaa

SEQ ID NO: 300148 - DNA, 640 bp, Unknown
  Bacterial polypeptide expressing nucleotide sequence isolated from the Sargasso Sea
tatgaaagaaagagcaaggtttgcacccagcccaaccggcccgcttcatataggtggtgtcagaactgctcttttcaattatctaattgctaaaaaaaatggcggcgagtttatacttaggatagaagacactgataccgacagaacagttgagggagcagaagaatatattatagagagtctaaaatggctaggccttactccagacaagaagccatataaacaaagtgaaagaaaagagatttacttaaagcgtgtcgatctgttagttgaaaacggacaggcgtatcattgctttgacaccctggaagagcttaagcgggctaaggaaaaacacggcaatgattttaaatacaggcatgataaaaattttggattaaaaaacacttttacaataagtaaagaagaggcgaatagtttaattgcgaaaggcgagtttgtaataagaatggttgtgccaagcaatgagataattaaagttaaagacgaaataagagggaatctctcatttaattcaaacgagttagaagataaaataattttaaaatcagataaaatgcctacctaccatctggctaatgttgttgatgacaatgatatgaaaataacctctgttgttaggggagaggagtggctgtca

SEQ ID NO: 300149 - DNA, 1411 bp, Unknown
  Bacterial polypeptide expressing nucleotide sequence isolated from the Sargasso Sea
atggagaaaattttagtgtcaaaagttgtaactagatttgcgccaagtccaactgggactcttcatatcggtggggttagaactgctctttttaattatgtttatgcaaaacaaaacgagggattatttctagtaagaattgaggatactgataaggaaagatcaaaaaaagaatatgaaaaaaatattttagatagtttagcttccataggattatctccagatgagaagccaattaatcaatctgaacgaaataatgtatatgttgatgctgcgaagaagatatttgattctggaaatgcttattggtgcgattgttcgaaagaagagctcgaggaaatgcgaaaacaacaagaaaaagatggtaagaaacccatgtatgatggcaggagtagaaataaaggattaaaacaatctgaaaatactgttttaagacttgcaacacctgaagatggagagattgttgttgatgatctcattcgaggcaaagtagtatttcaaaactcagagcttgatgacttaattcttttaagaagtgatggcacacctacttatcatttgtgtaatgttgttgatgacttcgaacaaaatgttacgacagtaataagaggtgaggatcatttaagtaatacacctcgacaaattcacatacaaaatgcactaggatatcctgcattagaatatgctcatcttcctcttgtactagggccagataaaaagagactttcaaaaaggcatgcagcaactagtcttgaagaatataaatctgatggatatcttgattcagcaatcctaaacactcttgcaagacttggctggtctaagggcgatcaggaagttttttatatggaagacttgattagagattttaatattagagatgttcaaaaagctggcgcaatttttgatataacaaaattggattggctaaatactcaacacatagctaatttgagttttgaagattttaaaaaagaattaaaaccttttttagaagatttatctattgatgttgatagtcatcaaaatgttgatttgttattaagctcaatgagaacagttgaaagcacttttaagaaaattgctgatgacttaattccttattactttgaagtaaatgcatataatcagcaggcaattgataaatttgtagataatgaaggtcttaagatactgaatgatttgtccgaaattctattatcgattgacgagtggagcgaaaataatattgataatgctctgaagaattatcaaaatgaaaataattgccctgttccaaaagtaaatcagcctatacgtatagctcttacagggtcaactaaatctccttcacttggccttactcttgcaatatttggtaaaaatgaagcattaaaaagaattgataacttaatagatcacataggttaat

SEQ ID NO: 300150 - DNA, 1321 bp, Unknown
  Bacterial polypeptide expressing nucleotide sequence isolated from the Sargasso Sea
tggttatattcaaaaaataaaaatggatctttttttttaagaattgaagatactgacaaggaaagatcaaaagatcaatataaagaacaaattattaaatcccttaaatggattggaattgagaatgatggaaatgaatatattcaatctaaaaaattagatgatcacattaaagttgccaatgaattgcttaaaaatggtcatgcatataaatgttattgttctaaggaagaaattgaagaacaaaaactgagagcaaaacaaaaaaaaataccttatatttatgatagaaagtggagagataaaaaagaacaagaggctccaaaagatattaaacctgtaattagatttaaaagtaaaatagatggaacttctatactaaatgatttagttcaaggtgatgtcgaaattgataataatgctattgaagattttatcatcttaagaaatgatggatctccaacatataacttatcagcgtcagtagatgatcatataatgaaaataacacacataattagaggggatgatcacaagattaatacttttaaacaaattcaaatttatcaatctatgggatgggaattgcctttatttgctcatataccattgatacatacaattgatggtaagaaactatcaaaacgagataaggcttctacattagacgattattctcaaattggtataatgcaagatgctcttagaaattaccttcttagattaggatggtcttataaagacaaagagatatttactctcgatgaaagtattaaatattttaatcttgaaggaattggcaaatctccctctaaattagatatgagtagaattttatctatgaatgagcactatattaagaatatcgatgaaaatgatttatttgatcaacttaccgagtattgcaaattatataaaagtgaaattgaatcagataaaaaagataaaattaagaaatctttaactttccttaaaaataaagctaaaactttagaggatatatttaataatggtaaatatataatggtagatgaggttaattttaatcaagatgatattaagttaattgatgataaggccaaaaaagtgatttctgatttcaattctcaatttgctagtgttgataaactaagcaaagaaacattagagccaatagtaaacggattgattaaatcaaacgatactaattttaaaggagtcggacagcctttaagagtagctttaacaggttcaaaatttggacctggtatatatgatataattatttctctagggaaagatgaagtgattaaaaggttaaccaataagaaacttgtttaat

SEQ ID NO: 300151 - DNA, 1471 bp, Unknown
  Bacterial polypeptide expressing nucleotide sequence isolated from the Sargasso Sea
atgacaaataaagagaaagttattgttcgttttgctcctagccctacaggaaatttacatattggtggagttagaactgctatttttaattggctatttgcaagagcaaataatggaaaatttatattaagaattgaagatacagatagaagcagatatgacgaaaattcagaaacctcaattttatctagtctttcatggctaggaatagattgggacgaaggaccaatctatcagtcaaaaagaaaagatatatacagagaaatagcaaataagcttatagattcaggatgggcttattatgatgacacaactcctgaagaactggatgaactaagaaagcagcaaataagagaaaagaaaccacctcgatacgataatagaggccgctataaagagatttctcattcagattatgaagaaaataataatgaagaaactccaattgttgttagattcaaagttcctgactctggtgctaaaccctttcaggacgaaataagaggtaaagttgagtttaatctaaaagaaatcgatgattttgtaatattaaaatctgatggaatgccaacctatcacttagctcatgttatagatgataagcttatggatgtaactcatgtaataagaggtgaagaatggatctcaagtacacctaggcatgtgctaatacacgatgcgttgaaatgggagttaccgaaatatgtgcatgttccattaatattaggtaaagataaagccaagctatcaaaaagacatggagccgaatctgctctggaatataaagcaagaggctatttgcctgaagccttgcttaatttcttagctttactgggttggtcacctggtgataatacagaaataatgacactagatgaaatattaagcaaatttactattaatagaattcttggacatccagcagtttttgatcctgaaaaattagaatggatgaatggatcttatataagaaaccttgatgatgaatatctatcagaacaaatattagatgaggtcaacaaagatttatcagagggaggattaatttctgaaaaagttgatagtaatactttaaaatctaaaatctatgaaattactcctttgataaaagaacgacttaagactttagatgagtcatcaaatttagttgaatatttcttttatgaaaattttgagattgataaggataaattagtacctaagaaaaccgaaaaaagtgaaataataattggactaaagagatcaatcgaacttatagagaaaacaaaattatttgaaccagaaaacttagaaatagaatttagagcattggcagaagaattaggattaaaagctgggcaattattttttccaattagaattgctttgactggtagaagagaatctcctcctttgtttgatacaatgaaggctattggaactgaaagttctattaaaagacttaataatgcgataaatattctcgaataaa

SEQ ID NO: 300152 - DNA, 916 bp, Unknown
  Bacterial polypeptide expressing nucleotide sequence isolated from the Sargasso Sea
tatgaaattaagaattgccccttcaccaactggcagccttcatataggaaacgctaggactgcgttattcaactggctatatgctaaagcaaatggaggcacttttgttgtaagaattgatgacactgacatagagcgtagcactgaagagtttcaaaaagacattctagaaaacctaagatggttaggacttgattgggatgagggcgttgaagttggtggagagcatggtgattataaacaatcttcacggtttgatagatatagagaagtagcaaatgaactcttagaaaaagaccttgcttataaagatgatggtgcaattagattcaaagtccctagtgataggacaattgaattcaaagattttgtacgtggagacatgtcatttgaaacttcagatgtagaagattttgtcattttaagatctgacaataccccgacatatcaccttgcctctacagtcgatgatatagattatggaataacaataattgcaaggggagaggatatactttcttcaactccaaagcacatattgattatggaagccttagatgcagcaataccaaatttttgtcatctacctttattatttggtcctgacggtaaaaaacttagtaaaagacatggtgatacatcagttgaagcatttcgtcaaaaaggaatattaaatgatgcaatgttcaactatctttgcctacttggctggtcaccaggtgatgatattgagctttttgatagtgattttgcaattagtaaatttgatttaaataaagtactaccaaattcagctacttttgatgaaaaaaaactcctttggttaaatggacagtatataagatcaacttcaccaaataaatttgaagaggattcactgcaaaatattgagaatcaacttagtagagaattattt

SEQ ID NO: 300153 - DNA, 1393 bp, Unknown
  Bacterial polypeptide expressing nucleotide sequence isolated from the Sargasso Sea
aatgtcaagagtagcaacaagatttgctccatctcctactggtccgttacatattggtggcataagaactgctttgtttaattggttatattcaaaaaatcaaaaaggttctttttttctaaggattgaagatactgataaagaaagatcaaaagaagaatataaaaatcaaataatacaatctcttaaatggataggtattcaaaatgatggaaatgaatatattcaatcaaaaaaaatagatgaccacattaaagttgctaacgaattattaaaaaatggtcatgcttacaaatgttattgttcaaatgaagaaatagaagaacaaaaaaatagagcaaaacaaaaaaagattccttacatatatgatagaaaatggagagacaaaactgaggctgaagctccacaaaatatcaaaccagctataagatttaaaagtaaaatcgatggatcaactatattaaaagatttagttcaaggtgatattgaaatagaaaataatactattgaggattttatcatattaagaaatgatggttcaccaacttataatttatctgcttctgttgatgaccatcaaatgaatattactcatataattagaggtgatgaccataaaattaatacatttaagcaaatgcagatttatttagctatgaaatgggagttgccttccttcgctcacatacctttaattcataccacggaaggaaaaaaactatcaaaaagagataaggcatcaacattagatgattattcaaagattggtgtaatgccagaagcattaagaaattaccttttgagattaggttggtcatttaaagataaagaaatttttactttagaagaaagcatacaacactttagtttggaaggtataggcaaatcaccttcaaaattagatatgagtagaattttatcaatgaatgaacattatattaaacatatgaatgaaaatgatctatttaatcatttaacaaaatattgtgaaaattataaagataaatttgatagtaaatcaaaaaatattaaaaaatcacttagttttttaaagaataaagctaagacccttgaagatatatatattaatgcgcaatatcttataaaagataaaataaagatatcttctgaagatcaaaaacttttagataatttagcaaaaacaatttttaaagattttttaaaagaatttgaaaatttaactaatataaataaagaaaatttggaaaaaattataaataatttaataaaaaaaaataagacaaacttcaaaggggtaggtcaaccattaagagtagctttggtgggatcaaaatttggtccaggtatatacgatataataatgtctctagataaaaatgaagtggttaaaagattaaaggctgctatttaa

SEQ ID NO: 300154 - DNA, 1248 bp, Unknown
  Bacterial polypeptide expressing nucleotide sequence isolated from the Sargasso Sea
atgaatataaaaaacaaattataaaatcacttaaatggataggtgtagaacatgatggagatgaatatattcaatctaaaaaattagatgatcacattaaagttgctaatgaattgcttaaaaacggtcatgcatataaatgttattgttctaaagatgaaattgaagaacaaaaacttagagcaaaacaaaaaaaaataccctacatttatgataggaagtggagagataaaaaagaagaagaggctccaaaagatattaaacctgtaataagatttaaaagtaaaatagatggaacttctatattaaaagatttagtccaaggtgatgtcgaaattgataataatactattgaagattttatcatcttgagaaatgatggatctccaacatataacttatcagcatcagtagatgatcatataatgaaaatgacacacataattagaggggatgatcacaagattaatacttttaaacaaattcaaatttatcaatctatgggatgggaattgcctttatttgctcatttaccattaatacatacaatagatggtaaaaaactatcaaaacgagataaagcttctacattagacgattattctcaaattggtattatgccagatgctcttagaaattaccttcttagattaggatggtcttatgaagacaaagagatatttaatctcgatgaaagtattaaatattttaatcttgaaggaattggcaaatctccatctaagttagatatgagtagaattttatctatgaatgagcactatattaagaatatcgatgaaaatgatttatttgatcaactaaccaagtattgcaaattatataaaagtgaaattgaagtggataagaaagataaaataaagaaatctctaacttttcttaaaaataaagctaaaaccttagaagatatatttaataatagtcaatatataatggcagatgaggttaattttaatcaagatgatattaatttaattgatgataaagccaaaaaagtgatttctgatttcaattctcaaattgcaagtgttgataaattaagtaaagaaacattagagccaatagtaaacggattgattaaatcaaacgatactaattttaaaggagttggacagcctttaagagtagctttaacaggttcaaaatttggacctggtatatatgatataattatttctcttggaaaagaggaagtaacaaaaagattaaccaataagaaacttgtttagt

SEQ ID NO: 300155 - DNA, 1273 bp, Unknown
  Bacterial polypeptide expressing nucleotide sequence isolated from the Sargasso Sea
gatgtctaaagtagcaacacgatttgctccatcccctactggagctcttcatattggaggggttagaactgccttattcaattggttgttctctaaaaatcaaaaaggaacttttcatctaagagttgaagatactgacaaagaaagatccaaagaggaacacaaaatacaaattattaaatcattgaagtggatagggattgagcatgatggtgaagaatatattcagtcacaaaaaatagaagatcacattaaaattgctaatgaattattaaaaaaagggaacgcatataaatgctactgttctgctgaagagatagaggaacaaaaaaaaagagctaggcaaaaaaagttgccatatatttataatagaaaatggagagatgctgatgaaaaagatgctcctaaagatattaaacccgttattagatttaaaagtaaaatagaaggaaattctaaacttaaagatttagttcaaggagatgttgaaattgaaaataatacaatagaagactttataattttaagaaatgatggaacaccaacttacaacttatctgcaactgttgacgatcatcaaatgggaatgactcacataatcagaggagatgatcataaaataaatacttttaaacaaatacaaatatatcaagcaatgggttgggatgttccagaatttgcgcacattccattaattcatacaattgaaggtaaaaaactgtcaaaaagagataatgcctcgactttggatgattactcaaaaataggtataatgcctgatgcattaagaaactatttacttagacttggatggtcatatcaagacaaagaaatatttactctggatgagagtattaagtactttagtttagaaggtattggaaaatcaccatcaaaactagatatgagcagaattttatcaatgaatgagcactacataaaaacgatcaacgaaaacgatctttataaaaatctatttgaatattgcaaaattaataaagaggaaattaaaaatgataaagaaataaaaattaaatcctcattatcttttttaaaaaataaagccaaaaccttagaagacatatataataatgcaaagtttatcatcaatgatgaagttaacttcaataaggatgattttaaattgattgatgataatgcaaaaaaaattatttcagaatttattaaagaattatcatccatatcatatataaataaggagaatttagagcctgtagtaaataatttgattaaaacaaatgatacaaatttt

SEQ ID NO: 300156 - DNA, 1053 bp, Unknown
  Bacterial polypeptide expressing nucleotide sequence isolated from the Sargasso Sea
ttgaaatttataaaaagagagcctatgaattaatatctacagggcaggcatatgagtcagaaggtgccatccgttttaaatccgaccgctcttcaaatgtcataatttcagatcacgtctttggtgatgtcatcgtcaatgccgatgaaatggatgattttatcatcatgcgctcaaacggggctcccacatatcattttgctgtagtgattgatgattatgagtctgggattactcatgttatgagaggcgatgatcatcttaagaacaccgcaaggcatattcagcttatgaaggcttttgattatcctattcctgattttgttcatcttccaatgatcttaggacccgacggctcaagactgtcaaaaaggcatggcgccatgaatgttcttcattacagagatgagggcttctcatcagaggctttgcttaactatttggttagacttggttggtctaagggtgatcaggagatattcagcattcaggaaatgattaatggatttgatctttcaggtatcaataaagccagtgctaaatttgatattgaaaaactccgttgggtcaatcagcagcatctattaaatactaacgatgatgaattaaagacaatgctagaagctcgatctgaaactgctaaagagctcaatgatgagatcataacaaactttatcaatgcttataagaatagggcaaacaccatcaatgatttggtgtctagttgtgagagtcttttttcagatgatattaaatatgatcaagcttcagcagataagtttctcagaaaagagattatctctgccttgaaagacatagttgatagtttaaaagaatctagctggaaccaagaatcaatttcaggcgcactgaagtcagtttgtgaaaaacatgaaattggttttggaaagattggtcaaccgattagaatcgctgtaacaggaggcactcaatcaccatccatagatcaaactttaattttgttggatcagtcaatagtagttgataggattgaggcagcaatagaatatatcgaaaaaaaatccaactagg

SEQ ID NO: 300157 - DNA, 390 bp, Unknown
  Bacterial polypeptide expressing nucleotide sequence isolated from the Sargasso Sea
aatggataaaaaaataacacatgaagtgagagtgaggtttgccccaagccctacgggtgatcctcatataggtgcaatgagaacagctttatttaattgggcatttgcaaaaaaaaataaagggaaatttattttaagaattgaggatactgataaaaaaaggcaaatagaagggtctatagaaaacataattgaagggcttaattggctaggattgaattatgacgaaggtcctggaatcgagggagattatggcccatatattcagtctctaagaaagaatcgctatatagatgcggtgaacaagttgcttgatgatggaaatgcatatatgtgcgaccttacaccagaagaactagacaaaatgaaagaagaacaaaaacttcaagg

SEQ ID NO: 300158 - DNA, 214 bp, Unknown
  Bacterial polypeptide expressing nucleotide sequence isolated from the Sargasso Sea
atgagtaaggtagtaacaagatttgctccaagtccaactggaaccctgcatattggaggagttagaacagctttatttaattatatatatgcaaaacaaaataatggagagttcttagtaagaatagaggacactgatagagaaagatcaactaaagcttatgaaaaaaatattttagatacactttcctctataggactttcaccaagataaa

SEQ ID NO: 300159 - DNA, 856 bp, Unknown
  Bacterial polypeptide expressing nucleotide sequence isolated from the Sargasso Sea
cgtggtggtggtggatgacgccgccatggcgatcagccatgtgatccgcggcgaagaccacatcgccaacaccgccaagcagctgctgctctacaaggccctgggcctgcctgaaccgacctttgcccatgcacccctgatcctgaatggggaaggccgcaagctctccaaacgggatggcgtgacctccatcaacgacttccgcgcgatggggtacaccgcagaagcgattgccaactacatgaccctgctgggctggtcggtgcccgaggggatggaggagcgcttcaccctgcccgaagcagcagcagtgttcagcttcgatcgggtgaacaaggccggggcccgctttgattgggacaagctcaactggctcaacgggcaggtgctgcacgccctgccagctcagcagctcctggatgagctccatcccctctggagcgaacaggggtggacgctgccggatgacagcagctgggggctggacctgtgcgaactgctgggaccatccctgaccctgctcaaggacggcgtggaccaggcgaaaccgttcttcgagtgtcctgatcttgaggacgatggcaaaagccaactggaggccgaaggagctcgtgacgctgtggctcaactgctgcagaccctcgaggctgatccctgggatggtggcgacatggatcgcgccaaacagctcctgggggatgccgccaagggagccggcgtcaaaaaaggtgtggtgatgaaatccttacgcgccgcgctgcttggacggctgcagggccccgacctgatgacaacctggtctctactggcccgaatcggagaagacctccccagactgcggcgttgtctcggatga

SEQ ID NO: 300160 - DNA, 1294 bp, Unknown
  Bacterial polypeptide expressing nucleotide sequence isolated from the Sargasso Sea
gatgacaaaaaaaattgttacaaggtttgctccaagcccaacaggctatctccatattggtggagtaagaacagcactttttaattttgttttttcacggaaaaataatggaacttttttagttcgcatagaagacaccgataaagaaagatcagaagagcagtatattgacgctatcatggatggtttagattgggttgggctgaacccagatcatgagccaattaaacaaagtgatagatttaatatttatgaagatgaagctttgagactggtagaagagggcaaagcatataaggatgatggtgcaataagattaaaggttaataaagaaggttcgactttagtcaaggatttagtttacggagatattgaatttctcaataaagaattagatgatttagtaattttaagaagtgatagttcgccaacttatcatttttgtaatgtaatagatgacaattttcagcaagtaacgcacataattagaggagaagatcatttacctaatactccgaaacaaattcaaattgtaaatgcacttaagtatgatggttttgagtatgctcatttaccactagtacttggagaggataaaaagagactatcgaaaagacatgcagctacagatttgatgtcttataaagaagaaggttatctacctgaggctgtattaaatatgttggcaaaattaggctggtcaaatacagaaaaagatatatttacaatagatgatttaataaaaatatttgatgtaagtgatattcaaagatcaggagcagtatttgataaagaaagacttaactttattaatcagaatcatatggcaatgaaaactgatgatgaattaatggatctgcttggaatttttaatgaacaaaatggattttcgctgtctgatcatcatgatccaaaaaggttagtaagactctgtgtaggaagtggcaataatttttcagaaatatcaaattttataaaaccatttgtaatagattttaacgaatacaataaggctgactttaacaaacatctattaggaagcgaaaatgttctaaattattttaaagaatctatcctttcaatagatgattggaatgaaggaacatttgaggagattattaattctgctatgagagatttggatcttccaatgcctaaaattggtctacctttaagggtggctttagttggaagagcaaaatctcctcctcttaactcaactatttatttaatagataaaaataaaacagttgagagattggataaagcgttaaagactatttctgaacactaa

SEQ ID NO: 300161 - DNA, 496 bp, Unknown
  Bacterial polypeptide expressing nucleotide sequence isolated from the Sargasso Sea
tatgaataataaatcttcaaaaaaaataagggttaggtttgctccaagccctacaggggatcctcatttaggagcaatgaggacagctctatttaattgggcatttgctaaaaaaaataatggtaaatttatattaagaattgaagatacagataaaaaaaggcaagttgagggatcaattgaaaatataattgagggattgcattggttaggcttaaattatgatgaaggccctgaaattggcggtgattacggaccttatactcaatctcaaaggaagagcttatatataaatgccgttaacaagctactagatgatgggaatgcatatatgtgcgatctttccacaaatgatcttgagaaaatgaaagaggagcaaaagttacaaggcaagcctcctggctataatggatattcaagaaatcgacctagaaaagaattaaaggggtcaaaaaaaaatggtcttcctatagttgtaagactaaaggtcctcttt

SEQ ID NO: 300162 - DNA, 1285 bp, Unknown
  Bacterial polypeptide expressing nucleotide sequence isolated from the Sargasso Sea
atggttaaaactcgatttgctccaagccccagcggatatcttcatattggaggtgttcggactgctctttatgcatggttattcgccagaaatcagggcggcaagttcttgctaaggatcgaagatacagatgtagaacgatctactgaagagtcaaaactatctattctagaggggttaaaatggcttggcctaaaccacgatgaggagattgttcatcaatccgaaagatttgagatctataaagaaaaagccaatgaattgattgctgatgggaaggcttatgaatcagaaggcgccattcgattcaaatcggatcgctcttcaaatgtcataatttcagatcacgtgtttggtgatgttgaggttaatgtcgatgaattggatgattttatcatcatgcgatcaaatggagctcccacttatcattttgcagttgtgatagatgattatgagtcagggattacacatgtcatgagaggcgatgatcatttaaagaatactgcaagacacattcaactcatggaggcttttaactatccaatacctgattttgttcatctaccaatgattctcggcccggatggctctagactctcaaagagacacggtgcgatgaatgttcttcattacagggacgagggtttctctccagaaggattactcaattatttgataaggcttgggtggtctaagggtgatcaggaaatattcagtattgaagagatgattgccggatttgatcttccaggtatcaacaaatccagcgcaaagttcgacattgaaaaacttcgatgggtaaatcagcagcacttattaaatactaatgacaatgaattgaagttgatgatcgaggctcgatcagagatcgcaaaaggccaagaagatgaaatcatgacaagctttattaaagcctataaaaatagagcaaataccattaatgatttggtttctagttgcgatagtcttttttcagatgtaatcaattatgacgaagcttctgcaaataaatttctcaaacaagaaatcctcttaccactggaggatgtcgttgttgcccttaaagaatctaattggaaccaagaatctatttcagaagcacttaagtcagtttgtgaaaagcatgaaattgggttcggaaaaattggtcaaccgatcagaattgctgtgactggtggcacacagtcaccttctattgatcaaacgttaatcctattggatcaagagagggtaattgataggattaatgcaggaatcaattatataaaagaaaattctaaataat

SEQ ID NO: 300163 - DNA, 1336 bp, Unknown
  Bacterial polypeptide expressing nucleotide sequence isolated from the Sargasso Sea
tatgaagtgtaggttcgctcctagccctacaggaaaaatacatatcggtaatgctagatcagcaattttgaattggattttttgtcaaaaaaatcaaggtgagtttgtattaagaattgatgatactgatgccaataggagttctaaagaatttgagacaagtatcaaagatgatcttaaatggcttggattaaattggagttacacttttaatcagtcctctagacaacatatttacaatgagaaaatccaaattctaaaacaaaagaaaagactttatccatgttttgaaacagaagaggaattagctttaaagaaaaaatctttgttatcatctgggaaaccacctatttatgatagatcatcattaaatctaagtgatgaagaagtagaaaaaaaaatagaatcaggaatccaaccccattggagattcaaattagatcatgaaaatattagttggaaagatattattaaaggagatgtttcatttgatgcaaaaaatttgagtgatcctgttttaattagagctgatggaacattgttataccatttaccttcagtcattgatgatattgaagaaaaaattacacatattattagaggggaggatcacatagctaatactgcttatcatattcaaatttttaaggctcttgaatcttctattccatcatttgctcatcatccattcttagttgatgaaactggtaagggttttagcaaaagacttggaagtctttcaattgaaaattttagagacgaaggatacgaaaatatatctttacttaattattttctttttattggttcgagcagtaatattgatccaatcaaagatttaaatgaaatagtaaaaaaatttgatattcaaagcttatctagatcttctgctaaattttcaattgaatccttaagaaatcttaatgaaaataccattaaattatttagttataatgagattagtcataagttaaaaaatataaaatctaattttcaaaaagagagtttttggcgttttattaaaaataatatttcatttgttaatcaagctaaagaatgggaagaagtaattacaaaaataaataatgctaaagatttaaatattgatgataattttattaatacggcagttgatgaattacccgaggatccttttgatgaaacaacatgggatcattggacatcaaaaattaacaaaaaaactgggcttaaaggaaaagatttatttatgcctttgaggttgattttgacaggaaaatctcatggacccgaattaaaatatctactaccattatttgatagagacgaaatcttgcaaaaacttggaaaaatctag

SEQ ID NO: 300164 - DNA, 979 bp, Unknown
  Bacterial polypeptide expressing nucleotide sequence isolated from the Sargasso Sea
tatgttaaaaacacgatttgcaccctctcctactggtaatcttcatcttggaggtgctagaacagctctaattaattatattataagtaagaaatcagcatcatctaaattctacctgagaattgaagatacagatcatgaaagatcaaaacaagaatacacagataacataactaattctttaaaatggcttgggcttaattgggatgaggaaattcaagttcagtctaaaagattatcaagacatcaagaaattgctagagaattactacaaaaaaagcgagcatttaaatgtgtatgttctgaagaaaaaattgctcatcaaaggaaactaattagagaaaataaaaactattctaaaaaaatatgtacagaatgtaaaaatgataatgatattcaaagtaaagctgaggattttgtagttagattagatgtcccaaatgaaggaaatttaaaaattaatgatacaattcaaggagacgtttcagtagcaaatttagagttagatgatttcattttactaagaaaagatcaatcacccacctatatgttatctgtagtagttgatgatcatgatttaggtatcaattacattattagaggtgatgatcattttattaatacttttagacaatactacatttataaatttatgaattgggatgtacctcaatatgcccatattccccttattcacggagaagatggatcaaaattatcaaaaagacatggggcagtaaatattttggatttgaaaaatgatggatatttaaaagaagctattattaataaccttatacttttaggttggtcaaataacaaagagaagtcagaaacaattgaattagatgaaataattgaaaattttgatttatcaaatttatctaaatcatttagtatatttagttttgataaattagatttttttaataatttttatttaagaaaagaaaacggaattgaggaattcatatacttt

SEQ ID NO: 300165 - DNA, 1370 bp, Unknown
  Bacterial polypeptide expressing nucleotide sequence isolated from the Sargasso Sea
aatgaaaaaaattgtaacaagatttgctccaagcccaacaggaacacttcatataggaggtctaagaacagctttatttaactatgtttattccaagcaaaacaatggattatttttagttagaattgaagatactgacagagagcgctcaaaagtagaatatgagaaaaatattctagatacactttcttctgtaggactcgttccagataagaagccaattaatcaatcagaaaggaatgaaatatatgtaaaagccgctgaaaagataattgaatcgggtagtgcgtattggtgcgattgttctcaagaagaattagaagaaatgcgtagggagcaagctgctgctggtaaaaaaccaatgtatgacggaagaagtagagaccttgggttggaacgatctgagaaaacagtattaagattggcaactccattggatggagaaattattgtaaatgatattattcgaggtgaaataaaatttaataatagtgagttagatgacttgattttattaagaagcgatggaactccaacttatcacttatgtaatgttgttgatgattatgaacaagaagtcactactgttataagaggtgaagatcatattagtaatacaccaagacaaatccatattcaaaatgctttaggctatcctgagcttgaatatgctcaccttccattagttcttggccctgataaaaaaagactatccaagagacatgctgcaactagtttagaagaatatagagaagcagggtatctagatacggcaattattaataccttatcaaggctaggttggtctaaaggagatgatgaggttttttatttagatgatcttataaataattttaatcttagcgaagttcaaaaagcaggagcaatttttgatatcacaaaacttgattggctaaattctcaacatctagcaaatttatcacttcaagattttaaatcacatttaaaaccatttcttgaagatatatcaattgatattaacaaccacgacaatgttgaattattaatagagtctatgcgaacctcagaaaatactctaaaaggtatcgctgaatcacttagaccgtattatgaggaagtttccgattataacgaaaaagcaattgagaaatttttagaccaagaaggaaaagcaattttgattgagttaaaagaattattatccaatattaatgattggaaagaagattctatagataaagttcttaaagaatatcagcaagaaaataattgccctgtacctaaggtgaatcaaccaataagaattgctttaaccggttcaactaaatcaccatcaatgggcttaacattaagcttttttagcaaagatgattcactaaaccgaataa

SEQ ID NO: 300166 - DNA, 817 bp, Unknown
  Bacterial polypeptide expressing nucleotide sequence isolated from the Sargasso Sea
atgtcttttaattgtaggtttgcgccctctcctactgggcctcttcacattggcggtgttcgaacagctttatttaattggctgttagctaagaaaaataaaggtaaatatttcttaagaattgaagatacagataaagaaagatcaaaagatgaatttaaaaaacaaattattacatcattatcatggctggggattgaacatgatggtgaagaatatattcaatctaaaaaaattaataaacacgtagcagtagccgaagagcttattaaaaaaggttttgcttatgagtgttattgctcagaaaaagaaataaatgaacaaaaagagaagtgtaaaaagcaaggtataccgtatgtttataatagaaagtggagagatgctaaagaccttaaaattccagaagatgtaaaaccggtaattagatttaagagtaaaatttcaggaaatacaattataaaagatttagttcaaggagaaagaaatatctcaaactccacaattgaagattttgtaatattaagaaaagacaaatcaccaacatatcaattatcagcaacagttgatgatcatgagatgaaaattactcatgtaattagaggtgatgatcatatgattaattcttttaaacaaaaacaaatttatgatgccatgggatgggaggttcctaactttgctcacatcccattaattcatagtgaacaaggaaaaaaattatctaaaagagataatgcctctacccttgaagattacgttaaaattgggattatttcagatgctttaagaaattatttattaagattaggatggtcttata

SEQ ID NO: 300167 - DNA, 526 bp, Unknown
  Bacterial polypeptide expressing nucleotide sequence isolated from the Sargasso Sea
atgacaacgataacaagatttgctcctagtccaacaggattattgcacttgggcaacatcagaacagccctcataaattggttgtatgctaaaaatagtggtggaaaatttattcttcgaattgatgataccgatcaagagaggtcaaaagatgaatacatttctcaaataaaatatgatttggagtggctgggaatagactatgacgagacttttaatcaatcttctagatttgatagatacaaagaacaattcgaaaaattaaaatctgatggcaggatatatgcttgctatgaaactcctgaagaacttgagagaaaaagaaaacttcaaatggctaccggtggaaagcaagtgtatgaccgttctgcattaaaattaacggagcaacaaataaaaaattatgagaatgatggaagaaaacctcattggcgatttctgcttcaaacagaacgcatgaaatggaatgatttattaaagggtgaaatagatattgatttgacaagcttatcagatccaagtttta

SEQ ID NO: 300168 - DNA, 498 bp, Unknown
  Bacterial polypeptide expressing nucleotide sequence isolated from the Sargasso Sea
gatgtctaaagtagcaacacgttttgcaccgtcccctactggagctcttcacattggaggggttagaaccgcgttatttaattggttgttttctaaaaatcaaaaaggaacttttcacctcagaattgaagatactgataaagaaagatctaaagacgaacataaaaaacagattattaattctttgaaatggcttggtatagagcatgatggggatgaatacattcaatcaagtaaaataaatgatcatattaaggttgcaaatgaattacttaaaaaaggtaatgcttataaatgttattgctcagcagaagaaatagaagagcaaaagaaaagagctagacaaaaaaagcttccgtatatctacaatagaaaatggagagatatacaagaaactaatactcctaacggtataaaaccagtaataagatttaaaagtaaaatagaaggatcaacaatacttaaagatttggttcaaggcgatgttgaaattgagaa

SEQ ID NO: 300169 - DNA, 787 bp, Unknown
  Bacterial polypeptide expressing nucleotide sequence isolated from the Sargasso Sea
atgaaagctatcgttacaagatttgctccaagcccaaccggtactctccacattgggggtttaaggaccgcattatttaattatgtatatgcaaaacaaaataatggaaaatttttaataaggattgaagatactgacacagaaagatccacaaaagaatttgaaaaaaatatactagataatcttacttctattggacttcagcctgatgaggatccaatcaatcaatctgaaagaaatgagatatatttgaaagctgctgaaaaaatatttcagtctggcaatgcatattggtgtgattgctctcaagatgaacttgaagaaatgaggagggcacaaactgcagctggcaaaaaaccaatgtatgacggtagaagtagaaatcttggattagatagatctaataagactgttttaaggttagcaactcctgaaaatggtgaaattattgtaaatgacctaataagaggagaaattaaatttaataacaatgaattggatgatcttatattgctaagaagcgatggttctccaacgtatcatttatgcaatgttgttgatgattatgaacaaaaggtcacaactgtgattagaggagaagatcatataagtaatactccgagacaaatacacattcaaaatgcattaggttatccagaattagagtacgctcatttacctctggtacttggaacagataaaaaaagattatcaaaacgaaatgcagcaacaagtcttgaagaatatcgagataagggatacctggattctgcaattttgaattcac

SEQ ID NO: 300170 - DNA, 1231 bp, Unknown
  Bacterial polypeptide expressing nucleotide sequence isolated from the Sargasso Sea
acaaattattaattcactaaaatggataggtataaaatttgatggggaagaatacatacaatcaaaaaaaatagatgatcatattaaaattgcccatgaattattaaacaaaggtaatgcttataaatgttattgctcatctgaggaaattgaggaacaaaaaaagagagctaaacaaaaaaaaattccatatatttacaatagaaaatggagagataaaaaagaaaccgatgctcctaaagatataaaaccagtaataagatttaaaagtaaaatagatggaacatctatattaaatgatttagtccaaggtgatgttgaaattgaaaataatactatcgaagattttgttattttaagaaatgatggcaccccaacatataatttatcagcagtggtagatgactatcaaatgaatatgtcacacataattagaggggatgatcataagataaatacttttaaacaaattcaaatttaccaagccatgaaatggaaaataccttcttttgctcatataccattaatacatacaattgatggaaaaaaactatctaaacgagacaaggcctcaactttagatgattattctaagattggtattatgcctgatgctcttagaaattatctcttaagattaggatggtcttacaaagataaggaaatatttacaatagaagagagtattaaatattttaaccttgaaggtataggtaaatctccgtctaagctggatatgagtagaattttgtctatgaacgaacactacattaagaacatgaatgaaaatgacttattcgatcagctgattgaatactgtaataaatttaagaaagaaataaaaactgataaagaagataaaataagaaaatctctatcgtttttaaaaaataaagccaaaactttagaagatatatttatcaatggtcagtatataatcactgatgaagtaatatttaatcaagatgatattaaattaattgatgaaaaggcaaaaaaggtaattactgattttaaagctcaatttgagaagatagatcaacctagcagagaaattttagaaccagttattaatggtcttataaaatctaataacacaaattttaaaggtgttggccagcctttaagaatactattaactggttcaaaatttggacccggaatatatgatattatattgtctttaggaaaaaaagaggttcaaaaaagattagacgccaagatagcttga

SEQ ID NO: 300171 - DNA, 1396 bp, Unknown
  Bacterial polypeptide expressing nucleotide sequence isolated from the Sargasso Sea
catgaaaaaagtagcaactagatttgctccttctcctaccggtcctcttcatattggtggggtaagaacagctctatttaattggttatattcaaaaaataaatcaggtaaattttatttaaggatagaagatactgataaagaaagatctaaggaagaacataaaattcaaataattaactctctagaatggatgggaattaaacacgatggtgaagagtatattcaatcaaaaatgattggtgaacacgtaactattgctaaaagattattagaaaatggaaatgcctataaatgcttttgtagtgcagaggaaatagaggaacaaaagaaaagagctaaacaaaaaaaaattccttatgtgtataatcgaaaatggcgtgatatttctgaagatcaagccccaaagggtataaaaccagttataagatttaaaagtaaaatagaaggcacttctctactaaaagacttagttcaaggaaacgtggagattgaaaataatactattgaggattttgttattttaagaaatgacgaaacgccaacatataatttatctgcgtcagttgatgatcataatatggaaatgactcatattataagaggagatgatcataaaattaatacttttaaacaaatacagatatatgaagcactaggatgggatattccacaatttgctcatatacctcttattcatacaatagatggtaagaaattatcaaaaagagacaatgcctcaacattagaagattacacaaaaattgggattctgcctgaatcacttagaaattacctacttaggttaggatggtcttataaagataaggaaatttttagcttagatgaaagtataaaactttttaatttagaaggaataggtaaatcaccttcaaaacttgatatgagtagaattctttctatgaatgaatattacattaaaaatagtgaagaaaatacattgtacaaaaagttaaaagaatattgtgaaatgtataaagaaagaattaaagaagataaagaaaatacaataaagagctctttaacatttttaaaaaataaagcaaaaacacttgaggatatatttaacaattctaaatacatattaaatgataaagttatttttaacaataatgataaagagttgataaacgatgaggcaaaaaaaataataaatttatttaaagagaagatttcagaattagaagtttttgatagagaaaatttagaacaaatcataaatgcgttaataaaattgaataatacaaattttaagggaattgggcagccattacgaataatgttaacaggatctaaatttggtccaggaatatatgatataatattatctcttggaaaaagcgaggtaataaaaagattaggaaatataggataa

SEQ ID NO: 300172 - DNA, 1270 bp, Unknown
  Bacterial polypeptide expressing nucleotide sequence isolated from the Sargasso Sea
gatttgctccagcccaagcggataccttcatattggaggtgtcaggaccgctctatatgcatggctttatgccagaaatcaaggcggaaagtttctacttcggattgaggatacagatatagaaagatcttctgaagagtcgaaattatcaattcttgagggaatgaaatggctcggtttagaacatgatgaggaaatcattcatcaatctgaaagatttgaggtttatagagctagagccgatgaattgatatctgcagggaaggcatatgaatcagaaggcgccattcgttttaaatccgatcgctcttcaaacgttataatttcagatcacgtttttggcgatgttgaagtcaatggtgatgaattggacgattttatcatcatgcgttcaaacggggctccaacatatcattttgctgttgtgattgatgattttgaatcaggcattactcatgtcatgagaggtgatgatcatcttaagaacactgcaaggcatattcagcttatgaaggcttttgattacccaattcctgattttgttcatctaccaatgattttaggaccagacggttcaagactctcaaaaaggcatggcgccatgaatgttcttcattacaaagaagagggtttctcatctgaggctttgcttaactatttggtgagactaggctggtctaagggtgatcaggagatattcagcattcaggaaatgattgatggatttgatcttgttggcatcaataaagccagtgcaaaatttgatattgaaaaactccgttgggttaatcagcagcatctactaaatactgacgatagtgaattgaagatgatgctagaagctcgatctgatgctgctaaaggacttaatgatgaggtcacgataaactttatcaatgcttataagaatagggcaaataccatcaatgatttggtgtctagttgtgacaatcttttctcagatgaaatcaaatatgatcaagcttcagcagataagtttctaaaaaaagagatcctctctcctttgaaagatgttgttgatgctctgaagaggtctgaatggaatcaggagtctatttcagaggcactgaagtcagtctgtgagaaacatgaaataggctttggaaagattggtcaaccgattagaatcgctgtaacaggagggacccaatcaccatccatagatcaaactttaattttgttggatcaatcaatagtagttgataggattgaggcagcaatagaatatatcatagaaaattctaagtag

SEQ ID NO: 300173 - DNA, 646 bp, Unknown
  Bacterial polypeptide expressing nucleotide sequence isolated from the Sargasso Sea
aatgtcttttaattgtaggtttgctccatcccctactggtccacttcatatcggaggtgtcagaacagctttatttaattggttgttggctaagaaaaataaaggaaaatattttttgagaatagaagatactgataaagaaagatctaaggaagagtttaaaaaacaaattatttcatcattagcgtggttgggcattgaacatgagggcgaagaatatattcagtcaaaaaacatgtctaaacatgtgactgtagcagaagatcttataaaaaaaggttttgcatacgaatgttattgctcagaggaagaaataaatgaacaaaaagaaaaatgtaaaaaacaaggaataccatatgtatataatagaaaatggagagacgctaaagatttaaaaataccaaaagatgttaaaccagtaataagatttaaaagtaaaatctctggaaatacgattataaaagatttggttcaaggagaaagaaatatctcaaattctactattgaagattttgtaatattaaggaaagataaatctcctacctatcagctatcagcaactgtagatgaccatgagatgaaaattactcatgtgataagaggtgatgatcatatgattaattcttttaagcaaaaacaaatttat

SEQ ID NO: 300174 - DNA, 1154 bp, Unknown
  Bacterial polypeptide expressing nucleotide sequence isolated from the Sargasso Sea
tatgtctgaaagaaaagtacgtgtaagatttgctccaagcccaacgggaccattacatattggtggtgtaagaacagcattatacaattacttatttgcaaaaaaaaacaaaggtgattttattcttagaatagaggataccgatcaaaccagatatgttccaggtgctgaagagtacattgtcaaagccctagaatggtctggattaactattgatgaaggccctggaattggaggagaatttggaccatacagacaatctgaaagaaaaaaaaattacaaagaatttgcagatcagttgattaaatctgagcacgcatattatgcatttgacagtgctgaagatttggttcatatgagagaaatggccaaaaaagcaaaaatgccaaattggcaatacaactccataactagaacttctatgaaaaactctttgacgctttcatctgaagaagttgaaaaaaaattggctaatggtgatccttacaccataagaattaagatgccacgtaatgaagatgtaaggttttatgatgaaataagaggatgggttattgtaaacaccaacaatatggacgataaagtgatttttaaaggggacggcatgcctacatatcacttggcaaatgtagtagacgattataaaatgaaaatttcacatgttattcgtggtgaagagtggttgccttcagctcctctacacgttttactatacaagtatttagattgggaagcgtctatgcctaaatttgcgcaccttccattaattcttaaacctgatggaaatggcaaattaagtaaaagagatggggacaggcttggatttcctgtttttccattagaatggaaagatcccaatagcggagaaatatcgtctggatacagagaaaatggatattttaatgatgcctttataaacatgctggcttttttagggtggaaccctggaaatgctaaggaactttattctattgaagagttaatccatgattttacattagaaagagttggtaaaagcggtgctaaatttgatcctgaaaaaaccaaatggttcaaccaacaacatttaagaaacaaaagcaataacgagctagccttgataatgaaggaaaatacttcttatgaagtagatgtatgttacttagaaggtgttg

SEQ ID NO: 300175 - DNA, 1249 bp, Unknown
  Bacterial polypeptide expressing nucleotide sequence isolated from the Sargasso Sea
tttgaagtggcttggtttaaactggtcagaaccagtattattccaatctgaaagaagtcctatatataaggaagaaatacaaaaattacttgataatggtggtgcctatagatgttttcttacaaaagaagaattagaacttgcccgagataaagcaaaaaaagatggtggggaatttcgagttccaaaaacatatagaaataaatctttagatgaacagaaatctctattaaatgctgggcaatcttttacaataaggttaaaaatacctactaaaggaagtacatcttttgtagataaagtatatggaaaaattaagattgataataaagaaatagatgatttcattatagtgcgatctgacggtactccaacttataattttacagtagtagttgatgataatgatatgagtattaatcatgttattagaggagaagatcatatttctaatacaccaaagcaaattttaatatataatgcccttaattatacagttccaaattttgctcatttacctatgatacttggtcctgataaaaaacgtctgagtaaacgtcatggggctgcaggtatcgaagattttaaaatccaaggatattcagttgatgcacttcttaactatattgttatgttaggatggaatcctggttcagaagatgaattattttctttagacgatatgatttcaaaatttgatataaataaaatacagaaaaaaggtgctgtctatgatgaaaaaaaacttcattgggtagcagggcagcatatgcttatgaagtctgaaaaaagtttattgcatgagatacgtaaggaaaatcctaattggcaaaagcactctaaagattcttatatttgcaatgtattagctttaatgaaaataagagctaaaacactaatagaattaaaagatgcatgtatttattttttttctgatccagagaaatatgatgaaaaagcaatcttaaaacgttggaaagataaatctgttaataaattaattattaattttatcaatcgattagaagaacttactagctggtcacaaatggaaatagatcaagctcttcgagatacttctcaagatatggcagtatcagctgcaaaattaattcacccagttcgtttagcagtatcaggaagatcgtatggccctggtttgtttgaattacttgagttattaggtaaaatgactacactcagaagattaaaaaaagcaataacaatttttccattaaaaaatgtctga

SEQ ID NO: 300176 - DNA, 928 bp, Unknown
  Bacterial polypeptide expressing nucleotide sequence isolated from the Sargasso Sea
catcgagagttctcaagtcgaagaccaggtaatcctgaaaagcgatggattcccaacctatcatctggctgtggtggttgatgatcattcgatgcagatcagtcatgttgtcagaggagaggaatggcttccttcttttcccaaacaccttttgctttaccgctattttggttgggacccgcctgaattcatccaccttcctttgatcctaaacgaggaacgggcaaaactcagcaaacgccatggtgcagtttccgtagaagaattctgcgacagaggttacctgcctcaggcattgctgaatttcattgccctactgggttggaatcccggtgatgaccgggaggttttgagtctggaggaaatggtggatgaattccgttttgagagggtgtccaagtcgggagcagtttttgaccgtgaaaaactgaattggatgaatcagcaatacctgctgaagttgccggaagaggaatatttcagaatgattgatcatgtgatcccgaaaggggattaccatgatcaggatccgggaaaaatcaggcaggctgcagaaatcctaaaaactcgcttagtgaccctttcggacctaaaccagaaattaggacttttttttgaagaaaatcctgaaatcaaagatcttcaggcgattgaggttttgaaagaagacaattcaaagacggtcttgaaagagttcctccaacaagcggaaactctagatcaattgacttcggaaaatcttgggcaattggtgaaatcggtgcaaaaaaccacagggatcaagggtcgtggtctctggatgccgcttcgttgtgccattacccgagaggtcagtggcccagaattacctgcgatgctctattttttcggaggagaaaaatgtctccacctgattcgccagactctggagaatccttccctcaattaa

SEQ ID NO: 300177 - DNA, 1237 bp, Unknown
  Bacterial polypeptide expressing nucleotide sequence isolated from the Sargasso Sea
aaaaaacaaaattataaaatcattaaagtggataggaattgaacatgatggagaagaatatattcaatcacaaaaaatagaagatcacattaaaattgctaatgaattattacaaaaagggaatgcatataaatgttactgctctgctgaagagatagaagaacaaaaaaaaagagcaagacaaaaaaaattaccttatatttataatagacaatggagagatgctgatgaaaaagacgcgcctaaaggtgttaaacctgtaataagatttaaaagtaaaatagaaggaaattctaaacttaaagatttggttcaaggagatttggaaattgaaaataatacaatagaggactttataattttaagaaatgatggaacgccaacttacaacttgtctgcgtctgttgacgatcatcaaatgggaatgactcacattataagaggagatgatcataagataaatacttttaaacaaatacaaatataccaagcaatgggttgggatgttccagaatatgcacatattccattaattcatactattgaaggtaaaaagctttcgaaaagagataatgcctcaactttggatgattactcaaaaataggcataatgcctgatgctttaagaaattatctacttcgacttggatggtcatatcaagataaagaaatattttctttagaagagagcattaagcactttaatttagaaggcattggtaaatctccatcaaaactagatataagcagaatattatcaatgaatgagcactatataaaaacaatcgatgagaacgatctttatcaatatctagttgaatattgtaaaatctataaagaagagattcaaaatgacaaagaaacaaaagttaaaacctcattatcatttttaaaaaataaggctaaaaccttagaagacatttataataatgcaagatttatcctaaatgacaaagttaactttaatgaggatgatgttaaattaattgatcataaagctaaaaagattatttcagaatttatcaaagagttatcatctataacaaatataaatagggaaaatttagaacctttagtgaataatttaataaaaacaaatgatacaaatttcaaaggagttggtcagcctttacggattgcattaacaggatcaaaatttggtccaggtttatatgatataattatggctttaggaaaaaaagatgttttgaagagactagctaagataattccttaa

SEQ ID NO: 300178 - DNA, 1018 bp, Unknown
  Bacterial polypeptide expressing nucleotide sequence isolated from the Sargasso Sea
catgagagaaagagcacggtttgcaccaagccctacaggcccgcttcacataggaggcgttaggactgctcttttcaactatctaattgccaaaaagggggggggtgattttattcttaggatagaggacactgatagcgaaagaactgtagatggggcggaggaatacattatagaaagccttaaatggctaggactagttccagatgaaaagccctataagcaaagcgaaagaaagggtctttatttgaaatgggtagaggttttgttagaaaaaggcttggcttaccattgttttgacactcagcaagagcttaaagaggctagggaaaaacatggaagtgattttaaatacagacacgataaaaatctcggtctaaaaaacacatttacaataaataaagaagaggctcgcgggttaattgaaaagggagggtttgttgtaagaatggtgattcccaaaaacgaaacaattcttgtgaatgatgaaatacgaggcaagctctcttttaaatctaatgatttggaagataaaataattttaaaatccgacaaaatgccaacctaccatttggctaatgttgttgacgacaacgacatgaaaataacatctgttgttaggggggaggagtggctttcatctcttccttttcacgttttgttatataggtattttggttggtctccgccaaagttttttcatcttcctctaatccttaaaacagctggacaagggaaattatcaaaaagggacgccgagaaacaggggtttccagtttttcctataaggtggaaagattctgttggctttaaagaacatgggtttttgccggaggggcttattaactatttggctcttctgggctggagcaatgaaagcgataaagaaatgtatactcttgaagaattaattgtgagctttgacagcagtaggattcaaaaatctggagcacgctttgacattcaaaaagctacctggataaaccacctacacctacaaggctcttcctcaaaaaaa

SEQ ID NO: 300179 - DNA, 831 bp, Unknown
  Bacterial polypeptide expressing nucleotide sequence isolated from the Sargasso Sea
catggttaaaactcgatttgccccaagcccaagcggataccttcacattggaggtgtcaggaccgctctatatgcatggctatatgccagaaatcaaggcggaaagtttctgcttcgaattgaggatacagatatagaaagatcttctgaagagtcgaaattatcaattcttgagggaatgaaatggcttggcttagatcatgatgaggaaatcattcatcagtctgaaagatttgagatttataaaaagagagccgatgaattgatatctgcagggaaggcatatgaatcagaaggcgccattcgttttaaagccgatcgctcatcaaatgtcataatttcagatcatgtgtttggtgatgttgaagtcaatgctgatgaaatggatgattttatcatcatgcgctctaacggggctccgacatatcattttgctgtagtgattgatgattttgaatcagggattactcatgtcatgagaggcgatgatcatcttaagaacaccgcaaggcatattcagcttatgaaggcttttgattacccaattcctgattttgttcatcttccaatgatcttaggacccgacggttcaagactctcaaaaaggcatggcgccatgaatgttcttcaatacagagatgatggcttctcatcagaggctttgcttaactatttagttagacttggttggtctaagggtgaccaggagatattcagcattcaggagatgattgatggatttgatcttgttggcatcaataaagccagtgcaaaatttgatatcgaaaagctgcgttgggtcaatcagcagcatctactcaatagcgatga

SEQ ID NO: 300180 - DNA, 505 bp, Unknown
  Bacterial polypeptide expressing nucleotide sequence isolated from the Sargasso Sea
aatgtcttttaattgtaggtttgcgccctctcctactgggcctcttcatattggcggtgttcgaacagctttattcaattggcttttagcaaaaaaaaacaaaggtaaatattttctaagaattgaagatactgataaagaaagatctaaagacgaattcaaaaaacaaattattgcatctttagcttggcttggaattgaacatgatggagatgaatatattcaatctaaaaatatatctaaacacgttgcagttgcagaggaactgttaaaaaaaggttttgcctacaaatgttattgttctgaagaagaaattaatgaacaaaaagaaaaatgcaaaaaacaaggaatgccatatgtttataatagaaaatggagagatgccaaagatttaaaaattccagaaggagtaaaaccagtattaagatttaaaagtaaaatatcaggaaatacgattataaaagatttagttcagggggatagaaatatttcaaattctactatt

SEQ ID NO: 300181 - DNA, 1284 bp, Unknown
  Bacterial polypeptide expressing nucleotide sequence isolated from the Sargasso Sea
tttatctaagaatagaagatacagataaagaaagatctaaagatgagtttaaaaaacaaataattgaatctctgtcatgggttggaataaagcatgacgataaagaatttattcaatccaaaaatattaataaacataaagaaattgctgagaaactcttaaaaaaagattttgcttataaatgttattgttctgaggaagaaattaaagagcaaaaagaaaaatgtaaaaagcaaggtatcccatatgtttataataggaaatggagagactctaaagatcttaaaataccaaaagatgtaaaaccagttatcaggtttaaaagtaaagtttcaggaaatactgtaattaaagatttagttcaaggtgacattaatatatcaaattcgattattgaggattttgttatattaagacaagacggatctccaacttatcagttgtccgcaacagttgatgatcattcaatgaaaatttcacatgtgattagaggtgacgatcataagattaatacatttaaacaaaaacaaatttatgaagctatgaaatgggatattcctctatttgcgcacatacctttaattcatagcgaaaaaggatctaaactttcgaaaagggataaatcctcaactattgatgactatgttaaagttggaattttacccgatgcactaagaaattacttattacgactaggttgggcgcataaagataaggaaatcttttctttagatgaaagcattaaactttttgacctaaaaggtgttggaaaatctccatcaaaacttgatatgtctagaatactttcacttaatgaacattatattaaaaacatagatgaaaaaattctttttgattttttgaagagttatgctcaaaggtataaaaaaactattgatccatctaaagaagacgttgtttttaagtctttaaatttcttaaaaaataaggctaaaactctcaatgatatttatcaaaattctcaatacatactaagcaaagaaataagtatttccgatgaagatttaaagcttttggatgcaaattctaagaaaattattaatgatttccttaatgaatttaaaaatattaataacccaaacaaagaaagtgttgaaaaattaattaacagtttaatcagtaaatacaaaactaactttaaaggtgttggtcaaccactaagaattgctttggttggttcaagatttggccctggtatttataatatcatcctatcgctcacaaaagatgaagtcgtaaaaagaatttctaaaattaattaaa

SEQ ID NO: 300182 - DNA, 1342 bp, Unknown
  Bacterial polypeptide expressing nucleotide sequence isolated from the Sargasso Sea
attgcatattggaggagtaagaacagcgctttttaattatgtttatgcaaaacagaaagatggattatttcttataagaattgaggatactgacagagagcgttcaaccaaagaatatgaaaaagatattctcgataatttatcgtcaattggactatcgccagatcaaaaacctataaatcaatcagaaagaagtgagatatacacaaaagctgcagaaaaaattattgaatcaggtaatgcatactggtgtgattgtaccccagaagaattagataaaatgcgaaatgagcaaactgctgctgggattaaacctatgtatgatggaagaagtagaaatctaggcttggaacgttcagaaaaaacagtattgaggctggccacacctgaggatggagatatcatagttaatgacattattagaggcgaaataaaatttaataataatgagctcgatgatcttatcttgttgagaagtgatgggacaccaacgtatcatttatgtaatgttgtagatgattatgaacaaaaagtaaccactgttattagaggtgaagatcacatcagcaatacaccaagacaaattcacattcaaaatgcacttggatatccagaacttgaatatgctcatttacctttagtactaggaacagataaaaaaaggttatcaaaaagaaatgctgcaacaagtctggaagaatatcgtgaaaaaggctatttagattctgcaattttaaatacattggctagactcggctggtcaaaaggagataaggagatattttatttagatgatctcattaaagattttgatattaaagaagttcaaaaagctggtgcaatttttgatatttctaaactggattggttaaattctcaacatcttgcaaatctatcattagaagattttaaaaatcaattagaaccttttttagataaattaaatatcaatatcaatgaccatcatgatgtagatttattaattcagtctatgagaacttctgataatacttattcaggaatagcagagtccttaattccatattatcgagaaatagaaacttatgatgaaaaggcaataactaagttcatcaaagataaatcaacactcaatagtctaaaagatatttttgtaaatattgataattgggacgaaaattctattgatattgttttaaaggaatttcaaacacaaaatgaattatcagtaccatctgtaaaccaaccaatcagaattgctcttacaggttcgactaaatcaccttctttagggctaactttagctatatttggtagagaaaaatcaattgagagagtcaatcatttattagattacttataa

SEQ ID NO: 300183 - DNA, 1390 bp, Unknown
  Bacterial polypeptide expressing nucleotide sequence isolated from the Sargasso Sea
ggtggcttacgaactgcactattttgctggctttacgcacgtaaaaacggtggaaaattcatctttcgtttagaagacacagaccagaaaagaatttttgaaggggctgaaaataaattagccactacgttggaatggtcaggcattgaaattgatgaaggtccacaatatggaggtaaacatggaccttaccgacaatctgagcgccttgacatttacgggaaatttacaagtttacttcttgaagaggggaatgcatacagatgcttttgcacatcagaacgtcttgaaaaattaagaaacgaacaacgcaaaaaaggttataatcctcgttatgatggattttgcagaaatattcccaaactagaagcatcgcgacgagttgaatcaggtgaagattacgttgtaagaatgaaaatcccagaagttcctgaaactatggtacttaatgatttaatacgtggaattgtttccattgacaccagtcagtcagaagatcaagtcatagttaaaagtgatggattccctacatatcacttagcagtggttattgacgactatttgatgaaaataacccatgtagtgcggggtgaagagtggatatcatcatttccaaaacatcttttgctttaccgatattttggatgggatccaccgcaatttgctcacctacctttaatattaaatcctgatcgaacaaaactcagcaaacgccagggagatgttgctgtagaagacttcaggaataatggatatcttccagaatcattactgaattttgtagccatgcttggctggtctcctcgagaggacaaggaattgtttactatcccagaacttatcagagaattcagcttggaacgggtaaacaaatccggagcaatatttgaccaagaaaaacttaaatggatgaatcaacagtatattcaaaaactcgaattggatgatttacaggatcgtttgaatccttttattaaaaaaagtcgatattccgggaaagatcctaaaattctcaggaagattataaaaattcttcaaccccgcctagtaacactttcagaaatagaagaccgtcttccattattttttgaaaacaatcctaaagcttcaaatccaaaagttttaaaagtattaggagaggaaaaatcaaaacaagtccttactaattttttaaaacaagcagaatcatttgaaaaacttaccaaaaataatcttgttgagctgatgaaaaaagttcaaaatgagacaaaaattaaaggtaaaaacctgtggatacctttgagatacgcaattactctcgatactgaaggtcctgatttaaatcttatagttgacttctttggtaaagagaaatgtatgcatctagcacgaagtgctttgaaattttgaa

SEQ ID NO: 300184 - DNA, 1009 bp, Unknown
  Bacterial polypeptide expressing nucleotide sequence isolated from the Sargasso Sea
aatgaaaaaagtagcaacaagatttgctccgtcccctactggacctttgcatataggtggtgtgagaactgcattatttaattggttatattctaaaaatcaaaaaggtaatttttatttaagagtagaagatactgataaagagagatcaaaagatgaatataaagatcaaattattaaatctctaaaatggattggcattaactatgatggggaagaatatatacaatcaaaaaaaattgaagatcacataaaggttgcaaatgaattacttgaaaatggtcatgcatataaatgttattgctcaagtgaagaaatagaagagcaaaaaaaaagggcaagacaaaaaaaaattccctatatttataatagaaagtggagagataaaaaggaagaagatgcacctaaagatatcaagccagtaattcgattcaaaagtaaaatagatggaaattctatactaaaagatttagttcaaggtgatgttgaaattgacaataataccattgaggattttgtcattttaagaaatgacggaacacctacatataacctatcagcatcggttgatgatcatcaaatgaatatgacacacattataagaggtgatgaccataaaataaatacttttaaacaaatacaaatttaccaagctatgaagtgggatttaccttcttttgctcacatacctttgattcacacaattgaaggaaagaaattatcaaagagagacaaggcatctacgttggatgattattctaaaatcggtattatgcctgatgctcttagaaactatcttctaagattaggatggtcttataaagataaagaaatattcactttagatgaaagtattgagcattttaatctcgaaggaattggtaaatctccatcaaagctagacatgagtagaattttatcgatgaacgagcactatataaagaatatcgatgaaaatgatttattcgatcaactaattgaatatagtaagttatataaaagtgaaatt

SEQ ID NO: 300185 - DNA, 229 bp, Unknown
  Bacterial polypeptide expressing nucleotide sequence isolated from the Sargasso Sea
atgaataaatcatctgtaagaacaagatttgcacctagccctactggctacctacatattggtggagcaaggacggcattatttgcttggttatttgcaaagtctcatgagggcgattgcttattaagaattgaagatactgataaagaaagatctaaagaggagtataccgaagagattattcgtagttttgagtggttaggtatcgaattcgatgaagatgttgttt

SEQ ID NO: 300186 - DNA, 520 bp, Unknown
  Bacterial polypeptide expressing nucleotide sequence isolated from the Sargasso Sea
aatgcaacgtaattctgtaaaagtaagattcgctcctagcccaacaggtgaattgcatttaggtggtgcaagaactgcactatttaattggttgtatgcaaaaaaatgccaaggatctttttttcttaggatagaagatacagataaggagcgatctagtgacatctatacagatcaaattatcgaatctttaaagtggcttggattacattgggatgatccgattatttatcaatctggtaggattgatcgttacaaattttatttgaacagattattagaagaaaataaagcatatcgttgtttttgttcaaaagatgacctcaataaatcaaaaaatgatgaatatttttcctacccgggaacctgcagaaatctatccagtgaagatataaaatcaaaattaaatcagggtatttcttttgctatccgtataaaaattgatgaaggtaaaacagaatttaatgatctaatttatggagagattaaagtcgatcataaagagctagatgattttatc

SEQ ID NO: 300187 - DNA, 1399 bp, Unknown
  Bacterial polypeptide expressing nucleotide sequence isolated from the Sargasso Sea
gatgtctaaagtagcaacacgttttgcgccatctcctactggagctcttcacattggtggagttagaactgccttatttaattggttgttctctaaaaatcagaaaggaacttttcatctaaggattgaagatactgataaagaaagatccaaagaggaacataaaattcaaattattaattcattaaagtggataggaattgaacatgatggtgaggagtatattcaatcacaaaaaatagaagatcacattaaaattgctaatgaattattaaaaaaaggcaatgcatataaatgttattgctctgctgaagagatagaggaacaaaaaaaaagagctaggcaaaaaaagatgccatatatttataatagaaaatggagagatgctgatgaaaaagatgctcctaaagatattaaacccgtaattagatttaaaagtaaaatagagggaaattctaaacttaaagatctagttcaaggagatgttgaaattgaaaataatactatagaagattttataattttaagaaacgatggaacaccaacttataatctttctgcaactgttgacgatcatcaaatgggaatgacacatataattagaggagatgatcataagataaatacttttaaacaaatacaaatatatcaagcaatgggttggaatgttccagagtttgcgcatattccattaattcatactattgaaggtaaaaaactttcaaaaagagataatgcctcaactttggatgattactcaaaaataggcataatgcctgatgctttaagaaattatctactcagacttggatggtcatatcaagacaaagaaatatttactctggatgagagcattgaattctttaatttagaaggtattggcaaatcaccctcaaagctagatatgagcagaatattatcgatgaatgagcactatataaaaacaatcgatgagaacgatctttatcaaaatctatttgaatattgcaaaatttacaaaaaagaaattaaaaatgacaaagaaacaaaagttaaatcctcattatcatttttaaaaaataaagctaaaaccttagaagacatttacaataattcaaaattcatcatcaatgatgaagttaacttcaatcaggatgatttaaaattgattgatgataaagcaaaaaaaattatttcagaatttattaaagaattgtcaattatatcaaatataaataaggagagcttagagcctgtagtaaataatttgattaaaacaaatgatacaaattttaaaggagttggtcagcctttaaggattggtttaacaggatcaaaatttggtccaggtttatatgatatagttatagctctcggcaaagaagaagttttaaaaagactaactaagataatttcttaa

SEQ ID NO: 300188 - DNA, 831 bp, Unknown
  Bacterial polypeptide expressing nucleotide sequence isolated from the Sargasso Sea
gatgtctaaagtagcaacacgttttgctccatcccctactggagctctgcatatcggaggggttagaactgccttatttaattggttgttctctaaaaatcaaaagggaacttttcatctaagaattgaagatacagacaaagaaagatcaaaagaggaacacaaaatacaaattattaaatcattaaagtggatagggattgagcatgatggtgaagaatatattcagtcacaaaaaatggaaaatcatattaaaattgctaatgaattattaaaaaaaggcaacgcatataaatgctactgctctgctgaagagatagaggaacaaaaaaaaagagctaggcaaaaaaagatgccatatatttataatagaaaatggagagatgctgatgaaaaagatactcctaaagatattaaacccgtaattagatttaaaagtaaaatagagggaaattctaaacttaacgatttagtacaaggaaatgttgaaattgaaaataatacaatagaagattttataattttaagaaacgatggaacaccaacctataatctttctgcaactgttgacgatcatcaaatgggaatgacacatataattagaggagatgatcataagataaatacttttaaacaaatacaaatataccaagcaatgggttgggatgttccagaatttgcacatattccactaattcatactatagaaggtaaaaaactatcaaaaagagataatgcctctactttggatgattactcaaaaataggaataatgcctgatgcattaagaaattatttacttagattaggatggtcatataaagataaaga

SEQ ID NO: 300189 - DNA, 1303 bp, Unknown
  Bacterial polypeptide expressing nucleotide sequence isolated from the Sargasso Sea
atgattattacaagatttgcaccatctcccactggttttttacatattggtggagttagaaccgcattatttaattggctttatgcaaaaaataattcgggaaagtttttattaagaattgaggatactgacagagaaaggtctagtaatgaagcaattgatagaattatcgatggattaaaatggcttggtttagaaaatgatggtgaaatagtttaccagcacaaaaacgagaagcgacatattgaagttgcacatatgctgttagaatctggttttgcatatagagattgggagctagaagatgattttgataatctagaaaaagctcatgccattagattcaaaatacctgatgatggagaaactattataaatgataaagttcaaggagatgttacatttcaaaataaagagattgaagattttgttttattgagatcagatggaacaccaacatacatgctttcagtagtagttgatgattatgatatgaatatcagtgacatcattaggggtgatgaccatcttatcaacgcagcaaaacaaaaattattatatgattcgcttaaatgggattgtccaactttctcccatatacctttaattcatggacaagatggatcaaaattatctaagagacatggctctttaggtattgaacattatatagaagaaggatatttacctgaggcaataattaactatcttcttagattaggttggagtcatggagatcaagaaattttcagtttagaggaaatgataaattatttttcaattgaaaaaataagaaaatcaccatctaaatttaatattgaaaaactaaatgatattaattcaatatatttaaaaaacttatcacttgaaactctgataacaagaattgatagctcatatatcaatcttgataaagataaagttaaatctattagtattattatgcctgaaattttaaagcgttataaaaatataaaagatattaaaaaaaatattagctttataacaaatgaaagacctatcgaaattgatgaagatgtaacaaatttaataaacaatgaatctaaaagttatttagaaaaactatcaaaaatattgaaaaaacttgataaatgggatgctaatgagatagaaaagactattaaaaaatttttgaaagatgaagaacttaactttaaagatattggtttacctttaagagcagttttgttgggttatttatctccaatcggtataaacacaattatcgaatctcttgggaaggatgaagtgttgggaagaatagaggatataattagataat

SEQ ID NO: 300190 - DNA, 1036 bp, Unknown
  Bacterial polypeptide expressing nucleotide sequence isolated from the Sargasso Sea
tgggcagttacaccttgggggagccaggacagcattgtccaactatttatttaccaaaagtcagggtggaaaatttttagtcaggattgaggacacagatcttgaaaggtcaaaaaaagagtatacagatcaaatctgtcaatcgcttgattggcttggacttaaatgggatgatgaattggtttttcaatcacaaaacacatccaattataaatcgcatatagatactctgctcaatgacaacaaggcatatatgtgttttgcttcaaaagaggacttggatgaaattcgtaaggaatctaactcattccactacccgggtatctggagggatagagatgttagcgaaataaatagtgaaattgaaaagggtagcccttttacaattcgattaaaaacgccgcaagatggtagaacaagttttgaagaccttatctacggaaatatatctgttgaaaacaatgagattgatgattttattatagcaaggtctgatggtagccctgtatataatcttacaaatgtggtagatgataattcaatggaaatcactcatgttgttcggggagaggaccatatttctaataccccaaaacaaatacttatttatcatgctctgggatttaaagagccaatatttgcccatttaccaatgatcttaggtgaagacaagaaaagacttagtaagcgccatggagctgccggagtcaatgaatacaaaaggatgggttatcaggcagatgcacttttaaactatctggcgttattaggttggaatcctggcacggaggatgagatatttgatctggctagtttgatcgagtgttttgatatcgagaaagttcagaaaaaatcagctatctatgaccagaagaaattcaactggattagctcacagcatctgatgaaagagaatagtgataaagttcttaataggataaagagtattgatccaggatggggtgagtctaaaagccaagattctcttataaaaataattgatctaatgaagccaagatcaaaattctctttctga

SEQ ID NO: 300191 - DNA, 1381 bp, Unknown
  Bacterial polypeptide expressing nucleotide sequence isolated from the Sargasso Sea
aatgaaggtaactagatttgctccaagccctacaggcaatctgcatataggaggagttagaactgctttatttaattatgttttttcaaagcaatctggtggtttattcttaataagagttgaggatactgatagagaaagatcaaagaaggaatatgaagaagacataatatctggattagaatggcttggtatatctcccgataaaacaccgataagacaatcagaaagatcagatatttatcaaaaagctgctgataagctcattgactctggaaatgcctattggtgcgattgttccccagaagatttagaagaaatgcgtgaacagcaagccgccgatggtaaaaagccaatgtatgatggaagaagtagaaaccttggccttgaaagatcagacaaaactgttcttagattagcaacgccacttgaaggagaaacggtagtaaatgatttaatacgtggcgagataactttcaacaatagtgaattagatgatctaattctattgagaagtgatggtactcccacatatcatttctgtaatgttgtcgatgatttcgatcagggtgtaaccacagtaatccgaggggaggatcatattagcaatacaccgagacaaatccatatccagaaagcgcttggctatccagatcttgagtatgctcacttacctttggtgctaggtgaagataaaaaaaggctttcaaaaaggcatgccgcaactagcttaaatgcttataaagaaatgggatttacaaaagaaacaattataaatgccttagcattgcttggttggtcaactgaaaatgaaattttttcaattgatgaattgatcgaatcattcaagttagaaaatgttcaaaaagctgcagcggtatttgatctaaaaagatttaattgggttagttcccagcaattagcgaaactagatgaaaatagtttttttgaagtaattaaaccgttcatggaaaacgaagacatcaatgaagattatccaaactataagaagattcttcttgcaatgagaacttcaaaaacaaatttaaaagatatagctcatgcaacaaggccattcttttttgaattagatggttatgacgagaagggcgttaagaagtttcttaatgaatcccttgaaacacttaccttcgcattagaagtactttcaaaattggctgaatggaatgaaacagaactagatatggcattaataaaagttcgagattactttaatcttcctatccctaaagtaaatcaaccaatgagaatagctcttgttggctctaccgtctctccatctctggggttaacgttagagctatttggtaaagaaaagtcattagaaaggatacagaaagcaatagactttattagttag

SEQ ID NO: 300192 - DNA, 1303 bp, Unknown
  Bacterial polypeptide expressing nucleotide sequence isolated from the Sargasso Sea
aatgattatcacaagatttgcaccatccccaactggttttttgcatattggcggagtaagaaccgcgttatttaattggctttatgcaagaaataactcaggaaagtttttattaagaatagaagataccgatagagaaagatctagcaatgaggcaattgaaaaaattatcgatggtttaaaatggctaggcttagaaaatgacggagaaatagtttaccaacataaaaatgagaaaagacatattgaagtagcgcatatgttgttagaatctggttttgcctatagagattgggaactagaggatgattttggtaatctagaaaaagctcatgccattagattcaaaatacctgatgatgaagaaactatagttaatgacaaagttcaaggagatgttgtaattcaaaataaagaaattgaagattttgttttattaagatcaaatggaacaccgacatacatgctgtcagtagtagttgatgattatgatatgaatataagtgacatcatacggggtgatgatcatctcaccaatgcagcaaaacaaaaattgatatatgattctcttaaatgggattgcccaacttttagtcatattcctttaattcatgggcaagatggatcaaaactatctaaaagacatggttctctcggtattgaatattataaagaagagggctatctgcctgaagcaataattaattatcttcttaggttaggctggagtcatggagatcaagaaattttcagtttagaggaaatgataaattatttttcaattgaaaaaataagaaaatcaccatctaaattcgatattgaaaagctaaatgatattaattcaatttatttaaaaaactcctcctttgaatctctgatagctagaattgacacttcatacagtaatcttactaaggataaaattaaatccattagtattgttatgcctgaaattttaaagcgttataaaaatataaaagatattaagaagaatattagttttataacaaataaaagacctatcaaaattgataaagatgtaacaaatttaataaatggtgagtcaataagctgtttagaaaaactatcaaaaatattgaaaaaacttgataaatgggatgctaatgagatagaacagactattaaaaaatttttgaaagatgaagaacttaactttaaggatattgggttacctttgagagtagttttggtaggttttttgtctccaatcggaataaacacaattatcgaatctcttgggaaggatgaagtgttgggtagaatagaggatataattaaataa

SEQ ID NO: 300193 - DNA, 899 bp, Unknown
  Bacterial polypeptide expressing nucleotide sequence isolated from the Sargasso Sea
taatacaattgaagattttgttattttgagaaatgataattctccaacctataatttatcagcagcagtagatgattatcaaatgaaggtaactcatataataagaggtgatgatcataaaataaatacatttaaacaaatgcaaatatatcttgctatgaaatgggaacttccaaattttgcacatattccattaattcatacattagaaggaaaaaaactatctaaaagagataaagcatctactcttgatgattactctaaaattggaataatgcctgaggcactaagaaattatttactaagattaggatggtcatataaagataaggaaatatttactttagatgaaagtatcaattattttaatttagaaggaataggaaaatcaccttcaaaattagatattagccgtattttatcaatgaatgaacactatattaaaaatatgaatgagaatgatctctacaaaagactaaatgaatactgcaatcaatacaaaaaaaaaattgaatcaagtaaagaagacaaaataaaaaagtcactgatatttcttaaaaataaggcaaaaacccttgaggatatttataataattcaaaatatattttatttgatgaagttaattttgatgaaaaagatctaaaacttatagatgaaaaatcaaaaaaaattatttcagattttattattgagataactaaacaaaaagaaataagcaaaaatgtactagaaccgataattaataatttaataaaaaaacatgatactaattttaaaggtgttggtcagcccttaagaattgcactcacaggatcaaaatttggacctggaatatacgatataatgctatctttaggaaaattagatatagaaaaaagattaagtaagataatttaat

SEQ ID NO: 300194 - DNA, 1393 bp, Unknown
  Bacterial polypeptide expressing nucleotide sequence isolated from the Sargasso Sea
atgtcttttatttgtaggtttgcaccctcacccacaggacctttgcacattggtggtgttagaaccgcattgtttaattggttattagctaaaaaaaataaaggtaaattttatctcagaattgaagatacggacaaagaaagatcaaaagaagaatttaaaaagcaaattatagactctcttgcttggattggaataaagcatgatggtaaagaatatattcaatctaaaaatatcaacaaacacaaagaaattgctgaggaacttttaaaaaaaggatttgcatataaatgttattgttccgaagaagagattaaagatcaaaaagaaaaatgtaaaaaacaaggtatcccatatgtttacaataggaaatggagggatcctaaagatcttcaaatacctaaagatgtaaaaccagttatcaggtttaaaagtaaagtttcgggaaataccgtaattaaagatttggttcaaggtgacattaatatatcaaattcgattattgaggattttgttattttaagacaagacggatctccaacatatcagttgtccgcaacagttgatgatcatttaatgaaaatttcacatgttattcgaggtgacgaccacaaaattaatacatttaaacaaaaacaaatttatgaggcaatgaaatgggatattcctcaatttgcacacatacctttaattcatagtgaaaaaggatctaagctctcgaaaagggataaatcctcaactattgatgactatgttaaaattggaattttacccgatgcacttagaaattacttattaagattaggttgggcatataaagataaggaaatcttttctttagatgaaagcattaaactttttgacttaaaaggtgttggaaaatctccatcaaaacttgatatgtctagaatactttcacttaatgaacattatattaaaaacatagatgaaaaaattctttttggttttttgaagagttatgctcaaaagtataaaaaaactatcgatccatctaaagaagaagttgttattaagtccttaaatttcctaaaaaataaggccaaaactcttgatgacatttaccagaattcacaatacatactaagcaaagaaataagtatttctcctgaagatttgaagcttttagatgctaattctaagaaaattattggtgatttcctaaatgaatttaaaaacattaataatccaaacaaagaaagtattgaaaaattaattaatagtttaatcagtaaatacaaaactaactttaaaggtgttggtcaaccactaagaattgctttagtaggttcaagatttggccctggtatttataatatcgtcctatcgcttacaaaagatgaagttgtaaaaagaatttctaaaattaattaaa

SEQ ID NO: 300195 - DNA, 1003 bp, Unknown
  Bacterial polypeptide expressing nucleotide sequence isolated from the Sargasso Sea
atgctcccaaaagatataaaacctgtaattagatttaaaagtaaaatagaaggaaattcacaacttaaagatttagttcaaggagttgttgaaattgaaaataatacaattgaagacttcataattttaagaaatgatggaactccaacttacaacttatctgcaactgttgacgatcatcaaatgggaatgactcacataattagaggtgatgatcataagataaacacctttaaacaaatacaaatataccaagcaatgaattgggatgttccagaatttgcccatattccattaattcatactattgaaggtaaaaagctttcaaaaagagataatgcctcaactttggatgattactcaaaaattggcataatgcctgatgcattaagaaattatttacttagactaggatggtcgtatcaagataaagaaatatttactctaaaagagagcattgaacactttaatttagaaggtattggtaaatcgccatcaaaactagatatgagcagaatattatcaatgaatgagcactacataaaaacaatcgatgagaatgatctttatcgatgtttaaatgaatattgcaaaatctataaagaggatattcaagatgataaagaaacaaaagttaaatcctcattatcatttttaaaaaataaggctaaaaccttagaagacatttataataattcaaaattcctcatcaatgatgaagttaactttaatgaagatgatattaaattaatagattataaagctaaaaaaattatttcagaatttattaacgaattatcatctatatcaaatataaatagggataatttagagcctgtagtaaataatttaataaaaataaatgatacaaattttaaaggagtcggtcagcctataagaattgctttaacaggatcaaaatttggtcctggattatatgatatagttatggctcttgataaagaagaagttttaaagaggctaactaagataatttcttaaa

SEQ ID NO: 300196 - DNA, 1354 bp, Unknown
  Bacterial polypeptide expressing nucleotide sequence isolated from the Sargasso Sea
catattggtggcattagaactgctctgtttaattggttatactcaaaaaataaaggtgggtctttttttttaagaattgaagatactgataaagaaaggtcaaaagatgagtacaaagatcaaattataaaatcacttagatggattggtattgaaaacgatggagacgaatatatacaatcaaaaaaaattaatgatcatataaatgttgcaaacgaattactgaaaaatggacatgcatataaatgttattgttcttcggaagaaatagaggaacaaaaaaaaagagcaaaacaaaaaaaaattccttatatttacgatagaaaatggagagacaaaaaagaaaccgatgctccaaaagatattaaaccagtaataagattcaaaagtaaaattgatggaactacagtattaaaagatttagttcaagggagtattgaaattgacaataatacaattgaagattttataatactgagaaatgatggatctccaacatataacttgtcagcatcagttgacgatcatcaaatgaagatgacacacattattagaggtgatgaccataaaataaataccttcaaacaaatacaaatttatcaagctatgaaatgggaactaccttcatttgctcatatacccttgatacacacaattgagggaaaaaaattatcaaagagagataaggcatctacgctagatgattattcaaaaattggtattatgccggatgctcttagaaattatcttcttagattaggatggtcttataaagataaagaaattttcactttagatgaaagtattaaacattttaatctcgaaggaattggtaaatctccctcaaaactagatatgagtagaattttatcgatgaatgagtactacattaagaatatcgatgaaaataatttatttgatcaattaattgattattgcaaattatataagagtgaaattaagtcagataagaaagataagattaaaaaatccctaatcttcttaaaaaataaagctaaaacattagaagatatatttaataatggtcaatatataatgatagaggaggttaattttaaccaggatgattttaaattaatagacaataaagcaaagaaagtcatttcagatttcaattctcgattagctgatgttgataatcttaataaagaaacgttggagccactagtaaacgaattaattaaatcaaacgataccaattttaaagggattgggcagcctttgagaatagctttgacagggtcaaaatttggtcctggaatatatgatataattgcttctctaggaaaagaagaagtgtcaaaaagattaactaataagaaactttgttaat

SEQ ID NO: 300197 - DNA, 553 bp, Unknown
  Bacterial polypeptide expressing nucleotide sequence isolated from the Sargasso Sea
gatgaaaatagtagcaactagatttgctccatcaccaaccggacctttacacattggaggagtaagaacagcattattcaattggctttattcaaaaaataaaggtggtaaattttatctaagaatagaggataccgataaagaaaggtctaaaaaagaattcaaaaatcaaataattaattcattaaaatggataggaattaattacgaagataatgaatatattcaatcagataaaataaatgatcatataaatgtagctaatgaattattaaaaaaaggttttgcatatagatgttattgttctagtgatgaaattgaagaacaaaaaaaaagggcaaaacaaaaaaaaataccatatatttataatagaaaatggagagataagagtgagtcagatgctccgaaaggaattgaacctgtaataagatttaaaagtaaagtagaaggaaaaactatcttaaaggatttggtacagggaaatatagatatagaaaataatactattgaagactttattatattaagagcagatggatcaccctacatataa

SEQ ID NO: 300198 - DNA, 532 bp, Unknown
  Bacterial polypeptide expressing nucleotide sequence isolated from the Sargasso Sea
aatgaaaaaagtagcaactagatttgctccttctcctaccggtcctcttcatattggtggggtaagaacagctctatttaattggttatattcaaaaaataaatcgggtaaattttatttaaggatagaagatactgataaggaaagatccaaagaagaacataaaattcaaataattaattctttaaaatggatgggaattgaacatgatggtgaagagtatattcaatcaaaaatgattggtgaacacataaatattgctaaaaagttgttagaaaatggaaatgcatataaatgttattgtagtgcagaggaaatagaggaacaaaagaaaagagctaaacaaaaaaaaattccttatgtgtataatcgaaaatggcgtgatatttctgaagatcaagccccaagtgatattaagcctgttataagatttaaaagtaaaatagaaggcacttctctgttaaaagacttatttcaagggaacgtggagattgaaataatactattgaggatttattattttaagaaatga

SEQ ID NO: 300199 - DNA, 308 bp, Unknown
  Bacterial polypeptide expressing nucleotide sequence isolated from the Sargasso Sea
aatgtcaaaagtagcaacaagatttgctccatcgcccacaggtccgttacatattggaggaataagaacggcattatttaattggctttattcaaaaaatcagaaaggatctttttttttaagaattgaagatacagataaagaaagatcaaaagttgagtataaaaatcagattatacaatctcttaaatggataggtattcaaaatgatggaaatgaatacatacaatctaaaaaagaaaacgatcatattaaagtagctaacgaattactaaaaaatggtcatgcttataaatgttatgttcaaa

SEQ ID NO: 300200 - DNA, 442 bp, Unknown
  Bacterial polypeptide expressing nucleotide sequence isolated from the Sargasso Sea
atggcttttatttgtaggtttgcaccttcacccacaggacctttgcacattggtggtgttagaacagctttatttaattggttattagcaagaaaaaataaaggaaaattttatctaagaatagaagatacagataaagaacgatcaaaagatgagtttaaaaaacaaataattgaatctttgtcatgggtaggaataaaacatgacgatcaagaatttattcaatctaaaaatattaataagcataaagaaattgctgaggaacttttaaaaaaaggttttgcctataaatgctattgttcagaggaagaaataaaagaacaaaaagaaaaatgtaaaaagcaaggtatcccatatgtttataatagaaaatggagggatcctaaagatcttcaaatacctaaagacataaaaccagttatcagatttaaaagtaaagttt

SEQ ID NO: 300201 - DNA, 1402 bp, Unknown
  Bacterial polypeptide expressing nucleotide sequence isolated from the Sargasso Sea
gatgtcaaaagtagcaactcgttttgctccctcacctaccggagctcttcatattggaggtgtaagaacagctttatttaattggctttactcaaaaaatcaaaaaggcacttttcatctaagaattgaagatactgataaggaaagatctaaagatgagtataaagttcagattataaattctttaaagtggattggaatagaacatgatggaaatgaatatattcaatcaacaaaaatagatgatcatatccaaatagcaaatgaattattgaaaaatggtaacgcttataaatgttattgctctaatgaagaaatagaagaacaaaaaaaaagagctagacaaaaaaaattaccttatatctataatagaaagtggagagatgcagatgaaaaagatattcctaaagatattaatccagtaattagatttaaaagtaaaattaaaggaagttctgtattaaaagacttggtgcaaggtgatgtagagattgaaaataatacaattgaggattttattatattaagaaatgacggaactcctacatataacctttcagcaaccgtggacgaccatcaaatgggaatgacacacattattagaggtgatgatcataaaataaataccttcaagcaaatacaaatatatctagctatgggttgggaggtaccaaattttgctcatataccattaatccatacaattgaaggcaaaaaattatctaaaagagataatgcttctacgttagatgattactcaaaaattggaattataccagatgctttaagaaactacttgttaagattgggctggtcttatcaagataaagaaatattcactttagatgacagcattaaatactttaatttagaaggaattggaaaatcaccttcaaaacttgatatgagccgtattttatcaatgaacgaacactacattaaaactattgatgaacaggagcttttcaaaagcttgatggaatattgtgagatttacaaagaaaaaattaaacctgaaaaagaggaaaaaataaaaaattcactttcatttttgaaaaataaggcaaaaacattagaagatatattcaacaacgcaaaattcataatcctagataaaataaattttaatccagatgatcttaagttaattgatgataaagcaaaaaaaataattcaagaatttaaatctgagatttcttcgttaaataaattaaacagagaagtattggagcctatagtgaataatttaataaaaaaacatgaaactaactttaaaggtgtaggacagcctctaagagtaattttaacagggtctaaatttggaccaggcctctatgatattttaatttctttaggcaaagaagaagtagatcaaagattaggaaacaagataattggatag

SEQ ID NO: 300202 - DNA, 862 bp, Unknown
  Bacterial polypeptide expressing nucleotide sequence isolated from the Sargasso Sea
tatcatctagctgttgtaattgacgatcatgaatcgggtattactcacgtgatgagaggcgatgatcatcttaaaaataccgcaaggcatattcagcttatgaatgcttttaattatccgattcctcaatttgttcatttaccaatgattttaggatcggatggatcaagactctcaaaaaggcatggtgccatgaatgttcttcattatagagatgagggcttctcacccgaggctttacttaattatttggtaagacttggctggtctaagggtgaccaggagatattcagtattaaggacatgactgatggatttgatctttcaggcatcaataaagctagtgctaaatttgatattgaaaaactccgttgggtcaatcaacaacatatactaaatactgataatagtgaattgaagatgatgttagaagttggatctgatacagctaaagggctcaatgatgaggtcatcacaaactttatcaatgcttataagaatagggtaagcaccatcaatgatttggtgtctagttgtgacagtcttttctcagatgaaattaaatatgatcaagcctcagctgataagtttctgaaaaaagcgatcctctctccttttaaagatgttattgatgctctaaagaggtctgaatggaatcaagaatctatttcagagacactgaagtcagtatgtgaaaaacatgaaataggattcggaaagattggtcaaccgattagaattgctgtaacaggaggtacccaatcaccacctatagatcaaacgttaattttgttggatcagtcagtagtagttgataggattgaggcagcaataaaatatatagaagaaaatttcaattagg

SEQ ID NO: 300203 - DNA, 1450 bp, Unknown
  Bacterial polypeptide expressing nucleotide sequence isolated from the Sargasso Sea
atgatagaaagagctagatttgctccaagcccaacaggacctcttcacattgggggtgtaagaacagccctatttaattatctaatagcaaaaaagagtgggggtaaatttattttaagaattgaggacacagattcaaaaagatcggttgcgggtgcagaggatcatattaaagattctttaaagtggcttggtttaaatattgatgagggaccaataaaacaaagtgaaagaagaattttgtacaagaaacgagttgatgagcttcttaaaaaaggtttagcttattatgcgtttgactcttctactgaacttgaaagagcaagaaaagagtcaaatggtgagtttaagtataaccatgagacaaggaagaatatgattaattctttcaccgtttcagaagaggaagctaggagtagaattgaaagaggcggttatgttattagaatgatagttcctgagaaaaaaacaattttagttaatgacgaaattagaggccctttgagttttaactcagatgaaattgaggataaggtaattatgaagtctgatggtatgcctacatatcattttgctaatgttgtagatgatcatgatatgaaaattacctctgttgttaggggtgaggaatggttgtcttcccttccatcacatgtaacactttataatcactttggttggtctccccctaaattttatcacctaccacttattttaaaaagtacaggtcaaggaaagttgtctaaaagagatgctgaagagcaagggcaccctgtttttgctgttcaatgggaagaatctaagggatttaaagaatcaggatatacaccggagggaatattaaactatcttgctttattggggtggaaagggaaaggtgatgatgaaaaatactctctaaatgaacttgtcaaaaaatttaacagcaaagatataaataaatcgggtgcacgatttgacataaaaaaagcagtgtggattaaccatcttcatcttcgagatttttcatcaaaaaaaattctctcattatgtgaacaggctaatgtcttactagaaaaaaaatataatgctgatgtgtgtgaagaaattattgatttggttaaggaaaggcttaatactttatttgatgtagaaaaagaagtttttgtctttgttagccagccaaaaaattacgacaaagaggtaatagaaaaaattacaagaaacaccatttataatgttctaaatttttgtaaattaaataaggagttgatttcagagccctcgttgttaaaagatagtttgatgtcttttggttctgaaaagcaaatttcttttggaaacattatgaagacgttgcgtctttgtatagttggaagtttgtcgggtcctgatttatttaaaattatggatattattggccccgaagaaacactccatagaattgaaaatttaataaataaaatttaac

SEQ ID NO: 300204 - DNA, 609 bp, Unknown
  Bacterial polypeptide expressing nucleotide sequence isolated from the Sargasso Sea
aatggaagttcggaccagaatcgccccctctcctacaggcgatccacatgtaggcactgcctatatcgctctttttaattgggcgttcgcgcgcgcaaacaaaggaaaatttctcctccgcattgaggataccgatctagctcgcagtacgaagagctctgaagaagcgatctttagctccttaaaatggttaggtctcgattgggatgaaggaccagattgtggcggggatttcgggccttatcgtcagagcgagcggggtgaaatatatgcgggatatgtggatcggttgttgaaggctggccacgcgtttcgatgtttctgctcaaaagatagattagatgaattgcggacctctcaacaaaaggctggtgagaccactcgatacgatggtctgtgtcttagtttgtccaaagaggatgttgaccagaaaatagcggctggagagacgagtgtcgttcggatgaaagtgccggagactggcgagtgtgtcttcgaagatcgtttgagaggatcgatatctataggttatgaccagatcgatatgcaggttattttaaaggctgatgatatgccaacgtatcatttggcggtcgttgttgatgatca

SEQ ID NO: 300205 - DNA, 313 bp, Unknown
  Bacterial polypeptide expressing nucleotide sequence isolated from the Sargasso Sea
atgaaaattacaagattcgcacctagtccgaccggctacctacatattggtggcgtaagaactgcgttatataactggctaatcgctaagaaaactaatgggaagtttttacttagaattgaggatacggatagagaaaggtcaaaagacatcttttcaaaggatattttagattcattagcatggcttaacattgatttcaacgaatctattgtatatcaaagtaagagaactgatatttataaagatgctataagcactcttttgagctctggtaaggcgtattattgcgatatgacccaagatgaattaa

SEQ ID NO: 300206 - DNA, 1411 bp, Unknown
  Bacterial polypeptide expressing nucleotide sequence isolated from the Sargasso Sea
atgacaactaagacgcgttttgcccctagcccaacaggctttttgcacgtgggcggtgcccgtactgcactttattcttggttacaagcccgtgccaataacggtgagtttgttttacgtatcgaagatacggatattgagcgttctactcaggccgcttgtgatgccattttagagggcatgaactggttaggtctaacgtgggatgagggcccgtactatcaaactaagcgttttgatcgttataacgaaatcatcacgcaaatgttagagcagggcacagcttataaatgttattgctcgcgtgaacgtatcgatgcgttaagagaagcacaagcggcaaatggcgaagcacaaaaatacgatggttgctgccgtgacttgccggcgcgtgatactgatgagccttttgttgtacgttttaaaaaccctatcggtggttcagtcgtatttgatgaccatgttcgtggccgtatcgaattctcaaacgacgcgttagatgatctgatcattgctcgtaccgatggtgtacctacctataacttctgtgtagtggtagacgattgggatatggggattacctgtgtagtgcgtggtgaagaccatatcaacaacacgccacgccaaatcaacatccttaaagcattgggtgcacctattcctgaatacgcccacgtatcgatgatcttaggggatgatggtgccaagctgtctaagcgccatggtgcggtaagcgtgatgcaataccgtgatgatggttatctgcctgaagcactgcttaactatttagtacgtttaggttggtcacatggcgaccaagaagtgttctctttagaggaaatgaagcagtactttaagttagatgatattaacaaagccccttcagcctttaataccgaaaaactggtttggttaaaccaacactatattaagacgcttgatcctgaatatgtggcttcccacttacaatggcatatggacgatcaaaagattgatacgtcaaatggtccagctttatcagctgtagtgacagcattagctgaacgtgccaaaacgttaaaagagttagctgcatctagccgttacttctatgaggattttgcagagttcgatgccgagcaggcgaaaaagcatttacgtggtgtggcgcttgagccattacaattagtgcaacaaaagctagcggcattaccggaatggaccgttgaaggtatccaccaagcgattgaagccaccgctgctgaattagaagtaggtatgggtaaagtggggatgccattacgtgtcgctgtgaccggagcagggcagtctccaggcttagatatcaccttattcttaataggaaaggcacgctctgagcaaagaatatccaaagcgattgaatttgtagcagatagaataaattcctaaa

SEQ ID NO: 300207 - DNA, 724 bp, Unknown
  Bacterial polypeptide expressing nucleotide sequence isolated from the Sargasso Sea
tatgaaggtaaataaaaccagattttgtcccagtcctacaggtcttttgcatctaggaaatcttcgcacgtcattgtttagcttcctgatggccaaaaaaactaatgggtcctttttactgagaattgaagataccgatttagaaagatcaaagaaagaattctctgatgcaatatgtgccgatcttaaatgggtaggtttagagtgggatgaaggccctgaagcgggcggaaaagaaaagtcttactatcagtctcaaagactaaatctttatgaagagttttatgagaagcttttagatcaggatctgatttacccatgttttacaagcgaggaagaattaaaaatcatacgtagaaaccagattgcagcagggcaacccccacgttatacaggtgtttggtctcaagcttccgaagaagaagttcaagaagaattggataaaggaaataagccagtttataggtttagaatccctaaaaagagaactattagttttactgatcttgtaaaaggtgagcaatctttttcaactgacgatttagatgatttcattgttagaaaaaaagatagttctcctacttttatgtttgctaatgctatcgatgattctttgatgggagtagatcttgttctaaggggagatgatcatttaagcaatacaccaaggcaaatagccttattggagtcgctcaatctttcacttcctcgttatgctcatgtg

SEQ ID NO: 300208 - DNA, 351 bp, Unknown
  Bacterial polypeptide expressing nucleotide sequence isolated from the Sargasso Sea
gatgtcaaaagtagcaactagatttgctccttccccaacaggtccgttacatataggtgggattaggactgcattatttaattggttatacgcaaaaaataaaaacggatccttttacttaaggattgaagatacagataaagaacgatcaaaagatgagtacaaagagcaaataacaaaatctcttaagtggattggggtggaaaatgacggtgatgaatatatccaatcaaagaaaatagaagatcatataaaaattgccaacatattgttagaaaaaggttttgcatacaaatgctattgctcaacagaggaaattgaagaacaaaacttagagcaaaacaaaaaaaa

SEQ ID NO: 300209 - DNA, 268 bp, Unknown
  Bacterial polypeptide expressing nucleotide sequence isolated from the Sargasso Sea
aatgaaattaagaattgcaccatctccaacaggaaatttacatataggaaatgctagaacagcattatttaattggttatatgcaaaagctaataacggcaagttcttagtaagaatagatgatactgatacggagagaagcactgatgaatatgaaaaaaatattattgaaaatttgagatggttgggccttgattgggatgaaggcatagaagtaggagaatctaacgagacatatagacagtcttcaagattgaaagatatatga

SEQ ID NO: 300210 - DNA, 1206 bp, Unknown
  Bacterial polypeptide expressing nucleotide sequence isolated from the Sargasso Sea
gatgtcaaaagtagcaactcgatttgctccctcacctactggacctcttcatataggaggtgtaagaactgctttattcaattggctttattctaaaaatcaaaaaggtacatttcaccttagaatagaagatacagacaaagaaagatctaaagatgaacataaaattcagattattaaatccttaaaatggctaggaatagaacatgatggagatgaatatattcaatcaactaaaattaatgatcatgtaaaaattgcgaatgaattacttaaaaatggaaaggcttataaatgctattgttcaaatgatgaaattgaggaacaaaaaaaaagagccaaacaaaaaaagcttccctatgtttataatagaaaatggagagatttaaccgaagcagatgctccaaaagatataaaaccagttattagatttaaaagcaaaattgaaggaacttctatattaaatgatttagttcaaggtgatgtaaaaattgaaaataatacaattgaagactttataattttaagaaatgatggcaccccaacatataatttatctgcaacagttgatgatcatcaaatgaaaatgactcatattattagaggtgatgaccacaagattaatacatttaaacaaatacaaatatacaatgctatgaaatgggaattaccaaagttcgcacatattcctctgatccacacaattgaaggaaaaaaactatctaaaagggataatgcttcaacattagatgattattctaaaattggaatcatgcctgatgctttgagaaactatttgcttagacttggatggtcatatcaagataaagagatatttagccttgaagaaagtattaagtattttaatttagatggtattggtaaatctccgtctaagctagatatgagccgaatattatcaatgaatgaacattatattaaatctattgatgaaaatgaactatacaaaaatcttgtagaatattgtgaaacttataaagagaaaattaaacccgaaaaagaagtaaaaattaaaacatcgttgtcattccttaaaaataaagcaaaaacattagaagatatatttaataatgcaaaatatataattttagatgaagtaaattttttaaatgaggatttgaaattaatagatgaaaaaacaaaaaaaataatatcagaatttaaaagtaagctttcatctatgaa

SEQ ID NO: 300211 - DNA, 1402 bp, Unknown
  Bacterial polypeptide expressing nucleotide sequence isolated from the Sargasso Sea
aatgtctaaagtagcaacaagatttgctccatctccaactggtcctttgcatattggtggtgtgagaactgctttgtttaactggctatatgcaaaaaataaaggaggaacttttcatttaagaatagaagataccgataaagaaagatctaaagatgaatataaagatcaaatcataaattcgttaaaatggataggtattgaatgcgacggtaatgaatatatacagtccactaaaaaaaaagaacatattgatatagcgaacgaattattaaaaaaaggacatgcttataagtgctactgctcaactgaggaaatagaagagcaaaaaaaaagggcaaaacaaaaaaaaattccatatatctacgatagaaaatggcgtgataaaactgactcggaagccccaaaaaatatcaagcctgttataagatttaaaagtaaaattgatggatcaacaattttaaaagatttagttcaaggggatgttcaaattgataataataccattgaagattttgttatacttagaaatgatggaacgccaacttataatttgtcagcagcagtcgatgatcatataatgaatataacgcatataattagaggtgatgatcataaaattaatacctttaagcaaatgcaaatatatttagcgatgaaatgggaacttccattgtttgcacatattccattaatacatacagttgatggtaaaaaattatcaaaacgagataaggcttcaactttagatgattattcaaaaaagggtattatatcagatgcactaagaaattatcttcttagattaggttggtcatttaaagataaagaaatttttaatttagatgaaagtattaaatatttcaatttggagggcattggaaaatctccatcaaaactagacatgagtcgtattttgtcaatgaatgaacactatataaaaaatattgatgagaatagtctttacaatttattaaatgaatattgtcatagatataaaatagaaatcacagcggaaaaagcagaaaaaataaaaaaatcactctcttttttaaaaaataaagcaaaaactttagaagatatttataaaaatgctcaatatataatttcagatacagtaaattttaatgatgatgatctaaaattgattgatgaaacctctaaaaaaattatatcagaatttaatgggaaaatttctgaattaaatgagtttaacagagaggcattagaacatattataaatgatttaattaaatcaaataatacaaactttaaaggagtaggtcagccacttagaattgttttaacgggatctaaatttggtcctggaatatatgatataatagtttctcttggtaaaaatgaagttaaaaaaagattaggaaacaagatatttgcttag

SEQ ID NO: 300212 - DNA, 727 bp, Unknown
  Bacterial polypeptide expressing nucleotide sequence isolated from the Sargasso Sea
atgtctaaagtagcaacaagatttgctccatctccaactggccccctacacataggaggtgtaagaaccgcattatttaattggttgtttacaaaaaatcaaaaaggatctttttttttaagaattgaagatacggataaagaaagatcaaaagatgaatataaaaaacaaataatacaatctcttaaatggataggtattgaaaatgatggaaatgaatacatacaatcaaaaaaaatagatgatcatattaaagttgctaatgaattattaaaaaatggatatgcttataagtgttattgttcaaatgaagaaatagaagaacaaaaaaatagagcaaaacaaaaaaaaattccttacatttatgatagaaaatggagagataaaaatgaagctgatgcaccaaaagatataaaacctacaataagatttaaaagtaaaattaatggatctactatattaaaagatttagttcaaggagctattgaaatagagaataacactattgaagattttataatattaagaaatgatggatcacctacatataatttgtctgcttcagttgacgaccaccagatgaatattacacatataatcagaggtgatgaccataaaattaatacatttaaacaaatgcaaatttatttagctatgaaatgggaagtgccctctttcgcgcatataccattaatacatacgacagaaggtaaaaagctttctaaaa

SEQ ID NO: 300213 - DNA, 1012 bp, Unknown
  Bacterial polypeptide expressing nucleotide sequence isolated from the Sargasso Sea
atgaattctattgtaacaagatttgctccttctccaacaggaaacttgcatttagggggcataagaacagcattgcttaattatattattgtagaacaagctaaaaaaaaattaccaaattcaaaattttatttaagaattgaggatactgataaagaaagatccaaggatgaatatacgaaagatattttggcaggattagattggttgaatattaattatgattctgaaccacaaattcaatcttctaatattaaacgacatcaacagattgcaaaaaaattattagaaaataaaaaagcatttaaatgtatttgttcaaatgaaacattagataaaaaaagagagttaaataaaaaaaataaagttaataataagagattatgtgaaacatgtgaaaatgataataaagtacaatccactcaaaatgactatactgttagaataaaagttccaaatgagggagtaaacaaatttaatgatattatacaaggtgaaatttcagtaaataataaagaagtggataattttattatattaagaaaagatggaacgccaacatatatgttatctgttgttgtagatgattttgatatgggggttaattttattattagaggagatgatcatctcaataatgtatttagacaaaatttaatttataaagccatgaaatggaaagtaccacaatatgcacatattcctttaatacatggcgaagatggaaaaaaattatccaaaagacatggagccataagtataaatgaattcagaaatgaaggatatttaaaggaaagtataataaacaacttaatattacttggttggtcaccaaataagattgaaaaaaatgaatttatacaaatagatgaaataatagaatcttttgatattagtaaaatatctaaatcatcaagtatttttagttacgaaaaacttaacttttttaataatcattatattaaaagtacagataactcaaaatatcttattaaatactgtggaaataata

SEQ ID NO: 300214 - DNA, 1330 bp, Unknown
  Bacterial polypeptide expressing nucleotide sequence isolated from the Sargasso Sea
tagcttcctgatggctaaaaaaactaatgggtccttcttactgagaattgaagatactgatttagaaagatcaaagaaagaattctctaatgcaatatgtgccgatcttaaatgggtaggtttagagtgggatgaaggcccagaagttggaggagaagaaaagtcttactatcaatctcagagactagaactttaccaagaattttatgagaagcttttagatcaggatctgatttacccatgttttacaagcgaggaagaattaaaaatcatacgtagaaaccagattgcagctgggcaacccccacgttatacaggtgtttggtctcaagcttccgaagaagaagttcaaaaagaattggaaaaaggaaataagccagtttataggtttagaatccctaaaaagagaactattagttttacggatcttgtaaaaggtgagcaatctttttcaactgacgatttagatgatttcattgttagaaaaaaagatagttctcctacttttatgtttgctaatgctatcgatgattctttaatgggagtagatcttgttctaaggggagatgatcatttaagcaatacaccaaggcaaatagccttattggagtcgctcaatctttcacttcctcgttatgctcatgtgtcattatttacagggtttgatggggcaccattatctaaaagaaatggtagcctttccataagtgacttaaaagaaatgggttacttgcctatagctatctcaaattatttatccagagttggacacacaataaatgataatgacctgaagactcaaaaagaattggctgattcgttcgaaacaaaaaatatctccagttctccaagtaagttcgatttagaccagttacttttttggcaaaagaaagctgttgataatttaactattgatgagtgtgctagttggctgagtggaaatttagataacttgccgccaactgtccaagaaagaagttttatagagttgataaaagaaaatataaatttcccaaatgaagctaaagagtatgtaaataacttatttgttaatgctctaagtggagacgaagagaatttaaaaatcatacaatctgcaggccaggaattctttattttggcacttgaagtggtaaatgcaggactatctgattggaaacaaacatgtaaggatattgaagctagaactggtaaaaaaggaaaagaattatttatgccattaagggtagctataacaggacaaactagaggccctgaattggacaaagtcattgaacttataggtcttgaaagagttcttgagagattacaagaggcttcgcagatatga

SEQ ID NO: 300215 - DNA, 803 bp, Unknown
  Bacterial polypeptide expressing nucleotide sequence isolated from the Sargasso Sea
aatgacaaaaaaaaacaggttacgttttgcgccaagtccaacagggccattgcatataggtggtctaaggacagctctatttaattatctctttgcaaaaaagacgagtggtgaactggttctaaggatggaagacactgatcaggctcgtaaagtagaaaaaagtcaagagcatattgaagattcattagcttggataggaatagagtttgacgagtctagcaaaaaaggtgggcaatttggcccttataaccaaagcgaaaggaaagatatttataaagaacatgtaagcattctaattgaaaagggttgggcatactatgcttttgataaaaaagaaaagctcgactttcataggctagaccatgaaaaaaaggggaaaaaatttatttataatgctcataacaggctaaagctagacaactcgctgtctatggataaaaaagatgttgaagaaagaatacaaaaagaggattatgttgttcgatttaaaacaccatcggaaacaggcgttgtttttaatgacattattaggggacagattctagtaagtactagagacgttgatgataagattctttttaaatcagatgggatgcccacataccatttagcaaatgttgttgatgatcatttaatggaaatcacacatgttataaggggtgaagagtggcttccttcgcttgccctgcatgtgttgctgtacagggcttttgattggcaagagccaaaatttgcacacctgcctttaatattaaaaccatcgggtaaaggcaagctctctaaaagagatggtgataaat

SEQ ID NO: 300216 - DNA, 677 bp, Unknown
  Bacterial polypeptide expressing nucleotide sequence isolated from the Sargasso Sea
gatgtcaaaagtagcaactcgttttgctccctcacctactggagctcttcatattggaggtttaagaacagctttattcaattggctttattcaaaaaatcaaaagggaacttttcatctaagaattgaggatactgataaggaaagatctaaagacgagcataaagttcaaattataaattctttaaagtggattggaatagaatatgatggaaatgaatatatacaatcaacgaaaattgatgatcatatcaaggtagcaaatgaattgttgaaaaatggcactgcttataaatgttattgttctagtgaagaaattgaagaacaaaaaaaaagagctagacaaaaaaaattaccttatatctataatagaaaatggagagatgcagatgaaaaagatattcctcaagatatcaaaccagtaattagatttaagagtaaaattgagggaaaatctatcctaaaagacctggtgcagggtgatgttgagattgagaacaatactatagaggattttattatattaagaaatgatggaactccaacttataacctttctgcaactgtagatgaccatcaaatgggaatgacgcacattattagaggtgatgatcataaaataaatacctttaagcaaatacaaatatatctggctatgggttgggaggtaccaaatt

SEQ ID NO: 300217 - DNA, 557 bp, Unknown
  Bacterial polypeptide expressing nucleotide sequence isolated from the Sargasso Sea
catgagtagttccatagtaagaactagatttgctcctagtcctacaggctacctccatattggtggcgctagaactgctctatttgcctggctttatgctaagtcttatgagggcgcttgcttgttaagaattgaagatactgataaagagagatcgaaagaagaatatacacaagaaattatccaaagttttgagtggcttggcatcagttttgatgaggatattgtttaccaatcaaagaattcactgcgctataaggaagtaattgatttcctcctaaaagaaggttcagcctatgtatgtagtggagaagattctcaacatgacaaagtatatagagatcagaacctatccagagatcaaaaaacagttgttagatttaagatgccagaaacagggtcaacaaaatttgatgatctagtaaaaggacaaattgaggtttcaaatgatcaacttgatgattttattattgaaagaagtgatggttctgctacatataatttttgtgtagttgttgatgatatagattctgaaatttcacatatatcagaggcga

SEQ ID NO: 300218 - DNA, 1030 bp, Unknown
  Bacterial polypeptide expressing nucleotide sequence isolated from the Sargasso Sea
atgacaaaaaaaaacaggttacgttttgcgccaagtccaacaggtccattacatataggtggtctaaggacagctctctttaattatctctttgcaaaaaagaccggcggtgaactggttctaagggtggaagacactgatcaagcccgtaaagtagaaaaaagtcaagagcatattgaaaactcattagcttggataggaatagattttgacgagtctagtaaaaagggcgggcaatttggtccttataaccaaagcgaaagaaaagatatttataaaaaacatgtaaacgttctaattgaaaaaggttgggcatactatgcttttgataaaaaagaaaagctcgactttcacaggctagaccatgaaaaaaaggggaagaaatttatttataatgctcacaacaggctgaagctagacaactccctgtctatggataaaaaagatgttgaagaaagaatacaaaaagagaattatgttgttcgctttaaaacaccttcagaaacaaacgttgtttttaatgatatagttaggggagaaattctagtaggaactagagacattgatgataagattctttttaaatcagacgggatgcccacataccatttagcaaatgttgtagatgatcatttaatggaaatcacacatgttatacggggtgaggagtggcttccatcgcttgccctgcacgtgctgctgtacagagcgttcgattggcaagagccaaaatttgcacacttgcctttaatattaaaacctacgggtaaaggcaagctttctaaaagagatggagacaagtttggttttcctgtatatgctttggattgggctgatgaaaaggtttactctgggtttaatgaatcaggatttttagcagaatcgttaataaactatatggtctttttgggatggagccctggggatgaaaaagaaatctattcaattgatgagcttattaatgattttactttagaaaaaataaaaaagtctggggctaagtttgatccccaaaaactacttggataat

SEQ ID NO: 300219 - DNA, 415 bp, Unknown
  Bacterial polypeptide expressing nucleotide sequence isolated from the Sargasso Sea
atgaaaaaagtagcaactagatttgctccgtcacctactggtcctttgcatattggtggggtgagaacagccttatttaattggttatactcaaaaaaccaaaatggtaatttttatctacggatagaagacacagataaagaaagatcaaaagaggaatacaaaaatcaaattataaaatctctacgatggataggtatcaatcatgatggaacagaatatatacaatctcaaaaaattgatgatcatataaaagttgcaaatgaactattaaaaaaaggttgtgcttatagatgttattgctcaactgaagaaattgaagcacaaaaaaaaagagctaagcaaaaaaaattccatacgtttatgacagaaaatggagagacaaaaacgagaatgaggctcctaaagatgtaaa

SEQ ID NO: 300220 - DNA, 1381 bp, Unknown
  Bacterial polypeptide expressing nucleotide sequence isolated from the Sargasso Sea
aatgaaggtaactagatttgctccaagtcctacaggcaatctacatataggaggagtgagaactgctttatttaattatgttttttcaaagcaatctggtggtttattcttaataagagtcgaggatactgacagagaaagatcaaagaaggaatatgaagaagacataatatctggattagaatggcttggtatatctcccgataaaacaccgataagacaatcagaaagatcagatatgtatcagaaagctgctgaaaagctcattgattctggaaatgcctattggtgcgattgttccccagaagatttagaagaaatgcgtgaacagcaagccgccgcaggtaaaaagccaatgtatgatggaagaagtagaaaccttggccttgaaagatcagacaaaactgttcttagattagcaacgccacttgaaggagaaacggtagtaaatgatttaatacgtggcgagataactttcaacaatagtgaattagatgatctaattctattgagaagtgatggtactcccacataccatttctgtaatgttgtcgatgatttcgatcagggtgtaaccacagtaatccgaggggaggatcatattagcaatacaccgagacaaatccatatccagaaagcgcttggctatccagatcttgagtatgctcacttacctttggtgctaggtgaagataaaaaaaggctttcaaaaaggcatgctgcaactagcttaaatgcttataaagaaatgggatttacaaaagaaacaattataaatgccttagcattgcttggttggtcaactgaaaatgaaattttttcaattgatgaattgatcgaatcattcaagctagaaaatgttcaaaaagctgcagcggtatttgatctaaaaagatttaactgggttagttcccagcaattagcgaaactagatgaaaatggtttttttgaagcaattaaaccgttcatggaaaacgaagacgtcaatgaagattatccaaactataagaagattcttcttgcaatgagaacctcaaaaacaaatttaaaagatatagctcatgcaacaagaccattcttttttgaattagatggttatgacgagaagggcgttaagaagtttcttaatgaatcctttgaaacacttaccttcgcattagaagtactttcaaaattgactgaatggaatgaaacagaactagatatggcattaataaaagttcgagattattttaatcttcctattcctaaggtaaatcaaccaatgagaatagcccttgttggctctactgtctcgccatctctaggcttaacgctagagctatttggtaaagagaaatctttagaaaggatacagaaagcaatagattttattagttag

SEQ ID NO: 300221 - DNA, 1093 bp, Unknown
  Bacterial polypeptide expressing nucleotide sequence isolated from the Sargasso Sea
aatgtcaaaagtagcaacaagatttgctccatcacctacagggccacttcatataggtggggtaagaactgctctgttcaattggttatttgcaaaaaataagggtggaaattttcttctaagaatagaggatacagataaagaaagatcaaaaaaagaatatcaaaatcaaattattcagtccttaaaatggattggtataaattacgatagcgatgagtacatacaatcaaccaaaataagtagtcatgttaaaattgcagaggatctattaaaaaaaggaaacgcttataaatgttattgctcaaatgaggaaattgaagaacaaaagacaagagctaaacaaaaaaaaattccatatatttacgacagaaaatggagagataagaatgaaagcgaggctccaaaaaacataaaaccagtaattagatttaaaagtaagatagatggtaaatctaaattaaaagatttagtgcaaggtgatgttgagatagataataatacaattgaagattttgtaattttgagaaatgatggtaccccgacatataatttatcagtaaccgtagacgaccatgatatgaaagtgacacatatcatcaggggagatgatcataaaataaatacttttaaacaaatacagatatatgaggctatgaattgggatctccctgaatttgcccacatacctttaattcatacaaaagaaggtaaaaaattatcaaaaagggataaagattctacactagatgattattcaaaaattggaataatgcctgaagctttaagaaattatttgttaagattagggtggtcttttaaagataaagaaatttttaatttggaagaaagtatcaaacactttaatttagaaggtgttggaaaatctccctctaaattagatttaaaccgtattttatctatgaatgagtattatattaagaatatgaaagaggataatttatttgatcaattaaaagaattttgtgaaaattataaagaaaaaatacttcctgaaaaagaagatcaaataaaaaaatctcttatatttctcaaaaataaagcaaaaacattagaagatatttttaataat

SEQ ID NO: 300222 - DNA, 865 bp, Unknown
  Bacterial polypeptide expressing nucleotide sequence isolated from the Sargasso Sea
cctgactgttgtggttgatgactggaaaatgggcattactcacgttatccgtggtgatgaccatgtcaacaacactccacgtcagatgaatattctggccgctttaggcgcagaactgcctaaatacgcgcacgtgcctatgattttaggtgacgatggcaaacgtctgtcaaaacgtcatggtgctgttggcgtcatgcaataccgtgacaacggtttcctgccagaagcgctgatcaactatttagtgcgtttaggctggtctcatggcgatcaggaaattttcagcaaagaagaactggtccagctgtttgacttaagcgactgtaaccgtgcgccttcggcctttaacaccgacaagcttgtttggttaaaccagcactacatgaaaactctggcgccagagtacgtagctaaacatttagcctggcatgtggccgatcagaagctggatatcagcactggtcctgcgctgacagaactggtaaaagtgcaggctgagcgggtgaaaaccttaaaagaactggttgaagtaagccgttatttctacgaagacttcagtgagtttgaagaaaacgctgcgaaaaaacacttacgtcctgtagccgcagagccgctggttgctgttcagaccaaactggcagagctgaatgattggtcagtggaagctttacatcaagccattaacgatgccgctgaaagcttaggtttaggcatgggcaaagtaggtatgcctttacgtgtggctgtcacaggtggtggtaactcaccagctttagacgcaacactggcgctgattggcaaagatcgtgtgttaaagcgcatcagcatggcgttacactacatcagcaacagagctgaataa

SEQ ID NO: 300223 - DNA, 347 bp, Unknown
  Bacterial polypeptide expressing nucleotide sequence isolated from the Sargasso Sea
aatgataacaagatttgcgcctagtccaacaggattattgcacttgggtaatatcagaacagccctcataaattggttgtatgctaaaaatagtggtggaaaatttattcttcgaattgatgataccgatcaagagaggtcaaaagatgaatatatttctcaaataaaatatgatttagagtggctgggaatagactatgacgagacttttaatcagtcttctagatttgaaagatataaagagcaattcgaaaaattaaaatctgatggcaggatatatgcttgctatgaaacttctgaagaacttgagagaaaaagaaagcttcagatggctgccggtggaaagc

SEQ ID NO: 300224 - DNA, 505 bp, Unknown
  Bacterial polypeptide expressing nucleotide sequence isolated from the Sargasso Sea
gatgaaagtcaaaacccgttttgctcccagcccgaccggctttttgcatgtcggcggtgcccgtaccgcactctattcctggttgtttgcaaagaaccagggcggtgagttcgtgctgcgtatcgaggataccgacctggaacgttccactcaggaggcgatcgacgccatcattgagggcatggaatggctggagctgaactgggatgagggcccctactatcagaccaagcgcttcgatcgctacaacgctctgatcgacgagatgctggctgacggccgtgcctacaagtgctactgctccaaggagcggctggaagcgctgcgcgaaggccagatggccaacggcgagaagccccgctatgacggcaagtgccgcgatcatgcccacgatcacccggccgatgcgccgcacgtcatccgcttccgcaacccgactgaaggctccgtggtgttcgatgaccacgtccgtggccgcatcgagttcgccaacaccgagctcgac

SEQ ID NO: 300225 - DNA, 1384 bp, Unknown
  Bacterial polypeptide expressing nucleotide sequence isolated from the Sargasso Sea
atgaagccccgtctaagatttgcaccaagccctacaggacaattacaccttgggggagctaggactgctttatcaaattatttatacgctaagaaaaatggcggacaatttttagtaaggatcgaagacacagatatagaacggtcaaaaaaggaacatatagatcaaatttgtaattcattacagtggctggggctgaattgggatgaagagttggtctatcagtctaagcgcagggaatattatagtaattcattagaagatctattatcatgtggaaaagcatacaggtgttttgcatcaaaagaagaattagatcaaatccgcaaagagaatggttcctatcattacaatggtctatggagaaataaaagtgatgatgatattaatagagagttagaaaaaaagacaccttttacaatccgaataaaatctcctaatgaagggcatacggtctttgatgatatgatatatggtagcatctctatatctaactcagagattgatgattttattatttcaagatcggacggcagcccagtgtataattttaccaatgtaattgacgaccaaagtatgaagataactcatgtggttagaggtgaggaccatatatccaatacccccaagcagattctcatttacaaggcatttaactgggagcctccaatttttgcacacttacctatgatattaggcgaagataaaaagagattgagtaaacggcatggtgcaactggagtccagtcataccgtgatgaaggttttcagccagaggctcttttaaattacctagctctattgggatggaacccaggaacagaagaagaaataatggatctagagcaattggtttcaaagtttgatatttctagggttcaaaaaaaagcggcggtatttgatcaaaaaaaattgaattgggtcagttcacagcatttggctttgcaaaatgatcaagatatcttagatcgaataaggcttataaatactggatgggggataaaaaaggataactccttctgcctttctgttgtaagtattgtgaagacccgttcaagatccttggtagaccttattgatcaggcaggctactttttcagtgacccttcccgtttcaacgaaaatgatgcacaaaaaacatggaaagaggatactcagggcattctagaagaaataatacaaatgcttggcgctgttgatgattggactgctaataaacttgaattgatctttaaaaaatatatggaaaataatgggtatggttttggaaaagtaatgaaaccagtaagattaggattgtgtggtaacttacaaggtccgtcactatatgacataatggaactattaggaaaagaattggttataaagcgcataaattacataa

SEQ ID NO: 300226 - DNA, 235 bp, Unknown
  Bacterial polypeptide expressing nucleotide sequence isolated from the Sargasso Sea
atgaaattaagaattgcaccatctccaacaggaaatttacatataggaaatgctagaacagcattatttaattggttatatgcaaaagctaataacggcaagttcttggtaagaatagatgatactgacacggagagaagcactaatgaatatgaaaaaaatattattgaaaatttgagatggttgggccttgattgggataaaggcatagaagtaggagaatctatcgagacat

SEQ ID NO: 300227 - DNA, 1417 bp, Unknown
  Bacterial polypeptide expressing nucleotide sequence isolated from the Sargasso Sea
aatggttagaactagatttgcacctagcccaactggcgtccttcatataggcagtgttcgaacagctcttttttgttggttgtatgccaggcgccataatggaaagtttattcttagaatagaggatacagatctagagcgatcaacacaggaaaatgttgacgcgattttggacagtatgaattggttaggattggatgctgatgaagacccaattttccaaaccgatagatttgatcgttaccatgaagttgccaatcagttatttgaatccggaaaagcctatcgatgctattctacaaaagaagagctagaggctttaagagaagaacaaaagaagaagggcgaaaagacacgatatgatggtcgctaccgtgatgtacccccaaaagagaataatgataattatgtattgagattcaaaaatccacttgatggcagtgtgattgttgaggacgctgtcaaaggaaaagtagaattcaaaaatgatgagcttgatgatctgatcattttaagaagtgatggaacaccgacgtataattttacagtagtggttgatgatattgatatgaatatttctcatgtaattagaggtgatgatcatttgaacaatacgccacgacagataaatatatatgaggctttgggagctaaaccaccaacattcgctcatatacccatgacgcttggggaggatggctcaaaactttcaaagagacatggtgcaatggatattagagagtatcgagaaaaaggatatttgcctgctgcactgttaaactatatggctcgactcggctggtctcatggagatcaagaagtcttttctgttgatgaaatgatttcattatttgatataagagacatcaacaaggcttcctctactttcagttcggacaagcttttatggttaaaccatcaacatataaataaactcaattatgatgaaataattccactgcttaaatatcatatggctgtattagagattgattatgagtcaggcccagatcttaaagaaattatcaatgtatacagcgagagatcagaaacagttttagatatggcaaaatcatcgatatattgttttcaagatattgatgattatgatgataaggctgtcaagaagcatctcagaccagtcattcttgatccactgaatgatgttaaaagtgagtttgaaaaaataaacaattggaaaaaagaaaacatcgattctgctatagaaaaaattgtaaatagatatgaaataaacatggggaaattaggacaacctttgagagttgctgtaaccggttcatcgatgtcaccatctatcaataaaacgcttgctttgattggaaaaaataggtcaattgagagaatcaacaaggccatagaaatcattaaaaaaaggatcgaatcaaataaaaaataa

SEQ ID NO: 300228 - DNA, 741 bp, Unknown
  Bacterial polypeptide expressing nucleotide sequence isolated from the Sargasso Sea
aatgacacaaataagaactcgaattgctccttctccgacaggggaccctcatgtcggaactgcgtatatagcactttttaatcgatgttttgcgcattcgaatggaggaaaattcattctgagagtggaagatacagatagagtcagaagttcgaaaaactccgaattgaatattattgattccctaaattggcttggtttaacttgggatgaaggccctgatgtgggcggaaagtatgggccataccgtcaaagtgacagaacaaaaatctatttggaacatgttgatattcttttaaagaataaaaatgcgtttaagtgcttttgtacgccggaacgtctagatcaattgcgaaaacatcagttacaagaaaagacgcaagttggctatgatggtcattgtttgaacctttctgatgaagagatcgaatctcgattgaggcagggcgaggattatgtgattcgaatgaaagttccggagagtggtgattgcgaatttgacgacctattgagaggaaacgtgagtattaattggtctcaagtcgacatgcaggttctgattaagtctgatgggatgccgacgtatcactttgctaatgtggttgatgatcatttgatgaatattacccatgtgattagaggagaagaatggattaactctgttccaaagcatttacttttatatgagtacttaggatgggagccacctatcttttgtcatatgccgttactgcgaaaccc

SEQ ID NO: 300229 - DNA, 1339 bp, Unknown
  Bacterial polypeptide expressing nucleotide sequence isolated from the Sargasso Sea
attgaataattcagtaacaagatttgctcctagtccttcgggcttacttcatgtagggaatgtaaggactgcattgcttaattttttggtttcaaaaaaaagtaatggaaagtttattttaagaattgatgataccgatcaagagagaagtaaggataaatatatagatagcattaaagaggatcttagttggcttggcttgaattatgatgaatgttatcagcaatcaaatagaattacactttatgataaggcatttgatattctgaaagctaaagatttaatttatccttgttttgaaacgcccgatgaattagataaaaaaagaaaaagattaattacaagaaggatgccacctgtttacgatcgagctgccttaaaacttaaacaagatgaaataaaatcattattggattctggaaaaaaaccatattggcgatttaagctttcaagtaaaaaagttaaatttaaagatttaattaggggggatgtaagtgttgatctagcagcccagtctgatcctgttataaaaagagaagatggtgattatctatataatctgccaagcgttgttgatgatattgatatgaatataactcatataattagaggggaagatcatattacaaattctggaatacaaattgaaatatttaatgcccttaattcaaacatacctctttttggacataattctttactggtttcagagaatggtgaacctttttcaaaaagaaatgcagcggcttcaattgaacagcttaaagaaaaagatattgatcctaatgcagtcaattctcttaatgcgtctataggtagttcagttgatattgaagcttttgaatcattagatcttttagctgataaatttgaaattagttcacttagtaaatcacctgctcgttatagcaataatcagttagataaacttaattcgcaattaatttctaattatgattttgaaaaaatatctctgcttcttaaagataaaaatgattgtttggatgcagaattttgggattgtattaaacaaaatatctcaactttatcagaggttaatgattggatcaaaatcttaaatgaaccaattgaaggtgattttaatttagaagaaaattatttaactattgctcaggatcttttgcctaatgaaccttgggactcaaaaacatgggatgaatggatatcaagattaaaagaaaaaacacaaaaaaagggtaaagaattgtttatgccaataagaattgccttaacaggaaaaacaaatggaccagaattaaataaacttattttattaatgggctataataaagtaatggaaagattaaagagaaaatag

SEQ ID NO: 300230 - DNA, 1312 bp, Unknown
  Bacterial polypeptide expressing nucleotide sequence isolated from the Sargasso Sea
atgaaattaagaattgcaccatctccaacaggaaatttacatataggaaatgctagaacagcattatttaattggttatatgcaaaagctaataacggcaagttcttagtcagaatagatgatactgacacggagagaagcactgatgaatatgaaaaaaatattattgaaaatttgagatggttgggccttgattgggatgaaggcatagaagtaggagaatctaacgagacatatagacagtcttcaagatttgaaagatatattgaggttgctgaagagttagaaaagaaaggattagcttatagggaggaaggagcgttaaggtttaaggttccagatgatggagatattaattttgaagatattgttaggggatctatgagctttaatttaaatgatattgaagattttgttattttaagatctgataattctccgacttaccacctagcttcaaccgtagacgatatagattatgagataacaatgattgcaaggggagaagatatcttatcttcaactccaaaacatattttattgatgaatgctttagacgctaaacatccagatttttgccacctccctttactatttggtccagatggtaaaaaattaagtaaaagacacggcgatacttctgtttcagcatttaaagataaaggcattcttcctgagtcattatttaactatatgtgtttacttggttggtctccaggtaacgatttagaaatatttgataaaaaattagcaattgaaaaatttgatttaaaaaatgtccttccaaatcctgcaatatttgatacaaaaaaacttctatggatgaatggacaatatatacgtgatacagaagataaaatatttaaaaaactttttcttaattcaattcaagactctatctccagagacttatttgatgaggaattaaataggattgacaaaattgtaaagtcagttcaagaacgattagaaacaatgaatgatattaaggaacaagtaatgtttcttctagatgaaccttttgaaatcaattcagatgattggtccgatgtaaatacggaagatggtcagcagtatatgaaaaatgtaagagagaaatttatgtcagcaaataattttgatcttgatgatatagaagtaattatgagagaagagcttaaggcattagatattaaacctaaaattggttttcaaattacaagagttgcagttacaggtacaaaagtaagccctcctttatttgagtcaatatatgcacttggaaaagaaacaactattgcaagattggctgaaagtattgaagatttgtaac

SEQ ID NO: 300231 - DNA, 1385 bp, Unknown
  Bacterial polypeptide expressing nucleotide sequence isolated from the Sargasso Sea
tacagcgcggacagccgtcttcaactggttgtacgcacgacgccagcaggggtcgttcctgctgagaatcgaagacaccgataaggaacggtccaagcccgaatacacccagaacatcctggagggcttgcgctggcttgggatcgactgggatgaagagccattgatccagagcgaacaggtgcagcagcaccgtgccgcgatcgaaacactcttgaagaagggtctggcctaccgctgctacgccaacgaggccgaactggacgccatgcgcgaggcccagaaggccagcaaccaggcgccgcgttacgacaaccgccaccgcaatctcaccccggaccaggaagcagccttccaggcggaaggacgggaagcggtgatccgtttccgcatcgatgacaacgctgagatccgctggaacgacatggttcgtggcgccatgtcctggcgtggtgcagacctcggcggtgacatggtcgtggcccgcagggctcctgccgatcagatcggagatcccctctacaacctcgtggtggtggtggatgacgccgctatggccatcagccacgtgatccgcggcgaagaccacatcgccaacaccgccaagcaactgctgctctacgaggccctcgacctgccggcaccgaccttcgcccatgcccccctgatcctgaatgcggaaggccgcaagctctccaaacgggatggagtgacctcaatcaatgacttccgcacgatggggtacaccgcagaagcaatcgccaactacatgaccctgctgggctggtcggtgcccgaagggatggaggagcgcttcaccctgcctgaagcggcagcggtgttcagcttcgatcgggtgaacaaggccggcgctcgctttgattgggacaaactcaactggctcaacggtcaggtgctgcacgccctgccagcgcagcagctcctggatgaccttcgtccgctctgggccgagcaaggttgggccctaccggacgacagcagctgggggctggagctttgcgaattgctgggaccttccctgaccctgctcaaggacggcgtggagcaggcgacgccgttcttcaagcgtcctgatcttgaagacgatggtctgcgccagctggaaactgatggggctcggaccgctgtggctcaactgctgcagatcctcgaggccgagccctgggatggcaaggacaccgatcgcgccaaacagcttctggcggatgccgccaagggggccggcgtcaagaagggcgtggtgatgaaatctcttcgcgcagccctgctcggacggctgcagggtcccgacctgatcaccacctggtgtctactggcccggatcggggaggaccttcccaggttgcagcgttgcctcgtctgac

SEQ ID NO: 300232 - DNA, 1045 bp, Unknown
  Bacterial polypeptide expressing nucleotide sequence isolated from the Sargasso Sea
aataccttatatttacgatagaaaatggcgaaataagagtgagtcagaagctccagaagaaattgatcctgtaattagatttaaaagtaaagttgaagggaaatctatcttaaaagatttggtccagggaaatatagaaatagaaaataatactattgaagactttgttatattaagagctgatggttcaccaacatataatttatcagcttctgtagatgatcatataatgggcatgacacatataattagaggtgatgatcataaaataaatacattcaaacaaatacagatttatgaagctatgaattgggaaataccatcttttgcacacataccattaattcatactattgatggaaaaaagctatcaaaaagagataatgtatcaacattagatgattattctaaaattggaataatgcctaatgctctaagaaattatcttcttaggctaggatggtcatacaaagataaggaaatttttgatttagacgaaagtatcaaatacttcaatttagaaggaattggaaaatcaccctcaaaattagatattagtagaatttattctatgaacgagcattatataaaaaatattgatgaaaatgatctatttaattttttaataacctattgtgaaacttttcaagaaaagatacccgatgtggcacaaaagaaaatcaaaaattcgttacattttttaaaaaataaagcaaaaactttggaagatatttacaaaaattcaaagtttttaataaatgacaaagttcaaatagaaaaggaagatataaaacttttagacaaaacagctatcaaaattattaaattattttgtgatgatattaatagactttcagatttcactagggaaacactagagccaataattaatgacctaataaaaaaaaataatacaaattttaaaggagttgggcaaccactaagaatatgccttacaggatcaaagtttggacctggtatatatgatatactgtgtgcacttggtaaagaggaagtatcaaaaagattatctcaaataagataa

SEQ ID NO: 300233 - DNA, 160 bp, Unknown
  Bacterial polypeptide expressing nucleotide sequence isolated from the Sargasso Sea
atgacgaactcttctgatacccttgccgtggccatcgatgataagcctcgagactttatccgcgagatcattaccgtcgatacagactctggccgctacaacgaaatcgtcacgcgatttccaccagaaccaaacggctatctgcatatcggtcactgta

SEQ ID NO: 300234 - DNA, 251 bp, Unknown
  Bacterial polypeptide expressing nucleotide sequence isolated from the Sargasso Sea
cgaccgcctatttgcggtgcccgaaccaggtcgcgaagacgacacactggctgcactcaatccccagagtctcgaggtgttgaccggggcgatggtggagcccgggttgcgcgaggctgagcccgagcaggtgtttcagtttgagcgcgagggatacttcgtggcagatcgctacgatcacaccccagaaaatcctgtttttaatctgactattggcctccgcgacacgtggtcggcatccaatgcctgaa

SEQ ID NO: 300235 - DNA, 814 bp, Unknown
  Bacterial polypeptide expressing nucleotide sequence isolated from the Sargasso Sea
cgccatcgaaggggtgacacattcgctgtgcacactggagttttccgataacagggccctgtatgactggtacttgacccaattgccgcttgatgctccaccgccctaccaaaccgagtttgctcgactcgaactgacttatacagtgacctccaaacgccaactgaagaagctcgttgacgacggtgttgtcgatgggtgggacgatccgaggttaccgacgctacgcgcgttgagaaggcgtggctatccggctaaggcaattcgagagttttgcgccttcattggtgtagctcgcacaaatgcacgacacgatattgaactgcttgaatcctttgtccgaactgaactgaacctctctgcttcccggaggatggccgtccttgaccccttgaaactgaaaatcactaattggccgactgattctgcaggtgagccactaagtgatgttcgaagtttggttaataaccccgaaaatgactctgaaggctctcgagacgtgtcgtttagcggtgaattgtggatagaacaagaagatttcaagatggaccccccaccgaagtatttccggctggcacctggccgcgaggttcgacttcgcggaggttatctagtgacgtgcacagacgttgtttgcgatgaggagggagttcctatagaggtccactgcgaatacgacccagacacagcaggtggagcagctcctgacggtcgcaaagtcaaggccacaattcactgggttgacgcggccaacgctattgacggttccgttgcgatgtatgagcggctatttaagacccaactcccgggcagc

SEQ ID NO: 300236 - DNA, 328 bp, Unknown
  Bacterial polypeptide expressing nucleotide sequence isolated from the Sargasso Sea
aaagtgaagggcactattcactgggtttcggcggcgcatgcgctggagtctgaagtcagactttacaatccattatttgagaatccaaaggacggtaatgccgaagactatttagataaattaaattcagactcacttgaaattctcaagggttgcttcgtggaacctttgttgtctctggcgacttcggatagtcctgttcaatttgaacgaacgggttattttaatcttgataggtgttctaacgaaggttgtttagtttttaatcgaacggttagcctacgcgactcttgggcgaaggaaaatctaaagaaaaacccttcgtaga

SEQ ID NO: 300237 - DNA, 549 bp, Unknown
  Bacterial polypeptide expressing nucleotide sequence isolated from the Sargasso Sea
agaaaaaagaaatgggaagccgagagatgccatttggtaaaaatatattgattgagaaagatgatttcatggagagtcccgaagaggatttttataggctctctccaggagctgaagtcagacttaggtatgcatacatcatcaaatgtgaagaaataataaaagatgaagatggagagatcatagaactaatctgttcatatgatccagatacaaaaagtggtgttggtacatcaaaaaagaaggtcaaaagtgcaatccactgggtttctgcagaccactcaattacaggaaaagttagtctctttgaaacactctactcagatccaagccctgactctgatagccaattgaatccgaactcaaagcttgaaatcgatgaagctcaatttgagcaatctttgtccaatgccaaaatcgggggtagattccaatttgaaagaagcgggtattttattcttgatgagattaaggatgaaaaactctcattcaacaggattgtcactcttaaagacacttgggcaaaaatacaaaagaaaaagaaataat

SEQ ID NO: 300238 - DNA, 485 bp, Unknown
  Bacterial polypeptide expressing nucleotide sequence isolated from the Sargasso Sea
tatggacaagggtaaaaactttattgaacaaattattgatgaagacttaagttcgggttttgataactctaagcttcagttcaggttcccccccgaaccaaatgggtttttgcacataggccatgtgaaagcaattgttctaaatttcgaacttgcaaagaagtataaagcaaaaattaacttacgttttgatgacactaacccagaaaatgaggatcaaatttatattgacgctataaaacaagacatttcatggcttggatataaatgggataaagagtgctatgcttcagattattttgacaccctacatgactgggccgttgagcttataaaaaaagacaaagcatatattgattcacaaacctccagcgagattgccgcccaaaaaggcacaccaaccgagcctggaaaggaaagcccgtttagaaacaggcctgttgaagaaagtctggatattttctctaaaatgaaaaacggggact

SEQ ID NO: 300239 - DNA, 223 bp, Unknown
  Bacterial polypeptide expressing nucleotide sequence isolated from the Sargasso Sea
tatgaaaaaagccaaaaactttatcgaacatatcattgacgaagatcttagaaacggctttgataaaagtaaattaaggtttaggtttccgccagaaccaaacggctaccttcacataggtcatgttaaggctattgtattaaattttgaattagctaaagagtattcagcaaaaataaatttgcgttttgatgataccaatcccgaaaaagaggaacaaaag

SEQ ID NO: 300240 - DNA, 610 bp, Unknown
  Bacterial polypeptide expressing nucleotide sequence isolated from the Sargasso Sea
tccggaggataaatccgaacaactagatattccgaatcatccaaatgatccgactatgggcgagagaaaagtcccgttttctaaaataatttatattgaaaaagatgattttatggaagaaccatcaaagaaattttttcgtttagcaccaggtaaggaagtcagattacgttatgcatattatattatttgcaacaaggttgttaaggacgattcggacaatatacttgagttacattgctcttatgatccagattcaaaaggcggcgattcacctgatggccgcaaagtgaaaggaacattacactgggtatcggctgaacatgccttcaaaaccgaagtacgtttatatgatagattatttgatgatcctaaacctgatagcaataagcatgagaatggctggaaagattttttaaatagtgattctataaaagtagtgaagaatgcattccttgagccatcgttgaaatctgccaataaagaggatttttttcaatttgagagaattggctacttttgtgtcgatagtaaagattccgatgctggtaaacctatatttaataggaccgtttctctaagagactcttgggcaaaaaaacagaagtaa

SEQ ID NO: 300241 - DNA, 523 bp, Unknown
  Bacterial polypeptide expressing nucleotide sequence isolated from the Sargasso Sea
atggataagggcaaaaactttattgaacaaattattgatgaagacttaagctcgggctttgacagctctaagcttcagttcaggttcccccctgaaccaaatggttttttgcacataggtcatgtgaaagcaattgttctaaattttgagcttgcaaagaagtataaagcaaaaataaatttacggtttgacgacaccaatccagaaaatgaggatcaaatatatattgacgctataaaacaagatatttcatggcttggatataagtgggacaaggagtgttatgcttcagattattttgacaccctacataactgggctgttgagcttataaaaaaagataaagcatatattgattcacaaacttccaacgagattgctgctcaaaagggcacaccaaccgagccgggaaaagaaagcccatttagaaacagacctgttgaagaaagcttggatattttctctaaaatgaaaaatggggactttgaacaaggaaagcatgttttgagagccaaaattagca

SEQ ID NO: 300242 - DNA, 280 bp, Unknown
  Bacterial polypeptide expressing nucleotide sequence isolated from the Sargasso Sea
tatgaaaaaacacaagaattttatcgagcacatcatagaccaagatcttagaaatggctttgacaaaaatcttttaaaatttaggtttccgccagaaccaaacgggtatttacacatagggcatgttaaagcaattgttttaaattttgagctagcaaaagaatatggtgcaaaaatcaatcttcgttttgatgacacaaacccagaaaaagaagagcaaaagtataaagacgcaattaaagaaaacattaattggcttggatataattgggatgaagag

SEQ ID NO: 300243 - DNA, 179 bp, Unknown
  Bacterial polypeptide expressing nucleotide sequence isolated from the Sargasso Sea
taaccctaattcacttgaagtggttaatggtttagttgaagccagtcttgtgaacgcaccagcggaaaaagcataccagtttgagcgtgaaggttatttctgtgctgacaataaagactcatcagccgagcatttagtctttaacctaacggttgcactgcgtgactcgtttgaatagc

SEQ ID NO: 300244 - DNA, 801 bp, Unknown
  Bacterial polypeptide expressing nucleotide sequence isolated from the Sargasso Sea
tacctaattttggtgattatcaggatgcgatgatcgaaggcgaaccatggatgtaccattcgcatattagtttttacctgaattgtggtttactcctgccattagaatgtgtgaaggcagctgaaaaggcttaccagcaagggaaagcaccacttaatgcggttgaaggatttatccgccagattattggatggagggagtatgtgcgtggtatttactggttggagatgcctgagtacgccaaaaaaaacttttttaacgctaaacaaaatcttccagatttttactggacagcagacacaaaaatgaactgcctgcaccaatgtgttttagaaacacgaaaaaatgcctatgcacaccacatccaacgcctgatggttttgggaaactttgccctcatagctggtattgatccggttcaggtcaacgagtggtttttaattgtttacgcagatgcatatgaatgggtagaacttccgaatgtttccggcatgactctctttgccgacgggggacatcttgccagcaaaccttatgcggccggtggaagttacattaataaaatgtcagattactgcaaaaactgtaactataaggtaactaaaaaaaacggagaagatgcttgtccatttaattatttatactgggattttctaattcgtaaccgtaacaagctagaatccaatcatcgcatcggtatgatgtacaaaatgtatgaacgaatgggtgacgataaaaagcaggcgatttctaatgacagccaacactttttaaaatctatctatgataaaaaaagctgat

SEQ ID NO: 300245 - DNA, 162 bp, Unknown
  Bacterial polypeptide expressing nucleotide sequence isolated from the Sargasso Sea
tatgaccgaaattaaagacacagttgacgaagagcagcaggattttatccgggaacagattagagcggatcttgcatcgggtaaggttgataaagtcatcacccgctttcctcctgagcctaatggttacctgcatatagggcacgttaaatcaatttgttt

SEQ ID NO: 300246 - DNA, 144 bp, Unknown
  Bacterial polypeptide expressing nucleotide sequence isolated from the Sargasso Sea
caataaaccaggatgtttttcaattcgaacggctgggctatttttatccggatccagtagattcccacaccgaggctatggtctttaaccgcacagtaacccttcgtgatacctgggcaagactggaacaggaacaaaactgac

SEQ ID NO: 300247 - DNA, 313 bp, Unknown
  Bacterial polypeptide expressing nucleotide sequence isolated from the Sargasso Sea
aaaaagaaggtcaaaagtgcaatccactgggtttctgcagaccactcaattaaaggaaaagtgagtctctttgaaacactctactcagatccaagccctgactctgatagcccattgaatccgaactcaaagcttgaaatcgatgaagctcaatttgagcaatctttgtccagtgccaaaattgggggtaggttccaatttgaaagaagtggatattttattcttgatgagattgaggatgaaaaactctcattcaacaggattgtcactcttaaagacacttgggcaaaaatacaaaagaaaaagaaataat

SEQ ID NO: 300248 - DNA, 712 bp, Unknown
  Bacterial polypeptide expressing nucleotide sequence isolated from the Sargasso Sea
agcaaaacgtgataacgttatggatgtcgcaaagcttgaatcctctttgcgctcagatcttaatcagcgttcattgcgacgtatggcggtattaaatccacttaaagtcgtaattacaaactatcctgaagataaggaagagcttgttacggcaaagaataatcctgaagatgattccacagggaccagagagctcccattctcaagagaattgtatattgaaaaagatgattttttagaggatccaccaaaaaagttcttccgactttcacctggcaatgaggttcgctttaaatttgcttattatattacatgcaatgatgtaattaaagatgatgatggtaatattgtagaactacattgctcttacgataaagaaacaaaagggggtaggtcttcagatggcaggaaggtaaagggaactatacattgggtttctgctaaacattgttttccagcagaagtacgtttgtatgataggttattttcatctatcagtccagatagtgaaacagattatcttgattcaataaatacagattccctagaaattttaacaaattgtcttgttgagccagaccttcagcagctcagtacagatattcctgtacaatttgaaaggattggttattttttcaaagatagcgactcaaatagaaattcacttatttttaacaggacagttgccttaagagataattggtcaaagtga

SEQ ID NO: 300249 - DNA, 670 bp, Unknown
  Bacterial polypeptide expressing nucleotide sequence isolated from the Sargasso Sea
gttgaataaaagtagcaaccgtgtgatgggtgttcttgatcccctaaaggtagtgataaccaactatcctgaaggggagacggagagtttagatgcaattaacaacccagagaatcccaacgcaggtagtagaataattccattttcaaaagaaatctatatagaaaagaatgattttatggaagacccgcctcggaaattctttcgattaggacctggtagagaggtgagactgagatacgcatatttcattacctgtactgatgtaattaaagactcagatggcaacgttgtcgaactacactgcacctatgatcccagtaccaaaagcggaagcgcgcctgacggaaggaaggtaaagggcaccatacactgggtaagcgcaaaagatgctgttgatgccgaagttcgattatatgatcgattatttaaaaagtcagatcctgatcagggcggaaattttctagatgcacttaattctgattcctgcatggttcaaaatgcaaagttagagccatgtttaaatgatccagggttacaaacatatcagtttgaacgtttagggtattttaagaaagatgagaaactatctgttagcaaaaatgtttttataagagttgtttcgcttcgtgattcttgggcaagactaatgaaacagggaatgacttga

SEQ ID NO: 300250 - DNA, 251 bp, Unknown
  Bacterial polypeptide expressing nucleotide sequence isolated from the Sargasso Sea
tgatttcccggatggctcggatgatgaacttcccacacttcttaaccctgactcgcggcacgtagtacgcggcgtcgtagagagcgtacttgcatatgcaaccgtggacgatcggtttcagtttgaacgagaaggctatttttgtgtcgacgaagtggatagcaaagccagtttaccggtcttcaatcgtattgtgggtttgcgggattcatgggcacgaattgaacagaagggagctcagtcacagtgag

SEQ ID NO: 300251 - DNA, 577 bp, Unknown
  Bacterial polypeptide expressing nucleotide sequence isolated from the Sargasso Sea
atggataagggcaaaaactttattgaacaaattattgatgaagacttaagctcgggctttgacagctctaagcttcagttcaggttcccccctgaaccaaatggttttttgcacataggccatgtgaaagcaattgttctaaattttgagcttgcaaagaagtataaagcaaaaataaatttacggtttgacgacaccaacccagaaaatgaggatcaaatatatattgacgctataaaacaagatatttcatggcttggatataaatgggacaaagagtgttatgcttcagattattttgacaccctacatgactgggccgttgaccttataaaaaaaaacaaagcatatattgattcacaaacctccagcgagattgctgcccaaaaaggcacaccaacggagcctggaacggaaagcccgtttagaaacagaccaattgaagaaagtctggacattttctctaaaatgaaaaacggggactttgaacaaggaaagcatgttctgagggctaaaattagcatgacctcatcaaacatgcttatgagagaccctgttatatacagggcccttgaca

SEQ ID NO: 300252 - DNA, 953 bp, Unknown
  Bacterial polypeptide expressing nucleotide sequence isolated from the Sargasso Sea
tgactatatcgaacaagtatcccactctttatgcaccctagaatttaagccccacagggatttgtacgactggtttttagaccttgtggttgaaccaaaaaaaattagacctaaacaaagagaatttgcaagactcaatcttagccacacaattacatcaaaaagaaaactcctatcattggttgaaaaaggctttgtttcaggatgggacgacccaagaatgccaacaatatcggggctcagaagaaggggttatacaccagatgcattaaaaaagtttgttacaaccgcaggtgtagctaaaagggaaaacattattgaaatgtctcttttggaattctgcgctagagaggatttgaataaaaaatgcaataggctcatggttgtgcaagcaccattaaaacttaccatttcaaactatccagaggatcaggttgaacagcttcctctggtcaataatccagaaaatgacgactcaggacaaagaatggtggcattctctaagcaggtctatattgaacgaacagactttttagaggaccctccaaaaaaatattttagactttcgccaggaaacgaggttaggttaaaaggagcgtatataattaaagccgaaagaacagttaaagactcaaatggaaatataattgaaattatatgcacctatgatccaaaatcaaaaagcggatcaggctccgctgaaagccaaagaaaggttaaaggaaccttacattgggtttcttgcgcatcaaatacgcccgtcgaaattagagaatatgacagactgtttgagcacccctcgcctggagacttctctgttgaagatctttctaaagcaataaacaatgactctataactgtttttcacggttttggtgaaaaggggcttacaaaatctaaagcctcagaatcttttcagtttcaacgaaaaggatattatataaaaagatata

SEQ ID NO: 300253 - DNA, 921 bp, Unknown
  Bacterial polypeptide expressing nucleotide sequence isolated from the Sargasso Sea
agagatagaagtatgaaagaaaacttagttcttttcgaaaaaatgaagaatggtgaggtgaaagagggagcaatgacattaagggctaagatagacatggctcattcaaatatgcatatgagggatcctttgatgtatagaatcattaatgagcgtcatcatcgtacaggatcagattgggtaatatatccaatttatgattttgctcatggtgttagtgatgctattgagggaattacccattcgatttgtacattggagtttgaagttcatcggccattatacgagtggtttaacaataaaataaatacccctgccaagcctcagcaaatcgaaatggcacgtctaaatatttccaatgctgtaaccagtaaaagaaaggtgaaaaagctaattgatgaaggagttgtatttggttgggatgatccaaggttaaccacgcttgctggaatcagaagaagaggaatccccgcacaagcaatacgtaatttagcagaagggattggtgtgtctaaaagaaattccattactgaaatgtctcgcgtggattattacacgcgtcaggtattgaataaaactgccaatagagttatggctgttttggatccgttgaaagtgacgattaccaactttgatgaaggaaaagtagaaatgtgtgaggcaaagaataatccagaggacgaatcagcgggaacaagagaaatgccaatcagtagaactttatacattgaaagatctgattttatggaagatgcacctaagaaattttttcggttaaccaatggcaaagaggttcgttttaagcatggatattatattacttgtaatgaagttttaaaggacgcccagggaaatattacggaacttttgtgcacttatgacccaacaacaaaaggaggatggagtgatgatggaaggaaa

SEQ ID NO: 300254 - DNA, 687 bp, Unknown
  Bacterial polypeptide expressing nucleotide sequence isolated from the Sargasso Sea
aatctatcctaagaagcgatcttaacaaaaatagtcaaagaagaatggctgttttaaatcccattaaagtcataataacaaattatgacaaaaataaaaccgaacatctacaagctattaataatcctgaagatgaaagggctggtaaaagagagctaccattctcaagagaattatttattgaagctgatgatttcatggaagatccgcctaaaaaatattttcgactgtctccaaaaaatgaagtgaggctaaaatttgcttattttataacctgccatgaagttgtaaaaaatagcaaaggtgagattattgaaattcattgtacatatgacaagaattcaaaaggaggaaaatctccggacggtagaaaagtaagaggaacaattcactgggtctctgcttcccatgctatagatgcaagcattaaactttatgatcgtttatttaaatctccaaatcctgaaagttctgaaaattttttagatgatttaaatgatagttctttgatcacaataaataactgcaaattagaaccatcacttttagaagttaaaaatgatgaaatttttcagtttgagagaattggttattttattaaagacaaaatatctaataagtctgatcttgtttttaatagaacagtctcattaagagatacttgggctaaattaaaaaaacaataac

SEQ ID NO: 300255 - DNA, 232 bp, Unknown
  Bacterial polypeptide expressing nucleotide sequence isolated from the Sargasso Sea
ttgggaaagagagcaagcagaaaaccattcatgagcaaaaaagataaatatcgaggcaaggatttcatccgtcagatgatccatcatgatattgactcaggtgtcaacgatggaagattggcaacaagatttcctcctgagcccaacggatatttacacattggtcacgcgctttcgatctgcattaattttggtatagctgaagaatttgatgcgccctgctatctgagat

SEQ ID NO: 300256 - DNA, 703 bp, Unknown
  Bacterial polypeptide expressing nucleotide sequence isolated from the Sargasso Sea
agaagacggttatgttagcggttgggatgatccccgcatgctcaccctttcaggtcttagacgcaggggatatcctgcttccgcggtacgattgttttgtgagcgaattggcatttcaaaaagcgaaaataacattgacatgaacgttttggaagattgtgctcgagaagttctagataaaactgcaattcgcttgatgtgtgttttgaaaccactgaaagttgtcattacaaattatcctgaaaacaagacagaagactttcaacctgcaagacatccaaaaaaacctgaaatgggaacccgaaaagtacctttttcaagggaaatttatatcgaccaagaagattttcgtgaagaccctccaaccaattatttcagacttgctccagggaaagaagtcaggctacgttacgcatatgttatacgctgcgatgaagtaatttacgacgcaaaaggtaaagtttctgaactacactgcacatatgatccagcaacaagatctgggaaaaaagccgaaggaagaaaagtaaaagggattattcattgggtttccgcaaaagattcaattcaagtggaagttcgtttatacgaccgccttttcgcaaaaccgattccagggagtgatgatccggaagggaaatttctaaatgatatcaatcagaattcaattgaggttctttctgactgcagggtagaaaccggg

SEQ ID NO: 300257 - DNA, 520 bp, Unknown
  Bacterial polypeptide expressing nucleotide sequence isolated from the Sargasso Sea
gatcgcgaagacttccgagaggaggctaataagaaattcaaacgtttggtgttgggcgatcgtgtgcgtttgcgttacggctatgttgttcgggccaccgatgttgtgcgtgacgatcaaggtgaaatcgtggaggtgcgttgcacctatgatcctgacaccttaggcaaaaaccccgagaacgcagaggggcaggggaaaatgcgtggcgtcattcactgggtgagtgcggataaagcgttgccttgcgaagtgcgtttgtacgatcgcctattcagtgtcgccaaccccaacaaggaattagaagaagggcagacttttctgtcacacatcaacccagactctctgaccgttctggagaactgtttagtagaaccggggcttcgtggtgccttggctgagactcgttatcaatttgaacgggaggggtatttttgtgtggatcaggacagtaccgagaaccggttagtattcaatcagaccgtggggttgcgcgaatcttggcctaaggaagcctgag

SEQ ID NO: 300258 - DNA, 541 bp, Unknown
  Bacterial polypeptide expressing nucleotide sequence isolated from the Sargasso Sea
atggccgtactgcgcccattgaaagtcgtgattgagaactacccagaaggtcaaatcgagacgattcaagcggcttctcacccaagcgatgaaagcatgggtacacgcgaacttgcctttggccgcgaactgtatatcgatgtggcggatttcagagaagaagccaataagcagtacaagcgtctagtaatgggcaaagaagtgcgcctgcgtaatgcttatgtgattaaggctgagcgttgtgacaaagacagcgaaggtaatatcaccacggtttactgtagctacgatgcggataccttgggtaaaaaccctgccgatggtcgcaaggtaaaaggcgtaatccattgggttgaagcgactacagctaaacctgctgaattccgtttataccaacgcttgttcacggatccaaatcctgcagcagcagagacagtggatgaagtgcttaaccctaactcacttgaagtggtgaatggtttagttgaggcaagccttgtgaatgcgccagcggaaaaagcataccagtttgaacgtgaag

SEQ ID NO: 300259 - DNA, 363 bp, Unknown
  Bacterial polypeptide expressing nucleotide sequence isolated from the Sargasso Sea
cgcgttctggagcaaaacctgaaggaagaaaaataaaagaaattattcactgggtttcagcaaaagattcaatacaggtggaggttcgtttatacgaccgacttttcacaaaaccgattccaggcaatgatgattcggaaggaaattttttgaatgatattaatcagaattcaattgaagtcctttcaaaatgtcagttagaaactagaatcatgacatcggtaaaccagaaagtttttcaattcgaaagaataggctacttttatctagatcctgaagattctctccctgaagccctggtctttaaccgcacagtaacactccgagatacttgggcaaggctggaacaggaacaaaactgac

SEQ ID NO: 300260 - DNA, 82 bp, Unknown
  Bacterial polypeptide expressing nucleotide sequence isolated from the Sargasso Sea
ccgcgaataccgcggcaccttaaaagagccgggtaaaaacagcccgtaccgtgacacacccgtggaagaaaacctgcaataa

SEQ ID NO: 300261 - DNA, 378 bp, Unknown
  Bacterial polypeptide expressing nucleotide sequence isolated from the Sargasso Sea
cctgcctgcaacagattttatacgcaacattatccgtgatgatttgtcatccgggaaacatcagcgtcttgtgacacgatttccacccgaaccaaatggtcatttacacatcggacacgccaaatcaattcagctaaatttcggtactgcagaggagtttaggggaatttgcttcatgcgttttgatgacacaaatccactcaaagaagaagatgaatatgtagaaggaattttgcaggatgtgcgttggatgggttatgactgggcagaaaggcttacttatgcttcagattatttcgaacagctttatgagtttgctgaagaattaattaaaaagggaaaagcctatgtagaaagccagagtgcggaggaaatcag

SEQ ID NO: 300262 - DNA, 551 bp, Unknown
  Bacterial polypeptide expressing nucleotide sequence isolated from the Sargasso Sea
ttgccgagagatttatattgaaagtgatgattttagagaagacccacctagaaaatttagacgactaagccctgggtctgaagtacgattacgttatgggtacataattaagtgtgaggaagtaataaaggatcaatccggtgaagttattgaattacgttgtagttatgatcccgagactagaagcggttccgaacaggcacaaagaaaagtaaaaggaaccatccactgggtctctgcaaggcatgcaattcagcgagaacttcgtttgtatgaccgcctttttattgcgccaaatccagatcagggcacggatgattttaagcgccatctcaaccctgattcccttgaaatcctcaaaaactctatgttggagcctattcttgaagccgctaaaccagcagagagatttcagtttgagagacagggttacttcacaatcgatactgaatttccagattgctctgtgttttcccgtacagtaacgcttagagactcatgggcaaaaatcgagcgacaagcagcaattgaagaaagtagacaagcttagg

SEQ ID NO: 300263 - DNA, 908 bp, Unknown
  Bacterial polypeptide expressing nucleotide sequence isolated from the Sargasso Sea
gagtttgaagatcataggccttttatataattggtttattgataagttgaatatttatccttctagacaaatagaatttgcgagactaaatattagtggcacaatgatgagtaagcggcaattatcagaattagttttatctaatatggtaaacggatgggatgatccgagaatgccaactatatctggtatgcgtagaagagggtatccatcagaagcaatattagatttttgtaaaagaactagtataactaagagaacaaaccttgttgatttgtctttattggagcattgtgtaagagagaatttgaataaatcagcttatagagtaatggcagtgttggatcctattaaagttgttataaaaaattattcaaatgattcgcttgaagaaatcgatgctttaaataacccagaagatcctgcaatgggttctagaaaagttccattttcaagagaaatatatattgagagagaggattttgctgaaatacctccgcccaaatttcatcgtttaactataggtaaagaagtaaggttaagatatgcatatatagtgaagtgtgttgatgtgatcaaagacgaaaaaggagaaatcatagaaattcattgtgaatatgatgaaaatagtcatggaggtaagcctgcagatggacgtaaggtaaaaggtacaattcattgggtgtctgcattaaaatcatcaagagctgaaattaggatatatgataaattaatttcagaacaacaatttgatgaagagaattcagataatatggaattaaacccaaattcaatcaaagttttgaaaaattgtcctatagagattagcttagagaatgcatctgaaggaatacattatcaatttgaaagatcagggtattatatattagattctcaaagatactaaa

SEQ ID NO: 300264 - DNA, 421 bp, Unknown
  Bacterial polypeptide expressing nucleotide sequence isolated from the Sargasso Sea
aatgaacgaaaatcaaacccctgctccacctccttcgcatttcatccgcaagatcatcgaggccgatcttcaatccggcaagcatcagcaggtggtgacccgcttccctcctgagccgaacgggtttctccacatcgggcatgccaagtcgattttcctcaactttggaatgccacgggactatggcggccattgcttcatgcgttttgatgacaccaacccggtcaaggaggatgcgacctattcccaggcgattctggaggatgtccgttggcttgggttcgactggggaaaccggctgacccacgcatccgattatttcgagcaactctatgagttcgcctgtgttctcatccgccggggaaaggcttatgtcgacagcctgagcgcagagaagatcgggaataccgaggcaccctga

SEQ ID NO: 300265 - DNA, 894 bp, Unknown
  Bacterial polypeptide expressing nucleotide sequence isolated from the Sargasso Sea
taaactacactgtggtaagtaagcgtaagttaaaacgattagtcgatgatggttttgttgatggctgggatgatccaagaatgcccaccatatcaggcctcaggaggagaggttatactccagaatcaattcgtaatttttctgaaggtattggagttacaaaacgggatacgattgtagatgttgcaaaactagagaattcgctcagagatgatctaaataaaagagcctcaagagtaatggcagtccttgatccacttaaggtggtcataacaaactatcctgataataaattagaatatgttgatgctattaataaccctgaggatgaacgggctggaaaaagaaagattactttttcaaaagaaatatatattgaaagaaatgattttatggaagaacctcccaaaaagttttttaggcttagcccagggcaagaggtccgattgaaatttgcatattacattacctgcaatgaggtaaaaaaagatgaaaaaggtaaaataattgagctgaggtgtacatatgacccagttaccaaaggaggtagaagtgaggatggtagaaaagtaaggggcacactacactgggttagtgcagaggaaaatatcaaagcaaaaattagactttatgataggctctttaatagtgaacaccccgaaaaaaatggagattttatagaaaacattaatgaagagagtctcgaaataatcgataacgcaattttggaaaactcatttaattcagaagtctctgattttccttatcagtttgaaagaattggctattttaagattgatagcaaagattcatctagtgagaagctagtttttaatcgagccgtttcattacgtgattcatgggcgcgctataataaaaaagttagccaatgag

SEQ ID NO: 300266 - DNA, 900 bp, Unknown
  Bacterial polypeptide expressing nucleotide sequence isolated from the Sargasso Sea
atatggcttttgcgctgacaagcaaaagaaagttacatgccttaattgaaaacggggtagttgatggctgggatgatccgcgtctagtcacaatttcaggaatgagaagaaggggttatccaccgaatgctattttggatttttgtgaaagaataggtataacaaaaaaagataattacatagaaatgggcgttttggaaaattctgttagagaggaattgggcgacacaacacaaagaaggatgggtgtcctagatcctcttaaagtgaccatacaaaactttgaaaatgacaaagttgaggtgctagaagcacaaaatcacccacaaattcctgagtttggaatgagaaagatctcattcaccaaagaactttacatagaaaaaggtgattttagagaagatgcaccaagaaaatttcatagacttaagccaggcggagaagtgaggctaagatatgcatacattataaaatgtgaggaggttgtcaaagattcaagtggcaatataaaagaattaatatgcagctatgatcccgacacaaagagtggtactggcaaaagtgataaaaaggtcaaaggaacaattcattgggtatccgctaaagattcatttgatgctgagataaggctttatgatcgattgtttaaagagcataacccagcagcatcggatgatttagaaaggacaatcaacccagattcactcaaaactgttcaagctaagcttgaggactctcttggagtagaagatgcgcctccttcttttcaattggaaagaacaggttatttttgtcttgacaccaaacttagcaatggaaagaaaagaatttataatcgaatagttactcttagagactcttgggcaaaaattgaaaaagctgctatgtctcagggataga

SEQ ID NO: 300267 - DNA, 875 bp, Unknown
  Bacterial polypeptide expressing nucleotide sequence isolated from the Sargasso Sea
ggtgagcaaacggctcctcaccatcctggtggaacagggggtggtaggcaattgggatgatccgcgtatgccgaccttgtcgggcatgcggcgcaggggctacccccccgaagcactggtggacttctgcactcgtattggcgtaacccgaaaccagcagaatgtcgaactcagcgttctggacaactgtgtccgtgaggcgcttgatcccggcacaccccgggcattcgcggtcacacgtccgcttaagattgttattgaaaactatcccgaggatgaggaagaggaactagaagcgctcaatcatccgggagacgaatccctgggaacccgatcgctgcctttctgccgggaactctatatcgagcaggaggatttcctcgaagaccccccgaaaaagttttttcgactcgcgccagggcgcgaagtcagactgcgttatgcctatctcgtgacctgcacagaggtgatcaaggattcgtccggcgagattattgaagtccgttgtacctatgaccctgagacacggggcggcaatgcgcctgacggccgcaaggtcaaaggaaccattcactgggtatcggcccggcacagcgcgcaggctgaggtccgactttacgaaccgcttttcgttgacccggaaccgcatgtctcaacggaagatgatctgcaaaacgcgctcaacgaaacttccctcaccactctggacaacgttcaggttgagccgagtctggccgacgcggctccgggatcgatctttcagtttgaacgcctgggatacttctgcgtggatcgggacagcaccgatgcaaagaaggtattcaaccgcacggtcgcgttgcgggactcctgggcaaagaccaagtcaaaatagc

SEQ ID NO: 300268 - DNA, 211 bp, Unknown
  Bacterial polypeptide expressing nucleotide sequence isolated from the Sargasso Sea
ttggttcaaggttctgaccatctgggaaatgagcaaaaagttgttacccgttttccacctgagcctaacggttatttgcatattggtcatgctaagtctatctgcctaaattttggcatagctaaggcaaataatggtgaatgccatttgcggcttgatgatacaaatcctgtcactgaggatataaaatatatttcttcccattgttgaa

SEQ ID NO: 300269 - DNA, 907 bp, Unknown
  Bacterial polypeptide expressing nucleotide sequence isolated from the Sargasso Sea
agagagtttgcaagacttaatcttagccacaccataacatctaaaagaaagctgcttgcactggttgaaaaagggtttgtttctggatgggacgaccccagaatgccaacaatttcagggcttagaagaagagggtatacccctgaagctttaaaaaagtttgtaactactgcgggtgttgcaaaaagagaaaacataattgaaatgtctctattagagttttgcgcaagagaagaccttaacaaaaagtgtaataggctcatggttgtgcaagaccccttaaaaattactatttcaaattatcctaaccaacaagccgaagagcttgagctaattaacaaccctgaaaatccagactctgggtctaggctggttcctttttctaaagaagtttatatagagcaaacagactttttagaagcccctcctaaaaaatactttagattatcgcctggcaatgaggttagactaaagggcgcatatataataaaagcacaagaagtaattaaaaacgctaaaggaaaaataagcgagatcatttgctcatatgatccaaattctaaaagcggatcaggaacccccgaaagtcaaagaaaagttaaaggtactttacattgggtttgttgcagctcaaacacacctgttgaaattagagaatacgacagattgtttgagcacccatcaccaggagacttttctgaagaagatcttgcacaagccatcaacaaggattctgttaaggtctttaacggatatggcgaaaaagagctttctaaatcatctatttctgagtctttccaattccaaagaaaggggtattacattaaagacactgactctaaaaaaaacaaacatgtttttaataaaacagtgtctcttagggataattggaaaaagaaaaactaac

SEQ ID NO: 300270 - DNA, 766 bp, Unknown
  Bacterial polypeptide expressing nucleotide sequence isolated from the Sargasso Sea
ttattttgtcaacgtatcggaatttctaaaagcgagaacaatattgatatgagcattctggaagattgcgcgcgtgaagttctagacaaaacagcccctcgtattatgtgtgttttgaacccactgaaagtcattattacaaattatcctgatgacaaggcagagaattttcaacctgcaagacatccaaaaaacccggaaatgggaacccgtaaagtacctttttcaagggaaatttatatcgaccatgacgatttccgtgaagacccgccacccaattatttcagacttgcacccggaaaagaagtccgactgcgctacgcatatgttattcgctgtgatgaggtaatttatgacgaaagaggaggtgtatctgaactgcactgcacatatgatcaggcaacacgttccggtgcaaaacctgaaggaagaaaagtaaaagggataatccactgggtttcagcaaaagattcagtacaggtggaagttcgtttatacgatcgtcttttcgctaaacctattccagggagtgatgacccggaaggaaattttctcaatgatatcaatagggattcaattgaaattctttctaaatgccagatagaatctgaaactattacttctacgaaccaggaagtttttcaattcgaacgcctaggatatttttatccggacccagtagattcccacgcagaggctatggtctttaatcgcacagtaacacttcgtgatacctgggcaatactggaacaggaacaaaactgat

SEQ ID NO: 300271 - DNA, 820 bp, Unknown
  Bacterial polypeptide expressing nucleotide sequence isolated from the Sargasso Sea
gcacgtttcaggatgggatgatcctagaatgccaaccatatccggactcagaaaaagaggctatccagcaagtgccataagagaattttgcaacagagttgggattactaaaaaagataagaccattgaaatgtcgcttctcgagagcactgttagggaagaattagattcatcctgcaacagagtcatggccatcttgaatccattaaaagtgacaatcaagaattacccggaaggcgagactgaaatgctcgatgcaaggaatcatccaaaagacaaagaaatgggaagcaggcaattgcctttcaatcaaaatattttgattgagaaagatgatttcatggaaaatccaaacgaagacttcttcagactctcgccgggcgctgaagtcagactcagatatgcatacatcattagatgcgatgaagtcattaaagatgagagtggtgaaatagtagagctcatatgctcatacgatcctgaaacaaaaagtggtactggaacatcaaacaagaaagtcaaaagtgcaatccactgggtttcttcggatcatgccgtttctgggaatgttaatctttttgaaacactctataacgatccaaatccaaactctgagagtccgatcaatcaaaactccatggttgaaatccataaccctgcatttgaaaaatctattgttgatgctgatgttggcactcgatttcaatttgagagaaatggatatttcattctaaacgaagttgaagacgagagactttcgttcaatagaattgtaaccctcaaagacacttgggcgaaaattcagaaaaaaatggggtaa

SEQ ID NO: 300272 - DNA, 211 bp, Unknown
  Bacterial polypeptide expressing nucleotide sequence isolated from the Sargasso Sea
atgaacaaaaatcaaacccctgctccaactccttcgcattttatcagcaagatcatcgaggccgatctagaatccggcaagcatcagcaggtggtgacccgctttcctcctgagccgaacgggtttctccatatcgggcatgccaagtcgattttcctcaactttggaatgccacagtactatggcggccattgcttcattgcgttttgat

SEQ ID NO: 300273 - DNA, 924 bp, Unknown
  Bacterial polypeptide expressing nucleotide sequence isolated from the Sargasso Sea
aaataagaccaaaacaaagagagtttgcaagactcaaccttagccacaccataacatctaaaagaaagttgctttcactggttgaaaaagggtatgtctctggatgggacgaccccagaatgccaacaatttcagggcttagaagaagaggatatacacccgaagccttaaaaaaatttgtaactactgctggtgtggcaaaaagggaaaacataattgaaatgtctctattagagttttgcataagagaagatcttaacaaaaaatgtaacaggctcatggttgtgcaagaccccttaaaaattactatttcaaattatcctaaccaacaagccgaagagcttgagctaattaacaaccctgaaaacccagactctgggtctaggttagttcctttttctaaagaggtttatatagaacaaacagactttttagaagaccctccaaaaaaatactttagactatcacctggtaacgaggttagactaaaaggcgcatatataataaaagcacaagaagtaattaaaaacgctaaaggaaaaataagcgagatcatttgctcatatgacccaaactctaaaagcggatcaggaacccccgaaagtcaaagaaaagttaaaggcactttacattgggtttgttgcagctcaaacacacctgttgaaattagagaatacgatagattatttgagcacccatcaccaggggacttttttaaagaagatcttgcacaagccatcaacaaggattctgttagggtctttaacggatatggcgaaaaagagctttctaaatcatctatttctgagcctttccaattccaaaggaaggggtattacattaaagacactgactctaaaaaagacaaacatgtttttaataaaacagtgtctcttagggacaattggaaaaagaaaaattaac

SEQ ID NO: 300274 - DNA, 943 bp, Unknown
  Bacterial polypeptide expressing nucleotide sequence isolated from the Sargasso Sea
tttaaaaagatgcaatcaggcaaatgcaaggaaggggaacacgttctacgtgccaagatagatatggcatcgggcaacatcaatatgcgtgatccaatcatttacagaataatgcaccatagtcatccgaggactggtagtgcttggcatgtatatcctacttacgattttgcgcatgggcagtccgacgcccttgagaatatatctcactctatttgcacattggaatttgaggatcatcgtcccctttatgagtggtttcttaacaatcttcccgtagcctctaagccccgacaacatgaatttgcccggctctcccttacccacacggtcctctcaaaaagggtcctaacccgccttgtggacgaaaaacttgtgtcaggttgggatgacccaaggatgccgaccttggccggcctgcggcgcagaggctacccgcctgaggctatccgtgactttgctgcacgaattggggtctccaaacgtgattcgatagtcgacgtcgcaatgctggagcactgtgtaagaaacgttctgaatcaaaaagcgtccaggtatctcgccgtgctccgcccagtcaaagtaatcatagacaactatccgcccggcgaaaccgaacaactagaagctcccaataaccctaacgacgtggaggcaggtagcaggcgcattcctttttgtcgcgaactttacatagaagaagacgacttcatggaagagccaccaagaaagttttttcgtctcgcccccggtaaagaggtccgtctacgttatgcatacctcatcacatgcactaacatagttaaagataacacaggcaaggtgactgaaatacattgcacctatgaccccgaaaccaagggagggacactccggacggacgtaaagtcaagggcactatacactgggtcgctgtggactatgcgcacactgcagaggtcag

SEQ ID NO: 300275 - DNA, 456 bp, Unknown
  Bacterial polypeptide expressing nucleotide sequence isolated from the Sargasso Sea
catgagcaaaaaagataaatatcgaggcaaggatttcatccgtcagatgatccatcatgatattgaccaaggtgtcaatgatggaagattggcaacaagatttccccctgaaccaaacggatatttacacattggtcatgcgctttcgatctgtattaattttggtatagctgaagaatttgatgcgccctgctatctgagatttgatgacaccaaccctgccaaagagtctgatgaatatgtcaactcaatcatggaagatgtgaagtggcttggctttgattggggcaataaccttgcacatgcttctgattactttgaatcaatccatgaatttgccatagaactgattgaaaaagatcttgcctttgtcgatagccagacgagtgaagagataagaaatacaagaggaacactcaactctccaggtatgaaagtccatatcgtaatcgctca

SEQ ID NO: 300276 - DNA, 913 bp, Unknown
  Bacterial polypeptide expressing nucleotide sequence isolated from the Sargasso Sea
tgtatctcagacgccattgagggaataacgcactctctgtgtacactagagtttcaggataaccgtcgcctttatgattgggttatcgaaaacatttctatcgactgcacaccaagacagtatgaattctcacgtcttaatctagaatatacggtattaagcaagcgtcgtcttattcagttagtcgacgaaaaccatgtacatggctgggacgacccacgcatgcctaccattgcaggtttacgccgtcgcggctacacaccgggttcaatcgttgagttttgtaaacgcattggtgtgactaagatggacaacatggttgaaatgtccatgctagaagcgtgcatacgcgacgacctaaatgcaaatgctcctcgcgcaatggccgtactagatccaataaagctcgttatcgaaaattatgaggaaggccagacagaaacgctggttgcgccaaatcatcctaacgatgaaagtatgggtacgcgtaacatcggcttcagtcgcgaagtgtatatagaagcagaagacttccgagagtcggcgaacaagaagtttaagcgcttagtgcttgataaagaagttcgtcttcgcaacgcctacgtggttaaagcaaaccgcgtggaaaaagatgaaaatggttatgtcactaccgtttactgcacgtatgaccctgatacgcttggtaaagatccggccgatggccgcaaagttaaaggtgttattcattgggtggacgcagctacggcacaggcagcggagtttaggctttacgaccgcttgtttaacgtgcctaacccagcagcggaagagaactttaccgatgcgattaaccctgactcgttggaagtaaaacacggttgggtagaagccggaaaggcagacaatgttcctgaagtaggagcatggcagt

SEQ ID NO: 300277 - DNA, 811 bp, Unknown
  Bacterial polypeptide expressing nucleotide sequence isolated from the Sargasso Sea
catgagcaaaaaagataaatatcgaggcaaggatttcatccgtcagatgatccatcatgatattgactcaggtgtgaatgatggaagattggcaacaagatttcctcctgagccaaacggatatttacacattggtcatgcgctttcgatctgtattaattttggtatagctgaagaatttgatgcgccctgctatctgagatttgatgacaccaatcctgccaaagagtctgatgaatatgtgaactcaatcatggaagatgtgaagtggcttggctttgattggggcaataaccttgcacatgcttctgattactttgaatcaatccatgaatttgccatagaactgattgaaaaagatcttgcctttgtcgatagtcagacgagtgaagagataagaaatacaagaggaacactcaactctccaggtattgaaagtccatatcgtaatcgctctgtatctgagaatcttggattattcaatagaatgaaaaatggtgaatttgaaaatggagagcatgtccttagagcaaaaatagatatgtcatcgccgaatatcaatctaagggatcctgtgatttatcgtatcttgaacttagaacatcaaagaaccggtaagacttggtgcatatatccaatgtacgactttgctcacaccctatcagatgcaattgagggaacaactcactcactgtgtacacttgaatttgaggatcacagacctctatatgagtggtttcttgataacctcaatctatcaaccaggcccagacaaattgaattctcacgtttgaatgtggaacacaccatc

SEQ ID NO: 300278 - DNA, 660 bp, Unknown
  Bacterial polypeptide expressing nucleotide sequence isolated from the Sargasso Sea
tataccccagcgtctatccgcgagttttgccaacgtattggtatcactaagcaagaaaacatgattgaagcggcaatgcttgatgcctgcatccgtgaagagcttaacgaatatgcccctcgtgcgatggccgtactgcgcccattgaaagtcgtgattgagaactacccagaaggtcaaatcgagacgattcaagcggcttctcacccaagcgatgaaagcatgggtacacgcgaacttgcctttggccgcgaactgtatatcgatgtggcggatttcagagaagaagccaataagcagtacaagcgtctagtaatgggcaaagaagtgcgcctgcgtaatgcttatgtgattaaggctgagcgttgtgacaaagacagcgaaggtaatatcaccacggtttactgtagctacgatgcggataccttgggtaaaaaccctgccgatggtcgcaaggtaaaaggcgtaatccattgggttgaagcgactacagctaaacctgctgaattccgtttataccaacgcttgttcacggatccaaatcctgcagcagcagagacagtggatgaagtgcttaaccctaactcacttgaagtggtgaatggtttagttgaggcaagccttgtgaatgcgccagcggaaaaagcataccagtttgaa

SEQ ID NO: 300279 - DNA, 928 bp, Unknown
  Bacterial polypeptide expressing nucleotide sequence isolated from the Sargasso Sea
cccgctaaggaggagcaggaattcatcaccgcaatcgaggccgatgttcgttggctaggttttgagtggggagaacaccgatattttgcttctgacaacttcgagcagctttatgcctgggccgaacatctgatcgcggatgcgaaagcttatgtagatgatctctccgccactgaaatgagggaataccgcggcaccttgacagagccgggaaaggatagcccacaccgtaaccgaagtgttgacgaaaatttacgcctgtttcggcgtatgcgcgcgggcgaattcgaagacggcgctcgcgtactgcgggctaaaatcgacatggcctcgggcaatatcaacctgcgcgatccagtcctttatcggatcttgcgcgctcaacaccctcggaccggcaatgcttggtgcatctatccgacatacgattatgcccatggtcaatccgatgctatcgagggggtcactcactctttgtgcacgctggagtttgaagatcaccggccactctacgattggctcatagagaacctgccgacaccgtcgcggccacgccagtacgaattttcgcgcctgaatttgagctacaccgtgctatcaaaacgccttctcacgcagcttgtgcaagatggatacgtatcggggtgggatgaccctcgcatgccgacactagctggcctgcgccgccgaggcctgccggcggacgcactccgtgatttcacctcgcgcatcggcgttacgaaaagcgattctgtcgtggatatggcgctcttggaccattgcgtcagggacagtttaaataagtcggcgctccggcgcatggcagttcttgatccactgaagatagtgattgagaactatccagaaggcgaaagtgagcaactggaggcggtcaacaatccagagaacgacgcagacggaacgcgca

SEQ ID NO: 300280 - DNA, 880 bp, Unknown
  Bacterial polypeptide expressing nucleotide sequence isolated from the Sargasso Sea
tactacgcttcggattacttttctatattgtttgattttgcggttaagctaataaaggaaggtaaagcatttgtagacagccaaccaccagaaacaattcgatctcaacgtggttccttacagaaaccaggctccaacagtccattccgcgatagagatgtgaataccaatttggatttgttccatcgcatgcgggaaggagagtttaaggaaggagaacatatactaagagctaaaatagatatgtcctctcctaacatgaacatgagagaccccgccttatacagaatccgcgaaaaggatcactaccgaactggaaaccagtggaatatctacccgatgtacgacttcacccagtgcctgtcagatgctatagagggagtgactcactccatttgcaccctagagttcgaagatcacaggccgttgtacgattgggtgatagaaaacgtcgagaccagcaaccgcccgaaacaaatagagttcgccaggttagagatagattattcaatcacgagcaaaaggaaactcttgtctttagtggaagagggaaatgttagcggatgggatgatcccaggcttcaaaccatcaaagggatgcgaagaagaggctacccccctgaagccatcaaaaatttttgcgagttaattggcataacgaaaaaacaagcagtaatagaccttagcaccctggaaaactgtgttagagaagagctagataagaaagcacctagaataatggcagttttggatccccttaaggttataatcaaaaactttccaggaaatacctcagaacaattgaacgctccgaatcatcccaaggacagtactttcggcgagagaaaattaccgataacaaaggaaatctacatcgaaa

SEQ ID NO: 300281 - DNA, 620 bp, Unknown
  Bacterial polypeptide expressing nucleotide sequence isolated from the Sargasso Sea
aatgaacgaaaatcaaacccctgctccacctccttcgcatttcatccgcaagatcatcgaggccgatctagaatccggcaaccatcagcaggtggtgacccgctttcctcctgagccgaacgggtttctccacatcgggcatgccaagtcgattttcctcaacttcggaatgccacgggactatggcggccattgcttcatgcgttttgatgacaccaacccggtcaaggaggatgcgacctattcccaggcgattctggaggatgtccgttggcttgggttcgactggggaaaccggctgacccacgcatccgattatttcgagcaactctatgagttcgcctctgttctcatccgccggggaaaggcctatgtcgacagcctgagcgcagagaagattcgggaataccgaggcaccttgaccgaaccgggaagcaacagtcccttccgggatcgtaccattgaagagaatctggaccttttccaacgcatgcgtgatggggaattcgaagatggaagtcatgtgcttcgggctaagattgatatggcggcgcccaatatccatatgcgtgacccgaccctctaccggatccgcaaggtttcccaccaccgaaccggaa

SEQ ID NO: 300282 - DNA, 622 bp, Unknown
  Bacterial polypeptide expressing nucleotide sequence isolated from the Sargasso Sea
actgcctgcgacagattttatacgcaaaattattcatgaagatttggaatcaggaaaacaccaatgtcttgttacacggtttcctccagaaccaaatggtcatttacacattggacacgccaaatcaattcagcttaatttcggaactgcaaaggaattcaaaggaatctgcttcatgcgctttgatgacacaaatcctctcaaagaagaagaggaatatgtagaagggattttacatgatgtacgctggatgggctatgattgggaagataagcttacttacgcttcggattatttcgaacagctttatgaatttgctgaagaattaatcaaaaaggggaaagcctatgtagaaagtcagagcgcagaggaaatcaggaggactcgcggtacattaactgagtcgggaaggaatagtcccttcagggaccgtaatgttgaagaaaatttgaaacttttcagacaaatgcgtgcaggcgagtttgatgatggtacccatgttttgcgtgcaaaaattgacatggcctcaccaaacattaatatgagagatcctgtcctataccgtattcgaaaagttcctcaccagcgcactgctaacagctggtgtatttatcccctctac

SEQ ID NO: 300283 - DNA, 243 bp, Unknown
  Bacterial polypeptide expressing nucleotide sequence isolated from the Sargasso Sea
catgagcaaaaaagataaatatcgaggcaaggatttcatccgtcagatgatccatcatgatattgaccaaggtgtcaatgatggaagattggcaacaagatttcctcctgagccaaacggatatttacacattggtcatgcgctttcgatctgtattaattttggtatagctgaagaaattgatgcaccctgctatctgagatttgatgacaccaaccctgccaaagagtctgatgaatatgt

SEQ ID NO: 300284 - DNA, 784 bp, Unknown
  Bacterial polypeptide expressing nucleotide sequence isolated from the Sargasso Sea
atgactgtcgatacacaaaaaagcgatgagcctggcaatgacttcatacgacaacgaataaagagcgatgttagtgctaatggcttattgcatggagtaatcacccgatttcctccggagccaaatggatttcttcatattggacacgcaaagagtatttgcttgaatttcggtgtagcccaggaatttggtggcaagaccttccttcgttttgacgatacgaatcctgaaaaagaagacgagattttcgtccaatcaattttggaagacgttaagtggttaggttatacctgggatcacttgacctatgcgtcggattattttgagcaactttacacatttgcggaaggattgattctggatgggaaagcctatgtttgtagtctgacgagtgaggaaatacgcgaatcgagagggacgttgaccgaggttggtaagaacagcccttatcgggatcggagtattgatgaaagtctagaaatgtttaggtcaatgaagcagggcaagtttgaggaaggtagccaggtactcaggctaaaaatcgatatggcttcccccaatatgaatctgagagaccctgtcatttatcggattcgttatcaatcacatcaaagaactggagataagtggtgtatttatcccatgtatgactacacgcattgcatatgtgatgccctagagcatataagccactctctttgcacactggaatttgaggatcatcgacctttgtatgattgggtgatagaaaatattgatattgactaccaccctccacaaatag

SEQ ID NO: 300285 - DNA, 920 bp, Unknown
  Bacterial polypeptide expressing nucleotide sequence isolated from the Sargasso Sea
gactcagaaacaattgcatcacaaaagggaaccccaacaaaaccgcggaaaagaaagcccatataggagaagatctgaagaagaaaacctttccttattttcaaaaatgagagctggaaagtttgaagaaggggagcatgttttaagggcaaaaataaacatgtcttcaccaaacatgcttctaagagaccctgtaatgtatagagtaattaataagagtcaccagcgtaccttaaaaaaatggtgcatatatccaatgtatgactgggcgcatgggcaatcagactttatagaaaaaatatcccattctttatgcaccctagagtttaagccccacagggacctttatgaatggtttctctatgctcttggcccaaaactagataatgcgcctaagcaaagagagtttgcaagacttaacttgtcacacacaataacaagcaagagaaaattaaaaagactaatagacgaaggccacgttaatggatgggatgatcccaggatgccaactatctcaggtcttcgaaaaagaggatatacaccagagtctctgaaaaaatttgtccgcactgcaggagttgcaaaaagagaaaatataattgaactttctttgctagaattttgcattagagagcatttgaataaaatctctcctagaattatggcagttttagatccaataaaactaattatagaaaattatcccgaaggaaaagaagagcagttaattggagaaataaaccctgaagatccatcggaagggacaagaaagattcctttttcaaaagagctttttattgaaaaagaagattttcaagaacagacagaagaaggtttttttaggttaagcctaggacacgaagtgaggcttaaaaacgcttatataattaaagcgaaagagattaaaagggacgaagaag

SEQ ID NO: 300286 - DNA, 948 bp, Unknown
  Bacterial polypeptide expressing nucleotide sequence isolated from the Sargasso Sea
attgagagtccgttcagaaatcgcagcatttgaagaaaataaagatttgtttttgaggatgagagatggcgagttcaacaacggttcaaaaaccttacgcgctaaaatcgacatgggtcacccaaatatgaatatgagagatcctgtagtctatagaatattacatgcgcatcatcaccggaccaaagataagtggtgtgtttatccaatgtacgattgggctcatggattagaggactcaattgaaggaataacgcattctttatgttctttggagttcgaggatcacagaccactttatgattggtatttggagcaactgggtgtgtatcatccacaacaaatagaatttgctcgactcaatctcagctacacgattatgtcaaagagaaagctaaaaaaactagtagaaaatggcttagttgatggctgggacgatcccagaatgccaactatttcaggttttcgaagaagagggtatacaccacaatcaattaaaaattttatggaagaggtgggtgttgctaaacgtgacaatgtaatggacgttgcaaagcttgaatcttccttgcgaaccgatttaaataaaaggtccgatagaagaatggctgttttaaatccactgaaagtcgtgataacaaactatccaaaagattcagatgagctcgtcagagcaaaaaacaatcctgaagatgacagtgcgggagctagaaacataccgttttcaagagaaatatatattgaaaaagaagattttatggaaaatcctccaaaaaaatattttcgtttgtctcctggaagcgaggttcggttaaaatttgcttattttatcaaatgtaacgacgtaataaaagatgaatatggagaagttgtcgaactgcattgcacttatgataaaaatactaaaggtggaaaatcaagcgatggacgtaaaagtaaaaggaaccc

SEQ ID NO: 300287 - DNA, 855 bp, Unknown
  Bacterial polypeptide expressing nucleotide sequence isolated from the Sargasso Sea
gggaaagcctatgttgaaagtcagagctcggaggaaatcagaaagacacgcggaacattgactgaaccaggaaaggacagtccattcagggaacgtagtgttgaagaaaatctgaatcttttcaggcaaatgcgtgctggagattttgatgacggtaaatatgttttgcgagcaaaaattgacatggcctcgccaaacataaatatgagggatcctgtactataccgtattcgtaaattccctcatcagcgaaccgcaaacaggtggtgtatttatcctctctatgattttactcatggtttgtcagattccttagaaggtgtaacacattcactatgcacccttgaattcgaagaccatcgtcctctgtatgactggattttagctgaagtaagtgccccgtgcattcctcgtcaaattgaattttcccgtctcaatcttcgctatactgtgctcagcaaacgcaagttaatccagcttgttgaagagggccatgtaagtggttgggatgacccccgtatgctgactctttcaggccttagacgcaggggttaccctccttctgcaataagattgttttgcgagcgcatcggaatttcaaaaagcgcgaataatattgatatgagcgttctggaagattgtgctcgagaagttctggataaaaaagctcctcgtatgatgtgcgttttgaaaccgctgaaagtaattattacaaattatcctgaagataaggcagaggaattcgaacctgcaaggcatccaaagaatccggaaatggggaaacgcaaagtgcctttttctagggaaatttatattgacaaagacgatttccaagaagacccaccaccaaatttt

SEQ ID NO: 300288 - DNA, 995 bp, Unknown
  Bacterial polypeptide expressing nucleotide sequence isolated from the Sargasso Sea
aaatataacccactcgatttgcactctggagtttgaagatcatagaccactatatgactggtatctaaattgtctgaatgtttatcaccctcagcaaattgagttcgccaggctaaatctaaattatacaattatgagcaagcgtaaactaaaacgattagttgatgagggatatgttgatggttggagcgaccctagaatgcctacaatttcaggtttgagaagaagaggatacactcctgaatcgataaaaaacttttcagatgcaataggtgttactaaaagagacgctattgttgatgttgctaaactagaaaattcattaagagaagatttgaataaaaaagcacctcgggtaatgggtgttttagagcctataaaagttataataactaactatcctgataatgaaatcgaatatctagatgcaaaaaataacccagaggatgaaagtgctggtaaacgaaaactagctttctctaaggaaattttcattgacaagaacgacttcatggaagaccctccgaaaaaatttttcagattaagtccaggtaaggaggtaaggttaaagttcgcatattatattgtttgtgaaaatgttattaaaaatgataacggagaaatcaccgaaattcattgcagttatgatcccaacacaaaaggtggtatgtcagaagatggcagaaaagttagaggtacacttcactgggttagtactcaggaatgtatcgaagcagaggtaagactttatgataggctttttatgagtgataatcctgagaataatggcaatttttttgatgatcttaatccagaaagtttaagtatcataaaaaaagcaaaattggaatcttccttgagcactgcttcaactgaaacaatatatcagtttgagagaacagggtatttcataaaagatagtaaagactctagcgttaataatcttatatttaacagagctgtgtcgctgagagactcttgggcaaggttaaatc

SEQ ID NO: 300289 - DNA, 313 bp, Unknown
  Bacterial polypeptide expressing nucleotide sequence isolated from the Sargasso Sea
aatgtctgataattctaaccatgaatcaagtaactttattcgaaatatcattaaagatgatgtaaagaataaaaaaaacaagagtctcgttcatactagatttcccccagaaccaaatggataccttcatataggtcatgccaaatcaatttgtttaaattttggaattgcagatgattttaagggcggtctttgcaatcttcgttttgatgatactaatcctgcaaaagaggatcctgaatatacagactcaatacaacaagatgtaaagtggctgggatttgattggagtgatcgacttttttatgcatca

SEQ ID NO: 300290 - DNA, 943 bp, Unknown
  Bacterial polypeptide expressing nucleotide sequence isolated from the Sargasso Sea
gtttttagaaaaccttcctgtattatctaaaccgaggcagtatgaattttcaaggttaaaccttagtcatactgtactatccaaaaggaagttaattaaactagtagaagataattttgttttaggttgggatgatcctagaatgcctactatagctgggatgcgcagaagaggagtaccaccaacagcaataaaagattttatagaaagaattggagttactaaatcagacggcatagttgaaatgtcttatctagataatacaattcgtgaacatttaaatcagacatcacttcgtcggatggctgtgctagatccattaaaagtaataatagataattttccagaagatttagaagataaattggaagcaataaataatccaaatgatgaatctgctggtacccgcgaaatttcattctcacgtgaaatatatatagaacggtccgattttctagaagacccaccaaataaatattttaggctagctcccggcaaagaagtaagactgcgttatgcttatttagtaacatgtacgaaagtaataaaagacagtaacggaaaaatattagaagttcattgtttatatgacccagaaagcagaggtggaaacgcccctgatggacgaaaagttaaaggaacgattcactgggtctccgcccaatattcaaacaaggcaaatgtaaatctttataaaaatctatttaatagtgaaatgccagatactggtgaagattggttagataatattaaccaagattctcttgaggttcgtgaaaattgttatatagaaaatgctctcaccaactctaccgccggcgagacagttcaatttgaacggttaggatacttttgtttagattcttcttcagaaataaacaatatagtgtttaatcgaactgtctccctacgtgatacttggacaaaaaaaacatctaaaagt

SEQ ID NO: 300291 - DNA, 961 bp, Unknown
  Bacterial polypeptide expressing nucleotide sequence isolated from the Sargasso Sea
ggatctcgggtactaagagcaaaaattgatatgaaagccggtaatattaatttgagggacccggtgatttatcggatttctgatatttcccatccacgaacgggagaattgtggaagatttatccaacatatgattttgctcatggtcaaacagatgcgatagagggtattacgcattcactctgtacactggagtttgaggatcatcgaccgctttacgactggtttattaaaaatttaccggttccggcaaaacccaaacagtatgagttttcccgcctaaaccttgaaaataccgtgttgtcaaaacgccgtttgaatttactcgtagaaaaacagctggtttcagggtgggatgaccccaggatgccaacagtctcaggcctccggcggcgaggcgtaccagcttttgctatccgagattttatatcgcggctctctattggtaaatctgagggaatagttgagagcgctatgctcgaccattgtgttcgtgactacttaaataaatttgccgagaggcgaatggcggtcttaaggcctttgaaaatagtcattagaaattatccaaagaataaaacagaggaaattgacgcgctaaatcatcccggtgatgaaagtaagggtagacgaaagttaccattttctcgggaaatttatgttgaacgtgatgatttcatggaatctcctcctaagaaattttaccgacttgggccaggtcgggaagtgcgactaaggtttgcctaccttgttacttgcgaggaaattatcaagaatgaaataggcgatgttgttgaattaaggtgtagctatgatcccgagagtaaaggagggaatgcgcctgatggtcgtaaggttcgtggcacgatacagtgggtctctgcccaacatgcaatccctgcggaggtacgtctctatgaacctttattcaagaattctgctgatgcaaatgaagacgatt

SEQ ID NO: 300292 - DNA, 802 bp, Unknown
  Bacterial polypeptide expressing nucleotide sequence isolated from the Sargasso Sea
ccgaggatgtcgacgctttctggctttcgtcgtcgcggttacaccccggcgtcgatccgcaatttctgcgacatgatcggtgtgaatcgcgccggtggcgtcgtcgacatcggcatgctggagttcgccatccgcgaagatcttgatgccaatgcagcccgtgcaatgtgcgtgctcaagccgctcaaggtggtgattaccaactacccggaaggtcaggtcgagaacctcgagctgccgcgccatcccaagcaggatatgggcgtgcgggttctgccattcagccgggaactctacatcgacgccggcgacttcgaggaggtccctccggctgggttcaaacgcttgattccgggcggcgaagtgcgcctgcgcggcagctacgtcattcgtgccgatgaagccgtgaaggatgatcagggcaatatcgtcgagctgcgctgttcctatgacgagaacaccctcggcaagaatccggaggggcgcaaggtcaagggcgtcatccactgggtgccggccgccgagagcgtcgagtgcgaggtgcgtctgtacgatcgcctgttccgctcggccaatccggaaaaggacgaggagggcggtagcttcctcgacaacatcaatctggagtcgctggttgtgctcaaggggtgccgtgccgagccgtcgctggccagtgccgaacctgaagagcggttccagtttgaacgcgaaggctatttctgcgccgacatgaaggacagcaagccgggcgctcccgtgttcaaccgcaccgtcacgctgcgtgactcctggggtcaatgat

SEQ ID NO: 300293 - DNA, 622 bp, Unknown
  Bacterial polypeptide expressing nucleotide sequence isolated from the Sargasso Sea
catgaataaaaattttatacaaaaaataattgatgagcataacgaaacgggaaagttcaaatctaaagtccatacccgttttccgccagaaccaaatggctatctacatataggtcacgctaaggcaatatgtttgaatttcaatattgctgaggagtatgatggtaaatgcaacctgcggtttgatgataccaatccattagctgaagaagatgaatatgtacgctcaatccaagatgacgtcaaatggctgggttttgattggaagggtagaatctattttgcttcagattattttcaacaaatgtacgattatgcaattcaattaattaataatggcaatgcttatgtttgtgatttgacatcggaagaaattaaagaaaaccgcggcacacttcaaaaacctggtactgagagcccgtacagagacaggtcattagatgaaaatctaaatctttttgcccgtatgaaatctggcgaatttgaaaatggttcaaaaaccttgcgagcaaagatagacatgtctcatcccaatatgaatatgcgagatcctgttatatataggattttacacgccaatcaccatagaacagctgatagatggtgtatttatccgaatgta

SEQ ID NO: 300294 - DNA, 500 bp, Unknown
  Bacterial polypeptide expressing nucleotide sequence isolated from the Sargasso Sea
aatgaaagatagcaaaccaagagattttataagacagatcattcatgatgacacgaagaatcaggattcaaggaaggtgattaccagatttcctcctgaaccaaatggattccttcatattggccatgcaaaatcaatttgtcttaattttgctgtagctcatgaaaataagggtaaaacttttcttcgttttgatgacaccaatccacttaaagaagatgatgtttatgttcagtcgataaaagaagatgtttcatggcttggattcgattgggaagacaggctgacatttgcgtcagattattttgaaaatctttaccaatcggcaattaaattaataaataaaggactcgcatatgtggatagcctcaatgcagatgaaataagagaatacagaggcactctaactgagcctggaaaagacagtcctttcagaaatagatctcctgaagagaatttagagttatttcagagaatgaaaaacggtgaattttcagatg

SEQ ID NO: 300295 - DNA, 339 bp, Unknown
  Bacterial polypeptide expressing nucleotide sequence isolated from the Sargasso Sea
catgaacaaaaaagataaatatcgaggcaaggatttcatccgtcaaatgatccatcatgatattgactcaggtgtcaatgatggaagattggcaacaagatttcctcctgagccaaacggatatttacacattggtcatgcgctttctatctgcattaattttggtatagctgaagaatttgatgcgctctgctatctgagatttgatgacaccaatcctgccaaagaatctgatgaatatgtcagctcaatcatggaagatgtgaagtggcttggctttgattggggcgataatcttgcccatgcttctgattactttgaatcaatctatgaacttgc

SEQ ID NO: 300296 - DNA, 557 bp, Unknown
  Bacterial polypeptide expressing nucleotide sequence isolated from the Sargasso Sea
aatgaaaaatttcatccaaaagattattgatgaggataacctatcaggcaaatggagtagccgtgtacatactcgatttccaccagagcctaatggatatttgcatatcggacatgcaaaatctatttgtcttaattttggtatcgccgaaaaaaataatggaaaatgcaaccttcgctttgacgatactaatccagtaaaagaagaagacgagtatgtaaggtccattatcgatgatgtaaagtggttaggctttgattgggaagagagattatactatgcatcagattattttgatcagatgtacgatcatgccttaacacttattcaaaatggcgatgcatttgtttgcgatcagagctcagatcaaatgagggactgtaggggcactcttaagcaaccaggagaagaaagtcctaatcgcaacaggagtatagaagaaaatcttgaattatttcagcgtatgaaaaatggagattatccagatggacagaaaacgctgagagctaaaatagatatgtcacattctaatctcaacatgcgtgatccggtcatct

SEQ ID NO: 300297 - DNA, 472 bp, Unknown
  Bacterial polypeptide expressing nucleotide sequence isolated from the Sargasso Sea
atgagtgaaagtaatactgtaataaaaaacttcatccaaaaaatcattgatgaggataacctatcaggcaaatggagtaaccgtgttcatactcgatttccaccagagcctaatgggtatttgcatatcggacatgcaaaatctatttgtcttaattttggtatcgccgaaaaaaataatggaaaatgcaatcttcgctttgacgatactaacccagtaaaagaagaagacgaatatgtaagatccattattgatgatgtaaagtggttaggctttgactgggaggagagattgtactatgcatcagattattttgatcagatgtacgatcatgccttaacacttattcaaaatggcgatgcatttgtttgcgatcagagctcagatcaaatgagggactgtaggggcactcttaagcaaccaggagaagaaagtcctaatcgtaacaggagtatagaagaaaatcttgaat

SEQ ID NO: 300298 - DNA, 827 bp, Unknown
  Bacterial polypeptide expressing nucleotide sequence isolated from the Sargasso Sea
cccaatggatatcttcatattggccatgccaaatccatttgcttgaattttggaattgcagaaaaaaataacggtaaatgtaaccttcgttttgacgatacaaatccgacaaaagaagatgatgaatatgtaaaatctatcattgaagatgttaagtggctggggtttgattgggaggatcgtttgtattttgcatctgactattttgaacagatgtattctcatgcgattaccttgataaaaaatgggaaagcttatgtgtgtgatcagacgagccaagagataagagaatgtcgcggtacgcttaaaaatccaggcatagagagcccatttagaggtaggagtatagaagaaaatctagatttgtttggtaaaatgaaaatgggtgaatttggagatggagccaagaccctaagagcaaaaatagatatgtctcatcctaacttgaacatgcgagatcctgtaatatatagaattcttcatgcatctcaccataggactaatgacaaatggtgcatatatccaatgtatgactgggcacatgggcttgaagattcaatagaaagaattacacactccatttgcacacttgaatttgaagatcacagacccttatatgattggtatctcaaacagctggatatttatcacccacaacaaattgagtttgcgagactaaatcttaattttacggttgttagtaagcgtaaactaaaacaactagtcgatgagaggatcgttgatggttgggacgacccaaggatgcctaccatttcaggacttcgaagaagaggctacactccaaaatccataagaaaatttgctga

SEQ ID NO: 300299 - DNA, 328 bp, Unknown
  Bacterial polypeptide expressing nucleotide sequence isolated from the Sargasso Sea
aatgacagcgaataacaatactgataattttataagaaagattattgatcacgataatgaatcaggaaagtgggatgggagagtccacactcgttttcccccagagccaaatggctatttgcatattggtcacgcaaaatcaatttgtcttaattttggtttggcgatagagtatgatggaaaatgtaatcttagattcgatgacacaaatcccctaaaggaagaaagtgagtatgtaaggtcaatcattgaggatgtttcgtggctaggtttttcatggggtaatgaacctctgttcgcttcggattatttggccaaatgcatgact

SEQ ID NO: 300300 - DNA, 249 bp, Unknown
  Bacterial polypeptide expressing nucleotide sequence isolated from the Sargasso Sea
tatgaacaagcccgacgctacccctccgagtcacttcctgcgccagatcgtccaggccgatctggacagtggcaagcacagcagcattgtcacgcgttttccgccggagcctaacggctacctgcacatcgggcacgccaagtcgatctgtctgaactttggcctcgccaaggaatttggtggtgtctgcaacctgcgctttgacgacaccaacccggccaaggaagaacaggaatacatcgacgccat

SEQ ID NO: 300301 - DNA, 886 bp, Unknown
  Bacterial polypeptide expressing nucleotide sequence isolated from the Sargasso Sea
aaaggcccaaactttatagagcaaattatagacggagacatatctagggggtttaaaaaagacaacttaagatttaggttccctccagagccaaacggctatttgcacatcggccaccttaaagcaatctgtttaaattttaatcttggagaaaaatacggagccccagtaaacctcaggtttgatgacacaaacccagaaaaagaagcgaaagagtatgttgatgctatcaaaaacgatattctttggctaggatataagtggaataaagagtgctatgcttctgattattttgaacagctttataattgggcgattgtgcttatagaaaaagatcttgcctacattgactcgcagtcatcagaggacatagcaaaccaaaaagggacccccacaaaagatggtaaaccaagcccctatagagacagggacaaagaagaaagccttaagatctttaaagaaatgcacaatggagaccacaaacaaggagagcacgtattaagagcaaaaattaatatgtcttcaccaaacatgttaatgagagatccggttatttacagagcaatggaggtaaaacaccatagaacaggagactcctggaagatataccctatgtatgattggacacatggagagtctgactacatagaacaagtgtcacattcactatgtactcttgagtttgagcctcaccgcgagctctacgattggtttctagactccattagtcctttaaaaggagttaggccaaagcaaagagagttttcaaggcttaacctttcttataccataacaagcaaacgtaaccttgcaaaactagtagaagaaggggttgttggtggttgggacgacccaagaatgccaacaatttctggtttaagaaaca

SEQ ID NO: 300302 - DNA, 994 bp, Unknown
  Bacterial polypeptide expressing nucleotide sequence isolated from the Sargasso Sea
cgacatgctaggcatcatcagaccggcgataagtggtgtatttatcctacttacgatttcacgcattgtatttctgatgcaattgagaacgtgacacactctttatgcacactcgaatttgaggatcatagacccttatatgattggattttaaataacttggattcggattcattgcgggtgatcagtgatctatccgacagtgacatgacctttgtcttacctcaacaaaccgagttcgccaaattaaagttaaattacacgattatgggtaagcgaaaacttaaagaaatggttgaaatgggtttagttgatggatgggatgatccaaggttgcctactttagcaggcatgaggcggagaggttttacggcggcttcgattcgaaatttttgtgaaactgttggagtaagtcggtcagaaggtacggtcgatttaagtatgctcgagcattgtgtgagggaagacttggatcagtgcgcttcaagagtcatgtgcgttcttaacccaatgaaggtaaccatcaggaatattaaggaaagtgaagtcgagaatttaagcttacaaaatcacccaaaaaacgaatcaatgggaacgaggactgtaccatttacgcgtgagatttatatcgataggtctgattttgaagaaaatccagcacctggattcaaaaggttagtgctcgggggtgaagtaagacttcggggatcctatgtgattaagtgcgaagaaattttgcgagatagtgagggagaaattattgaactgatctgttccgcagacagagaaacactaggtaggcgtcctgagggacgaaaagtaaagggagtcatacactgggtatctgcagtatatggtcaagaggtctcgctaatgctctacgacagattattcatggtagaaaatccagaggctaaagagattaaagattacaaagaatttcttaatcctgagtctttgtcagtagtaaaaaattgtgtgatcgaaccctctg

SEQ ID NO: 300303 - DNA, 565 bp, Unknown
  Bacterial polypeptide expressing nucleotide sequence isolated from the Sargasso Sea
ctgactgcaacagattttatacgcagtattatccgtaatgatttggaatctgggaaacataagcgtcttgtgacacgattccctcccgaaccaaatggtcatttgcacatcggacacgccaaatcaatacagcttaatttcggaactgcggaggagtttaaaggaatctgcttcatgcgttttgatgatacaaacccacttaaagaagaagaggaatatgtagatggaattttgaaagatgtccgctggatgggatataactgggaaaaacggatcacttacgcttcagattatttcgaacagctttatgaatttgctgaagaattaatcaaaaagggtaaagcctatgttgaaagccaaagtgctgacgaaatcaggagtaaacgcgggacattgactgaaccaggtattaacagtcccttcagggaccgcagtgttgaagaaaatctcaccctttttagacaaatgcgcgcaggtgagtttgatgacggcaatcatgttttgcgcgcaaaaattgatatggcctcaccaaacataaatatgcgtgatcctgtactttaccgta

SEQ ID NO: 300304 - DNA, 793 bp, Unknown
  Bacterial polypeptide expressing nucleotide sequence isolated from the Sargasso Sea
tatgcctactattgcaggtttacgccgtcgtggttttactccagcgtctttgcgtgagttcgctaaacgtattggtgtgaccaagcaagacaatatgattgaaatcagcgctttggattcctgtatccgtgaagatctagatgccaatgcgcctcgtgctatggctgtgatcgatccgttaaaagtgaccatcagcaactacaacgccgccgatgtggaatggttagaagtgcataaccatccaaaagaagaaagcatgggtagccgtaaagtgccgtttggccgtactttgtatatagaccgtgccgacttccgtgaagaagccaacaaaaagtacaaacgtatggtcacaggtggcgaagttcgcttacgtggcgcttatgtgattcgtgctgatgaagtgattaaaaacgaagcgggcgatattgttgaactgatttgttcttacgatccggacactttaggtgtgaacccggctgatggccgtaaagtgcgtggtgtaattcactgggttgaagcgtcacaagctgtgcctgctgaattccgtatttacgacaagttattcacagtagctaaccctgctgctgaagaagactttttagctgtaattaatccggcttctttaactgtgaaaacaggttgggttgaaccaagtttaaaagcagctgaagcagaaaaagccttccagtttgagcgggaagggtattactgtgccgacaacaaagattcaacgccggatcatttggtgtttaaccgcactgtagcgctgcgcgataccttcttcgaagactaa

SEQ ID NO: 300305 - DNA, 766 bp, Unknown
  Bacterial polypeptide expressing nucleotide sequence isolated from the Sargasso Sea
ctcacagcggatgaaattcgggaatataggggcacccttacagaagttggtcgagatagcccttatcgcaataggtcgactgaagagaaccttcaaatttttcatgatatgagagatggtaagtttccagaaggagagcgagtattacgagctaagatagacatgggttctggtaatattaacctacgcgaccctgttatctaccgaatcctgaatgcacatcatcctaggacaggtgacacttggtgtgtttacccaacctatgactttgcacatggacaaacagatgcgttagagggtgtcacccattcactttgtacattggagtttgccgatcatcggccactttatgaatggtttatcgaagctttgcctgttccatctgagccaaaacaatacgaattcgcaaaattacaaattagccacaccgttttatctaaaagaaatctcactcggttagtgatggaacaacatgtgagtggttgggatgatccacgactgcctactctttcaggtctgagaaggcgaggcgttccagcagaagcagtaaaagattttgtagcgcgagtttctgtatcaaaaaatgaaggcgaagtggagcttgcattattggagcactgcataagagataatctaaattacagtgctgaacgaagacttgctgtattaaaacctctaaaggttgtaatagaaaacttcccagaaggaaaaattgaatggttgccagctctaaataatcccaattcagataaaccagaacaacgag

SEQ ID NO: 300306 - DNA, 367 bp, Unknown
  Bacterial polypeptide expressing nucleotide sequence isolated from the Sargasso Sea
atgaaaaataaaaataaacattttatccaaaagatcattgatgaacataacagctcaggaaaatttaataataaagttcagacacgctttcctcctgaacctaatggatatctgcacattggacacgcaaaagcaatctgtttaaatttcaatatcgcagaagaatataatggaaaatgcaatttgcgatttgatgatacaaatccaattgctgaagaggaagaatttgttcgatctatccagaaagacgtaaagtggttgggatttgattgggaggatcgtttatgtttcgcctcagattattttcatcagatgtatgaatatgcaatacaactaatccaaaaaggttcggcttatgtttgtgagc

SEQ ID NO: 300307 - DNA, 637 bp, Unknown
  Bacterial polypeptide expressing nucleotide sequence isolated from the Sargasso Sea
ctggccgtgctgcacccggtgaaggtggtgatcgagaaccttgcggccgatgaggtgctgaccgcccctgcgcacccgaacaagccggagatggggacccgtgagctgcatttctcccgcgaaatcttcatcgacgaggcggacttcaaagaggaagccaacaagcagttcaagcgtctggtgctgggcaaggaagtgcgcctgcgcaacgcctacgtcatcaaggccgaacgggtcgagaaggatgcggacggcaaggtcacctgcatctactgctcttacgaccccgagaccctgggcaaggatccggcggacggtcgcaaggtgaaaggggtgatccactgggtcagcgccactcactccctgccggccgaagtgcgtctctatgaccgtctgttcaaggtgccgaacccgggcgccgaggatgacttcgaagcggctctgaatccggaatccctggtgatcatcgaaggggcccgggtggaagcttctctgaaggatgccaagccggagtttgcctaccagttcgagcgtgaaggttacttctgcgccgacaacaagctctccagcgccgagcgcctggtgttcaaccgcaccgtggccctgcgtgacgtctggggcaaggccgaggtctgat

SEQ ID NO: 300308 - DNA, 533 bp, Unknown
  Bacterial polypeptide expressing nucleotide sequence isolated from the Sargasso Sea
aacaactcaggaaaatttaataataaagttcatacacgctttcctcctgagcctaatggatatctgcacattggacacgcaaaagctatctgtttaaatttcaatatcgcagaagaatataatggaaaatgcaatttgcgatttgatgatacaaatccaattgctgaagaggaagaatttgttcgatctatccaggaagacgtaaagtggttgggatttgattggcaggatcgtttgtgcttcgcctcagattattttcaagagatgtatgaatatgcaatacaactaatccaaaaagactcagcttatgtttgcgagctcacaacagatgaaataaaaaataccagaggaacattaaatgagccgggtagtgaaagtccctatagaaatcgcagtgttaatgagaatttagatttatttaaacgaatgagatccggtgaattcgagaatggtagtaaaacattaagggcaaaaattgatatgggtcatccaaatatgaatatgcgagacccggttatctataagaattttac

SEQ ID NO: 300309 - DNA, 658 bp, Unknown
  Bacterial polypeptide expressing nucleotide sequence isolated from the Sargasso Sea
tatgagtgaaagtaatacagtaataaataatttcatccaaaagatcattgatgaggataacctttcagataaatggggtaaccgtgttcatactcgatttccaccagagcctaatggatatttgcatatcggacatgcaaaatctatttgtcttaattttggtctagccgaaaaaaataatggaaaatgcaaccttaggtttgatgatactaatccagtaaaagaagaagatgagtatgtaaggtctatcattgaagatgtaaagtggctaggctttaattgggaagatagattgtattatgcatcagattattttgatcatatgtacaaccatgcattaactcttatccaaaatggtgatgcattcgtttgtgaccagagctcagatcaaatgaaagactgtagaggtacgcttaagcaaccgggacaagagagtcctaatcgtaatagaagtgtagatgaaaatcttaaattatttcaaaagatgaagaatggtgatttctcagatggttcaaaaactctgagagctaaaatagatatgtctcatccgaatctaaatatgagagacccagttatttataggatattgcatgcctctcatcatagaacaggagataagtggtgtatttatcctatgtatgactgggcccatgggtta

SEQ ID NO: 300310 - DNA, 679 bp, Unknown
  Bacterial polypeptide expressing nucleotide sequence isolated from the Sargasso Sea
aagaaaaacatgattgaagcggcaatgcttgatgcctgcatccgtgaagagcttaacgaatatgcccctcgtgcgatggccgtactgcgcccattgaaagtcgtgattgagaactacccagaaggtcaaatcgagacgattcaagcggcttctcacccaagcgatgaaagcatgggtacacgcgaacttgcctttggccgcgaactgtatatcgatgtggcggatttcagagaagaagccaataagcagtacaagcgtctagtaatgggcaaagaagtgcgcctgcgtaatgcttatgtgattaaggctgagcgttgtgacaaagacagcgaaggtaatatcaccacggtttactgtagctacgatgcggataccttgggtaaaaaccctgccgatggtcgcaaggtaaaaggcgtaatccattgggttgaagcgactacagctaaacctgctgaattccgtttataccaacgcttgttcacggatccaaatcctgcagcagcagagacagtggatgaagtgcttaaccctaactcacttgaagtggtgaatggtttagttgaggcaagccttgtgaatgcgccagcggaaaaagcataccagtttgaacgtgaaggttatttctgtgctgacaataaagactcatcagccgagcatttagtctttaacctaacagttg

SEQ ID NO: 300311 - DNA, 334 bp, Unknown
  Bacterial polypeptide expressing nucleotide sequence isolated from the Sargasso Sea
atgagtcatgtggacaccgaagtacgtcctagtaacttcattcgtaatatcatagacgaagacctaagtagcggtaagcacagccaagttcatactcgttttccgccagaacctaacggctttttgcatattggacacgctaagtctatttgcttgaactttggtattgcacaagattaccaggggcaatgtaacttacgttttgatgatactaaccctgaaaaagaagacattaattatgtaaagtcgattcaggaagatgtgcgttggttaggctttcaatggtccggcgatattcgttattcgtctaattactttgaccaattgcatcagt

SEQ ID NO: 300312 - DNA, 865 bp, Unknown
  Bacterial polypeptide expressing nucleotide sequence isolated from the Sargasso Sea
aaactggaacatttacccaatgtatgactggacacacggagagtcagattatatagaacaggtttcacactcactttgtacgcttgagtttgaaccccacagagaattgtacgactggtttttagacgctattagtccattaaaaggaattagaccaaaacaaagagagttctctaggcttaacctttcgtatactattacaagtaaaaggaagcttgctcagttggttgatcaaaaattggtctcaggctgggacgacccacgaatgcccacaatctcaggcctaagaaaaagaggatatacaccacaggcgcttaaaaactttgcgcttacagtcggtgtttcaaaaagggaaaacgttattgacgcctctcttcttgagttttgtgttagatcagatttaaatgaagttgctccacgagcgatggcagttataaaccctttaaaaatcaaaattataaactataacaagggtgagggagagaacataaactttgaagttaatcctcaaaaccaagaagcaggaaaaagagagataatgtttacagatgaaatgtacattgaaaaagaagattttcaggaaaatccagaggaagggttttttaggttgtctccgggagaggaagtaaggctaaaaaacgcatatataataaaggctgttgacgttattaaagatgaaaaaggagacatatctgaagtcttatgtgagtatgataaaaaaagcaaaagtggatcaaacactccagaaagcaacagaaaggttaacggaactattcactgggtttcggcaaaagaggctgtcagcgcaaaaataaacatatatgacagactttttaaagtggagaagccaggaaaaaacacaacc

SEQ ID NO: 300313 - DNA, 237 bp, Unknown
  Bacterial polypeptide expressing nucleotide sequence isolated from the Sargasso Sea
gatgaaaaataaaaataaacattttatccaaaagatcattgatgaacataacaactcaggaaaatttaataataaagttcatacacgctttcctcctgagcctaatggatatctgcacattggacacgcaaaagcaatctgtttaaatttcaatatcgcagaagaatataatggaaaatgcaatttgcgatttgatgatacaaatccaattgctgaagaggaagaatttgttcgatc

SEQ ID NO: 300314 - DNA, 510 bp, Unknown
  Bacterial polypeptide expressing nucleotide sequence isolated from the Sargasso Sea
gttgacgcaaagccctagcactccggatcacgctaacgacccaggacgaacggactttgtccgcgacctagtcgcctctgatatcgccacagctaggtttgccggacgagttcagactaggtttccgccggagccgaatggctttctgcatatcggacacgcaaaagcaatagtccttgatttcgcaatcgccctagaaaacaacgggagttgctttcttcgatttgacgacaccaatccagccacagaggaccaggcctacgctgacgctatttgcgaagatattgaatggcttggattttccccagacggaatcacccatgcctcggactattttgaacaactttacgaatgggccgaactcttggtgaccaagggtcttgcatacgttgacgaacaatctgcggacttgatagccgagcaacgcggggggttcggacagccaggtgtcgagagccctttccgcaaccgagcgcctgacgacaacttgcgcctcttgcgtgcaatgaa

SEQ ID NO: 300315 - DNA, 967 bp, Unknown
  Bacterial polypeptide expressing nucleotide sequence isolated from the Sargasso Sea
acgctaaaaaagccaggcatcgatagtccatacaggaatcgcaccgttgatgaaaatatagacctatttgctaaaatgagatctggcgattttgcgaatggggaaaaaaccttgcgtgccaaaatagatatggcgcattcaaacctaaatatgcgagacccagtaatgtatcgtatcttacacgttgctcaccatcggacaggagatgaatggtgtatttatccgatgtatgactgggctcatggtttagaggattcaatagaaaaaatcactcactcaatttgcactcttgagtttgaagatcatcggccgctttatgactggtatcttgatcaactagaggcctatcatccccagcagatagagtttgcaaggttaaatctgaaccatactgtagtgagtaagcgtaagctaaaacgactagttgatgatggatttgttgatggttgggatgatccaagaatgcctacaatatcaggccttagaagaagaggctatacaccagagtcaatacgtgatttttctgaacgcgttggagttacaaagcgagatgcggttgtagatgttgcaaaactagaaaattctctgagagatgacctaaacaagagatcgccaagggtaatggcagttcttgatccactaaaggtggttataacaaactaccctactgatgaattagattatgtcgatgctataaataacccagaggatgagaatgcaggaaaaagaaaattagctttttcaaaagaaatatatatcgaaagaaacgattttatggaagagcctcctaaaaagttttttaggcttagcccagggaaagaagttcgattgaaatttgcctattatattactttgtatgaggtgataaaagatgaaaaaggtaaaataattgagatcaggtgtacatatgacccaaaatacagaggagggagaagtgaagatggtagaaaagtgagagggacactac

SEQ ID NO: 300316 - DNA, 859 bp, Unknown
  Bacterial polypeptide expressing nucleotide sequence isolated from the Sargasso Sea
aattattgatgatgacaatcacaccaaaaagtgggataaaagagtacatacacgatttccgcctgagccaaatggctatttacacataggtcatgctaaatctatttgtttgaattttggtattgctcagaagtatggcgggaaatgtaaccttagatttgatgatacaaacccgcttaaagaagaagatgaatatgtaaaatcaataattgatgatgtgaaatggcttggttttcattgggaagatgagcccttatatgcgtctaattattttgagcaaatgtttgattatgccatagaattaattaatcaagggaatgcctatgtttgtgatttaaaatcagatgaagtaaaagatcaaaggggtactcttaaaaatcccggaatcgaaagtcctttcagaaataggtcaatttctgaaaacttagaactatttaaaaaaatgagagctggcgactttttagatggagagaaaactctgcgtgcaaaaatagatatgcagcatgcaaatctgaatatgagagatccagttatgtatcgcattttgcatgctaaacatcacaggactggaagtaaatggtgtatttatcctatgtatgattgggcacatggtttggaggattctattgaaaagattacccactctatttgtactcttgagtttgaagaccatagacctttgtatgactggtatttgaattcattaaaagtatatcatcctcaacaaatcgagtttgccaggttaaatcttaactatacaataatgagcaaacgtaaattgaaaagattagttgatgaggggcatgtagatggatggagtgatcccagaatgccaacaatttctggtttaaagaggaga

SEQ ID NO: 300317 - DNA, 547 bp, Unknown
  Bacterial polypeptide expressing nucleotide sequence isolated from the Sargasso Sea
tttactcattcgttatgtacgctggagttccaggacaaccgtcgtttatacgactggattttggacaacatcactattgcttgtcatccacagcaaatcgaattctcccgtctgaatcttgaatatcaggtgatgagtaaacgtaaactgcacaacctggttgaaggtggccatgtagcgggttgggatgacccacgtatgcctactattgcaggtttacgtcgccgtggttttacgccagcgtcactgcgtgaattcgcaaaacgtattggtgtcaccaagcaagacaatatgattgaaatcagtgcgttggactcttgcatccgtgaagatctggatgccaatgcaccacgtgctatggcggtcattgatccgttaaaagtcaccatcagcaactacaacgccaccgatgtggaatggttagaggttcataaccatccaaaagaagaaagcatgggcagtcgtaaagtgccgtttggccgtactttgtatatagataaagcggacttccgaaaagaagccaacaaaaagtacaaacgtatggtga

SEQ ID NO: 300318 - DNA, 922 bp, Unknown
  Bacterial polypeptide expressing nucleotide sequence isolated from the Sargasso Sea
tatcggattcgttatcaatcgcatcaaaggactggagataagtggtgtatttatcccatgtatgactacacacattgcatatgcgatgccctggagcatataagccactctctttgcacactggaatttgaggatcatcgacctttgtatgattgggtgatagaaaatattgatatcgactaccaccctccacaaattgaattttctagacttggtctcgaatatactgtgatgagcaaacgccaccttagccaacttgttgctgacaagattgtagagggttgggatgatcctcgtatgccgacgatagctggacttcgtcgaaggggcgtgcctcctgccgcaatacgtgagttttgttcgagggtgggagttaccaaacaatcgaatgtggttgaaatggagttgttggaattttgtatccgacaagagctagagtccaattccccccgagctatgtgcgtgttagaaccactcaaagttgtcattactaactgggatcagggtgagttgttgttagaagctccctggcacccgaaacgtgaaaatctgggctctaggtccatacctttttctgggactctctatatcgaacgcgaagatttttctgtcgagcctccttcaaagtggaagcgtttgcaaccggatggtcttgttcggttgcgctatggtttcatcatacagtgtgatgagctggtgtatggcgaaaatggagaaatatcagagcttagatgtacgtattttcctgagtcacgaagcggacaggacactagcggactgaaacctaaaggtgtcatacactgggtatctgagtctggagcacaacaaattaaggttaaaaagtacgctcgcctttttcacgtgcccgaccctaaagcggataatttcatggatgagataaatattgaatccttactttgat

SEQ ID NO: 300319 - DNA, 776 bp, Unknown
  Bacterial polypeptide expressing nucleotide sequence isolated from the Sargasso Sea
tgatgaggataacctatcagataagtggggtaatcgtgttcatactcgatttcctccagagcccaatggatatttacatatcggacatgcaaaatctatttgtcttaattttggtattgctgaaaaaaataatggaaaatgcaaccttagatttgatgatactaatccagtaaaagaagaagacgagtatgtaaagtctattattgaagatgtgcaatggttaggttatgattggggaaataatttgttttttgcatcagattattttgatcaaatgtacgattatgctttaatgcttattcgcaatggtaatgcatttgtttgtgaccagagcatagatcagatgaaagaatctagagggactcttacgcaaccgggaaaagaaagtcctaatcgcaacagaagtatagaagaaaatctagaattatttcagtgtatgaaaaatggagattatccagatgggcaaaaaacgctgagagctaaaatagatatgtcgcattcgaacctcaatatgcgtgacccagtaatttatcgtattttgcatgcttcgcaccataggacaggaaacaaatggtgtatttatcctatgtatgactgggctcatggtttagaagattctatcgaaaagattactcattccatttgcactttagagtttgaagatcatcgcccactatatgattggtacttggataagctaggcgtttatcatccacaacagatagagtttgcaaggttgaaccttaatttcactgtaaaaaataagcgaaagtgaa

SEQ ID NO: 300320 - DNA, 754 bp, Unknown
  Bacterial polypeptide expressing nucleotide sequence isolated from the Sargasso Sea
tggaagatataccctatgtatgattggacacacggagagtctgattatatagaacaagtatcacattcactgtgtactcttgagtttgagcctcaccgcgagctctacgattggtttttagactccattagtcctttagagggaattagaccaaagcaaagagagttttcaaggcttaatctttcgtatacaataacaagcaaacggaaccttgcaaagcttgtagaagagggggttgttgatggttgggatgacccaagaatgccaacaatttctggtttaagaaacagaggttacaccccagaatctttaaaatcatttgctttaacagttggaatttcaaaaagagaaaacgtaatagatgtttctttattagagttctgtgtaaggacacaccttaatgaagaggcgcaaagagctatggctgttttagaccctttaaaaatttcaattataaactacaacaaaaataaagaggagagtgtaaactttgatataaacccccaaaagcccggtcaaggaaaaagagagactttgttttcaaagaatatttacatcgaaagagaggattttcaagaaaatccagaggaagggttttttaggctttcaccaggagaggaagtaaggcttaaaaacgcatatataattaaagcaacaaatatcattaaaaacgaaaacggtcaaattacagaagtagagtgtgagtatgatgaaaaaagtaaaagtggatcaaacacagaagagagtaatagaa

SEQ ID NO: 300321 - DNA, 858 bp, Unknown
  Bacterial polypeptide expressing nucleotide sequence isolated from the Sargasso Sea
ctattacaagcaaaaggaaacttgcgcagttagttgataacgaaatggtttcaggttgggatgatccaagaatgcccacaatttctggccttagaaaaagagggtataccccacaatcccttaagaactttgcactaacagtcggtgtatcaaaaagggaaaacgttattgacgcctctcttcttgagttttgtgttaggtcacatttaaatgaagttgctccaagagcaatggcggttataaaccctttaaaaattaaaattataaattacgataagcatgagggagagaagataagctttgaaattaaccagcaaaatgaagaagcaggaaaaagagagatagcgtttacagatgagatgtttattgaaaaagaagattttcaggaaaacccagaggaagggttttttaggttgtcgcctggagaagaagtaaggttaaaaaatgcatacataataaaagcagttgaagttgttaaagatcaagaaggaaatatatctcaagttttgtgtgagtatgaccaaaaaagcaaaagtggatcaaacactccagaaagcaacagaaaagttaagggaacaattcattgggtttcagccaaagaggctgtcagcgcaaaaataaatatatacgataggctttttaaagttgaggaaccaggaaaaaacgcaacaattgaaaatgaaatcaatgaaaactcattgataacaaaagaagcattagttgagccatacttgttagaagcaaaggagggtcaacaattccaatttcaaaggttaggttattttgttaaaacagacaataaaaaaaccctagagtttaacaaaactgtagggttaagagatggttggaaaaagtaac

SEQ ID NO: 300322 - DNA, 774 bp, Unknown
  Bacterial polypeptide expressing nucleotide sequence isolated from the Sargasso Sea
tatgaaatccccaaatatgcacatgcgagatcccgttttatatagaattataaattttgatcatcatagaactaaagataaatggaaaatatatcctacttacgactgggcccacggtcaatctgattatatagaaggcatatcacattcgttttgtactttagaatttgaagttcatagagaattgtatgattggttcataaacaatataaataataagagtgaacttgtacctaaacaaagagagtttgcaagactaaatttatcatatacgataatgagcaaaagaaaattagcagaattagttggttctggattagttgaaggatgggatgaccctagaatgccaacaatttctggtcttcgaagaaggggcgttcctccagaatctattttaaatttttgtgaaaaagttggagtttcaaaaagagaaaatataattgactatagtcttcttgatttttgttgtagagaagtattaaataaaatagcttatagactaatggttattttagatcctattgaattagaaattatgaattataaagataaagagagagaaattttaattgctgaaaacaaccctgaagacagtgcttttggaaatagagaaattactttttctaaaaacttattaattgaaaaagatgattttaaagaggaagctaatagaaagttttttagactaacaataggcaaagaggttagattaaaaaatggatatataattaaaggtgaaaaggttgataaggataataatggtaatataaaaaa

SEQ ID NO: 300323 - DNA, 780 bp, Unknown
  Bacterial polypeptide expressing nucleotide sequence isolated from the Sargasso Sea
tatgtatgattggacacatggagagtctgactacatagaacaagtgtcacactcactatgtactcttgagtttgagcctcaccgcgagctctacgattggtttctagactccattagccctctaaagggaattaggccaaagcaaagagagttttcaaggcttaacctttcttataccataacaagcaaacggaaccttgcaaaactagtagaagaaggggttgttgacggttgggacgatccaagaatgccaacaatttctggcttaagaaacaggggttataccccagaatctttaaaatcatttgccttaacagttggaatttcaaaaagagaaaacgtaattgatgtttctttattagagttttgtgtaaggacacacctgaatgaagaggctccaagagctatggctgttttagaccctttaaaaatctcaattataaactacaacgaaaataatgaggagagtgtaaacttcgatataaacccccaaaagcctggtcaaggaaaaagagagattttgttttcaaagaacatttacatcgaaagagaagattttcaagaaaacccagaagaagggttttttaggctctcaccaggagaggaagtaaggcttaaaaatgcatatataattaaagcaaaaaacatcattaaaaacgaagaaggtcaaattacagaagtcgagtgtgagtatgatgaaaaaagtaaaagcggatcaaatacagaagagagcaatagaaaggtaaaggctacagttcattgggtttcggcagaaacagc

SEQ ID NO: 300324 - DNA, 775 bp, Unknown
  Bacterial polypeptide expressing nucleotide sequence isolated from the Sargasso Sea
atgaaaaataaaaattttattcatcatataattgataaagacaatcaagatggaaaatacgatggcagggtatatactagatttcctccagagccaaatggttatttgcatattggtcatgcaaaagctatatgtttaaatttttcaatcgctgaagaatataatggaaaatgtaatcttcgctttgatgatacaaacccaatagctgaagaaaaagagtatgtagaatccattaaaaaagatattagatggttgggctttgattggaaggatagaattttctttgcatccgattattttgatgatatgtatcgatacgccatttcattaattaataataatctagcttacgtttgtgacttaacaaatgaagagataaaagatatgcgaggaacgctaacgacttttggcaaagaaagtccttttagaaatagatcaattgatgagaatcttaaactttttcaggacatgaaaggtggaaaatttaagaacggagaaaaaacattaagagctaaaattgatatgtctcactctaatttaaacatgcgtgatcctgttatttatagaattttgcatgcccatcatcatagaactggaaatgattggtgcatataccccatgtatgattgggcgcatgggctagaggattctattgaacgaatcacccactctttgtgttcattggaatttgaggaccatagacctttgtatgattggttcttagattcattgaatgtttatcatccgcaacaaaaattgaatttgctcgcttaaa

SEQ ID NO: 300325 - DNA, 972 bp, Unknown
  Bacterial polypeptide expressing nucleotide sequence isolated from the Sargasso Sea
gtggttacccgggtttccgccggaacccaacggttatctgcatattggccatgcgaaatctatttgccttaacttcggaattgcgtccgaatttgctggccggtgtaatctgcgcttcgacgatacaaatccggcgaaggaagaccaggaattcatcgatgccatccgcgaagatgtttcatggttgggcttcgactgggatggcgatgtcaaatacgcgtccgataactttgaacagctttatgcctgggcggaacacctgatcgaggcggacaaggcatttgttgacgatctcaccgcggaagaaatgcgggaatatcgcggcacgttgaccgaacccggtaaaaacagtccccatcgggaccgcagtgttgacgaaaacctcgatcttttccgtcgcatgcgggccggggaattcgaagacggcgcccgggtgctacgtgccaagatcgatatggcatcagggaacatcaacctgcgcgatccggtattgtatcggatcgtccgtgcctcccatccacgcaccagggataactggttcatctatcccacctacgattttgcccatggtcaaaccgatgcaatcgagagcgtgacccattcgctttgtacgttggaattcgaggatcatcgccctttatacgactggctgattgaaaacctaccggtgccgtcgcaccccagacagtatgaattttcccgcctgaatatgacctacacggtgttgtcaaaacggcggctgatgcaactagttgaagaaggccacgtcgccggttgggacgatccgcgcatgccgacgatctcgggtctgcggcggcgcggcgttccgccagtgtcgattcgcgatttcatcagccggctcgcgatttcgaaaagcgagggcacggtcgaggcggcgatgctcgaacactgcatccgcgaaccgctgaatgatagcgcgttgcggcggatggcggtgctgcggccgctgaa

SEQ ID NO: 300326 - DNA, 583 bp, Unknown
  Bacterial polypeptide expressing nucleotide sequence isolated from the Sargasso Sea
aatgaaagacagtaaaccaagagattttataagacagatcattcatgatgacatgaggaatcaggattcaaggaaggtgatcaccagatttcctcctgagccaaatggattccttcatattggccacgcaaaatcaatttgtcttaattttgctgtagccaatgagaataagggtaaaacttttcttcgttttgatgacaccaatccacttaaagaagatgatgtttatgttcagtcgataaaagaagatgtttcatggcttggattcgattgggaagacaggctgacatttgcgtcagattattttgaaaatctttaccaatcggcaattaaattaataaataaaggactcgcatatgtggatagcctcaatgcagatgaaataagagaatacaggggcactctaactgagcctggaaaagacagtcctttcagaaatagatctcctgaagagaatttagaattatttcagagaatgaaaaacggtgaattttcagatggagaaatgatactcagagctaaaatagatatgaaatctcctaatatgaatatgcgtgatccagctatttatcgtatccgaaaa

SEQ ID NO: 300327 - DNA, 728 bp, Unknown
  Bacterial polypeptide expressing nucleotide sequence isolated from the Sargasso Sea
tatggaagataaaaataataaatctaatttcataagggacataatagattctgatataagattagaaaaaaatgacaatagggttcacacccgctttcctcccgagcctaatggatacctgcatattggacatgcaaaatctatttgtttaaattttggaatagcagaatcttaccctaatggtaaatgtaatcttagatttgatgataccaatcctttaaaagaagaagaagaatatgttgattctataattgaagatgttcaatggctaggttttaatgttaaaaatagaattttttatgcatcagattattttgaccaattttatgattatgccgtacaattagttaggggtaatttggcgtacgtagatgatcagctttccgaagaaattaaaaatacaagaggtacattaaaagatcctggagttaatagcccttacagaaatagatctgtagaagaaaatttagatttatttcaaaaaatgaaagatgggttatttaaagatggagaaaaggttctgcgtgctaaaatagatatgtctcatcctaatttaaatatgagagatcctataatgtaccgtattttgcatattaatcatcacagaacatatgataaatggtgtatttatccaatgtatgattgggctcatggcctggaagattctttagaaaaaattactcattcaatatgtacattagaattttcagatcatagattgctatatg

SEQ ID NO: 300328 - DNA, 702 bp, Unknown
  Bacterial polypeptide expressing nucleotide sequence isolated from the Sargasso Sea
ggagatgaatggtgtatttatccaatgtatgactgggctcatggaatagaagattcattagaaaaaatcacacactcaatttgcactcttgagtttgaagatcatcgcctactttacgattggtatcttgatcaattagaaacttatcacccccagcaaatagagtttgcacggttgaacctgaactatactgtagtaagcaagcgcaagttaaaacgattagttgatgatggttttgttgatggttgggatgatccaagaatgcctacaatatcaggccttagaagaagaggttatactccagagtcaattcgtaatttttctgaaggtgttggagtaacaaagcgtgatacggttgtagatgttgcaaagctagaaaatgctcttagagacgatcttaacaagagatctctaagggtaatggcagttcttgatccactcaaggtggttataacaaactaccctgataaagaattagattatgttgatgccattaataaccctgaggatgagaacgctggaaaaagaaaattagctttttcaaaagaaatatatatcgaaagaaatgattttatggaagaacctcctaaaaagttttttaggcttagtcctggaaaagaggttcgattgaaatttgcttactatattacctgcaatgaggtgataaaagatggaaaaggaaaaataattgagctcaggtaa

SEQ ID NO: 300329 - DNA, 610 bp, Unknown
  Bacterial polypeptide expressing nucleotide sequence isolated from the Sargasso Sea
cttgcacattggtcatttaaaagcaatatgcttaaattttaaccttggtaaaaaatataattctcctgttaatttaaggtttgacgacacaaaccctgagaaagaagcaaaagagtatgttgatgccattaaacacgatattaattggcttggctttgactgggacaaagagtgctatgcatctgactactttgatcagcttcatgagtgggcaattattttaattaaaaaaaacaaagcatacatagactctcaaacctcagagcaaatagccactcaaaaaggaacacccactaaaccaggacaaaatagcccctttagagaaagaccaaacgaagaaagcctttcaatttttgaaggaatgtataaaggggagtacaatcaaggagagcatgttttaagggcaaagattgacatggcctcccccaacatgttaatgcgagaccctgttgtttatagggtgatgaaggtaagccatcatagaaccggagaaaattggaatatttacccaatgtatgactggacacacggagagtcagattatatagaacaggtttcacactcactttgtactcttgagtttgaacctcatagagaattatacgattgg

SEQ ID NO: 300330 - DNA, 265 bp, Unknown
  Bacterial polypeptide expressing nucleotide sequence isolated from the Sargasso Sea
ctgatttgtataagtaaaggttgtttcctgcgccctgttattagatcatatgccgttatacgttgtttacgccttgaggaacccgtgatgagtgaggcagaagcccgcccgactaactttattcgccagatcattgatgaagatctggccagtggtaagcacactaccatccacacccgttttccgccggagccgaatggctacctgcacatcggccatgcgaaatctatctgcctgaacttcggcatcgcacaagattaccagg

SEQ ID NO: 300331 - DNA, 775 bp, Unknown
  Bacterial polypeptide expressing nucleotide sequence isolated from the Sargasso Sea
atgagtgaaagtaatacagtaataaaaaatttcatccaaaagatcattgatgaggataacctttcagataaatggggtaaccgtgttcatactcgatttccaccagagcctaatggatatttgcatatcggacatgcaaaatctatttgtcttaattttggtcttgccgaaaaaaataatggaaaatgcaaccttaggtttgatgatactaatccagtaaaagaagaagatgagtatgtaaggtctatcattgaagatgtaaagtggctaggctttaattgggaagatagattgtactatgcatcagattactttgatcatatgtacaaccatgcattaacccttatccaaaatggtgatgcattcgtttgtgaccagagctcagatcaaatgaaagactgtagaggtacgcttaagcaaccgggacaagagagtcctaaccgtaatagaagtgtagatgaaaatcttcaattatttcaaaagatgaggaatggtgaattctcagatggttcaaaaactctgagagctaaaatagatatgtctcatccgaatctaaatatgagagacccggttatttataggatattgcatgcctctcatcatagaacaggagataagtggtgtatttatcctatgtatgactgggcccatggtttagaggactccattgagaagatcactcattctatatgtaccctagaatttgaagaccatcgccccttatatgattggtatttacaaaaacctaggcgtttatcatccgcagcagattgag

SEQ ID NO: 300332 - DNA, 604 bp, Unknown
  Bacterial polypeptide expressing nucleotide sequence isolated from the Sargasso Sea
cgagacgtaccttcgcttcgacgacaccaacccggcggcggagaagaaggagtacgtcgactccatcaagtcctcggtggcgtggctcgggcacgagcccacgaagatcacgtacagctcggattacttcgatcaactgttcgagctcgcgatcgagctcatcaagcgcggcaaagcgtacgtgtgccaccagaccaaagaggagacggcggcgagccgccaggcgctgcagggattccagctgcactgctcgcgaaacggtctcaaaaagtacgacaccccacttcccccgggcgcggcgtcgcccttccgcgatcggagcgtggaggagaacctccagctcttcgacgagatgtctaaaggcgtttggccggagggggcgtgttgcttgcgcatgaagggcgatctgcgttcggatatcacgtcgatgtgggacctcgccgcgtacagggtgaagttcgaggcgcacccgcacagcggggacaagtactgcatctatccgacgtacgactacacgcactgtctcgtggactcgctcgagaacatcacgcactcgctgtgcacgctcgagttcgaaacccgccaggccccgaacgggccgtaa

SEQ ID NO: 300333 - DNA, 1663 bp, Unknown
  Bacterial polypeptide expressing nucleotide sequence isolated from the Sargasso Sea
atgagtcaggcgaacagcccaactaactttattcgtcagatcattgatgaagatctggccagcggtaagcacagcagcgtgcatacccgttttccgcccgagccgaacggttatctccatatcggtcacgccaagtccatctgcctgaacttcggcatcgcccgcgactaccagggccagtgcaacctgcgcttcgacgacaccaacccggtgaaggaagatatcgagtacgttgagtccatcaagcaggacgtgcagtggctcggcttccagtggaacggcgagatctgctactcctccgactatttcgacaagctgcacggctatgccatcgagctcatcgagaagggcctggcctatgtggacgagctctctgccgagcagatgcgcgaataccgtggcaccctgaccgcgccgggcaagaacagcccgttccgcgatcgttcggtggccgagaacctggccctgttcgagaagatgaagaacggtgagtttgccgaaggcgccgcctgcctgcgtgccaagatcgacatggcatcccccttcatggtgatgcgcgatccggtcatctatcgcatcaagtttgcccaccaccaccagaccggtgacaagtggtgcatctacccgatgtatgacttcactcactgcatctcggacgcgctggaagggatcacccactccatctgtacgctggagttccaggacaaccgtcgcctgtacgactgggtgctggacaacatcaccatcgactgccacccccgtcagtacgagttctcccgactgaacctcgaatacaccgtcatgtccaagcgcaagctgaacctgctggtgaccgagaagcacgtggacggttgggacgatccgcgcatgctgaccgtctccggtctgcgtcgtcgcggttataccccggcctccatccgcgagttctgcaagcgcatcggcgtgaccaagcaggacaacatcgtcgagatgagcatgctggaagcctgcatccgcgaagatctcaacgagaatgcgccgcgtgccatggctgtgctgcacccggtcaaggtggtgatcgagaacctggctgccgacgaagtgctgactgccccggcccacccgaacaacgccgagatgggcacccgcgagctgaacttcacccgcgagatcctcatcgatgaagcggacttcaaagaagaagccaacaagcagttcaagcgactggtgctgggcaaggaagtgcgcctgcgcaatgcctacgtcatcaaggccgagcgggtcgagaaagatgccgatggcaaggtcacctgcatctactgctcttacgatcccgagaccctgggcaaggatccggccgatggtcgcaaggtgaaaggggtgatccactgggtcagcgccactcactccctgccggccgaagtgcgcctctacgaccgtctgttcaaggtgccgaacccgggtgccgaagaggacttcgaagcggccctgaatccggactccctggtgatcatcgagggtgcccgtgtcgaggcctccctgaagaacgccaagccggagcaggcttaccagttcgagcgtgaaggttacttctgcgccgacaacaagctctccagcccggagcatctggtgttcaaccgcaccgtggccctgcgcgacgtgtggggcaaggccgaggcctgat

SEQ ID NO: 300334 - DNA, 1057 bp, Unknown
  Bacterial polypeptide expressing nucleotide sequence isolated from the Sargasso Sea
catgagcgacaagaaaaaatatcgaggcaaggatttcattcgacaaatgatccatcacgatgttgactctggcgtcaatgatggaagattggccacgagatttcctccagagccaaacggatatttacacatagggcatgcactttcaatttgcattaattttggaatcgcaaaagaatttgacgctcactgttatctcagattcgatgacaccaatcctgcaaaagaatcggatgagtatgtcaactcgatcatggaggatgttaaatggttgggttttgactggggcaatgatttagctcatgcttcagattactttgactcaattcatgaatttgccatagagctgattgaaaaagatcttgcttacgttgacagccaaacgagcgaagaaattaaaaactcaagaggcacgctgaatgccccaggaactaaaagcccgtatcgcgatcgacccatctctgagaatcttggattatttgatcgaatgaagaatggtgaatttgaaaatggtgaacatgtgcttagagcaaagatagacatgtcctcaccaaacataaatctaagagatcccatcatatatagaattttgcatttagatcatcagagaacaggtagtaaatggtgcatatatccaatgtacgactttgctcacaccctttcggatgcgattgaaggaactactcactcgctttgcacactcgaatttgaagatcacagacccctctatgagtggtttctcgacaaccttgatctcccaaccagaccaagacagatcgaattttcgcgtttgaacttggagcacacaataaccagcaaaagaaaacttgctgatcttgttgtttcagggcatgtttcaggatgggatgatcctagaatgccaaccctatccggactcagaaaaaggggctatccagcaagtgccataaaagaattttgcaacagggttgggatcactaaaaaagataagaccattgaaatgtcgcttcttgagagcactgttagggaagaattagattcatcctgcaacagagtcatggctatcctgaatccataa

SEQ ID NO: 300335 - DNA, 1258 bp, Unknown
  Bacterial polypeptide expressing nucleotide sequence isolated from the Sargasso Sea
cctgccaaagagtctgatgaatatgtcaactcaatcatggaagatgtgaagtggcttggctttgattggggcaataaccttgcacatgcttctgattactttgaatcaatctatgaatttgccatagaactgattgaaaaagatcttgcctttgtcgatagccagacgagtgaagagataagaaatacaagaggaacactcaactctccaggtattgaaagtccatatcgtaatcgctcagtatctgagaatcttggattattcaatagaatgaaaaatggtgaatttgaaaatggagagcatgtcctcagagcaaaaatagatatgtcatcaccgaatatcaatctaagggatcctgtgatttatcgtatcttgaacttagaacatcaaagaaccggtaagacttggtgcatatatccaatgtacgactttgctcacaccctatcagatgcaattgagggaacaactcactcactgtgtacacttgaatttgaggatcacagacctctatatgagtggtttcttgataacctcaatctatcaaccagacccagacaaattgaattctcacgtttgaatgtggaacacaccatcaccagcaaaaggaagcttggtgagcttgtcgattctggtgatgtatcaggatgggatgatccaaggatgccaaccatatcaggactcagaaaaaggggttatccagcgagtgccctcagagaattttgtaagcgagttggtattacaaaaaaagataagtccattgaaatgtcacttctggaaagtactgtaagagaagaattggatgcaacttgcaatagagtgatggccataatgaatcctctaaaagtgacaattaaaaattatccagatggtgagtctgaaacacttgaagcaagcaatcatccaaagaaaaaagaaatgggaagccgagagatgccatttggtaaaaatatattcattgagaaagatgatttcatggaaagtcccgaagaagatttttataggttgtctccaggagctgaagtcagacttaggtatgcatacatcatcaaatgtgaagaaataataaaagatgaagatggagagatcatagaactcatctgttcatatgatccagatacaaaaagtggtgtcggtacatcaaaaaagaaggtcaaaagtgcaatccactgggtttctgcagaccactcaattaaaggaaaagtgagtctctttgaaacactctactcagatccaagccctgactctgatagcccatgaa

SEQ ID NO: 300336 - DNA, 1237 bp, Unknown
  Bacterial polypeptide expressing nucleotide sequence isolated from the Sargasso Sea
attagaaataatattttatatgcttctgactattttgatattttttatgagcatgcaattactttaattaaatctggggatgcatatgttgatgatcagtctgcagaattaattaaatcagcaagaggtaatcttaatgagccaggtataaatagtccctttcgaaataggacagttgaagaaaatttaacattatttaaaaacatgaagtcaggtctatatgctaatggagaaaaagttcttcgagcaaaaattgacatgagctcaccaaatttaaatatgcgagatcctattatgtacaggatcattcatgctaatcatcatagaacaggtaacaagtggtgtatttatcctatgtatgattgggcacatggattagaagattcaatagaaggtattactcattctatttgtactttagaatttgaagatcatagaccattatatgattggtatttatcgcaattgaaaattcatcaccctcagcaaattgaatttgctcggctagatttgaactatacggttatgagcaagcgcaaattgaaagaattagttgataataaacatgttgttggttggagtgatccacgaatgccaacaatatcaggcttgcgaaataggggctactctccagatgccattaaaatgttttgcgagaaaattggtgtagcaaaacgcaataatattattgaatatgcattattagaatattgtgttcgtgaagatttaaataaaaaagcgatgcgtgtaatggcagttttagagccaattaaattaattattgataattatcctgataatactagtgaagatttgattgcagataataatccagaaaatcaaaatgatggtacacgtataataccattttctaaagaattatggattgaaaaatcagattttatggaagatgctcccaaaaaatatttcagattaagcattggcaaagaagtgcgtcttaaacatgcatattatgtaacatgtactaaagtagttaaagataataatggcgctgtgattgctgtacattgtaattatgatccgaattcaaaaggtggttggacagatgatggaagaaaagtacgagggacattgcattgggtttcagttaagcatgcaattgatgcagaagtaaggttgtatgataggctctttactgcagataatccattagatagtaaaaaatataatcatttcattgatacaataaacccacaattcacttattactatacaa

SEQ ID NO: 300337 - DNA, 1342 bp, Unknown
  Bacterial polypeptide expressing nucleotide sequence isolated from the Sargasso Sea
cttggcggctacgggcgggaagtggcggacgcgttttccgccggaaccgaacgggtatttgcacatcggacacgccaaggcgatgtatttcgatttcggcgtggcgaagcagttcggtggtacgacgacccttcgcttcgacgacacaaatccggaggcggagaagcaagaatatattgacagcatcattggttcggtgaaatggttgggacacgaaccggtggaaacgacatactcgagcgattactttgatcagctctacgagtatgcgctgcagttgatcaagtctggtaacgcgtacgtctgcttccaaaacaaggagcaaacgttcgagtcgcgcaagcttttgcaaacgttccaaaagacgtgcgtggacggtaaccttccgcgttacgacacgccgcttccggagggcgccgagagcccttggagaaacacaagcgtcgaggagaaccttgaattgtttgaaaagatgaagaacggtgaattcaaggagggcgagtgcagcctgcgcatgaagggtgatttacgcagcgatattccgagtatgtgggatttagccgcgtaccgcgtcaagtttgccagtcacccgcacaccggcgacaagtggtgcatttacccgacatacgactacacgcactgcttagtggatagcttagaaaacatcacacactcgctgtgtacgctcgagttcgagtccagacaggcaccgaacgggtcctactattggcttctggatgcgctcgacgcgtacaagcccgtcacttgggaattctctcgctgcaacatcacgtacaacgtgatgagtaagcgcaagttgaacctgttggtgacaaagggatacgtcaacgggtgggacgatccgcgtctgttgactctcgagggtttgcgcagaagaggttacacgcccaccgccatcaacgccttttgctcatcgctcggcgtgacgcgcaacgataacacgcaacacctcggacgcctcgagcaagtgatgcgcgaagagttgaaggacagcgcgtcgaggtatttcgccgtcgttgatccggtcaaggtgaacatcacgaaccatccgggtggagaggtgatctgcgaggcgccggtgcacccttcgttcccggagcggggcatgcgccgcatcaacttgacgtccaccatattcatcgagcgcaccgatttcaagaccgaggatgtcaatggctacttcggcatggcgccaggtaagacgattcgattgcagttcggctacaacgtcacgtgcacggattacaagaccggcgcggatggttcgattgaggaaatcaacgtcacaatcgacatggagtctcgctctcaaaagcctccc

SEQ ID NO: 300338 - DNA, 1534 bp, Unknown
  Bacterial polypeptide expressing nucleotide sequence isolated from the Sargasso Sea
catggaggataaagagagccccttaaattttatagaattaattattgaaaatgatttaaagaagggactagatcaaaaacaattaagttttcgctttcctccagagccaaacggctatcttcatattggacatgttaaggctatatgtttaaatttcaatttaggattaaaatataaggctccagttaatttaaggtttgatgataccaacccacaaaacgaagaagtaaaatatgtaaacgcaataaaggaggatataaaatggcttggttattcttgggaaaaggagtgctatgcgtctgattattttgatcaactccatgaatgggcaaaatacttaattgataatgattttgcctatatagactctcaaacatcaaatgaaattgctgatcaaaaaggtactccaacaattttagggaccaaaagcccttacagaaatagacccacatcggaaagtagaaatattttccttgaaatgacacagggaaaacatcccgaaggggcacacgtgctcagagcaaaaattgacatgaactcacctaatatgctacttagggaccccattatttatagggtattagataaaccccaccacagaacaggatacaagtggtgcatctaccctatgtacgattggactcatggtcaatcagattatttagagcaaataactcattcgttatgtactcttgagtttaaacctcatagagatttatacgattggtttttaaaaacactacctctcgatgaaatgttaccaaaacaaattgaattcgctagattaaacttgtcatatacagttacttccaaaagaaaactaaaagagctaatagataaaaaaatagtttattcatgggatgatccaagaatgccaacaatatcaggacttagaagaagaggttacactcctgaatctttaaaaaattttgtacacacagccggaatagcaaaaagggataatataatagaggcttctcttttggagttttgcgcgcgagatcatctgaacaaaatagcgccaagagtcaatgctgtagttaaccctttgaaactaaccatttctaattatgatagagatgaagagctcttaaatggagaaattaatccagaaaacccttcatcaggtacaagagaaatacccttttcaaagcacctttatatcgataaagaggatttcaaagaagaggcaaataaaaaatattttagattaacaataggaaaagaagtgagattaaaaaatgcgtatataatcaaaggcgaatctgttataaaagataaagaaggaaatttaactgaagttatatgcacatatgataagcaatctaaaagcggatctggttcagatgcaagcaagagaaaggttaagggaactctacattgggtcagccaaaaacatgcaataaaagtaaaagtaaatttatatgacaggctttttgttgatcctgcacctgaccagcataaagataaaagttttttagattttattaaccccaattctttacaagaagtatctgcatttgtagagcctagc

SEQ ID NO: 300339 - DNA, 1180 bp, Unknown
  Bacterial polypeptide expressing nucleotide sequence isolated from the Sargasso Sea
atggataaaaaaaataaatctgataattttataataaagattattgaaagggataatgaattgggaaagtggggtgagagggttcacactcgttttcccccagagccaaatggctatttgcatattggtcacgcaaaatcaatttgccttaattttggtatagcgatagagtttgatggaaaatgcaatcttagattcgatgatacaaatcccctaaaagaggaaagtgagtatgtaaggtcaatcattgaggatgtttcatggctaggattttcatggcaggatgaacccttatttgcttcggattattttgaccaaatgcatgattacgctgtagaactcattaaaaaaggaaaagcgtatgtttgtgatttggatccagatcaagtaaggttgcagagaggaacgctaaaaaagccaggcatcgatagtccatacaggaatcgtagcatagaagaaaatatagacttgtttgcaaaaatgagatctggtgattttgctaatggggaaaaaaccttgcgtgcaaaaatagatatggcacattcaaatctgaatatgcgagaccccgtaatgtaccgaattttgcacgctactcaccataggacaggagatgaatggtgtatttatccgatgtacgactgggctcatggtttagaggattcaatagaaaaaattactcactcaatttgcactcttgagtttgaagatcatcggccgctttatgactggtatcttgatcaactagaggcctatcatcctcagcagatagagtttgcgaggttaaatctaaaccatactgtggttagtaaacgtaagctaaaacgactagttgatgatggatttgttgatggttgggatgatccaagaatgcctacaatatcaggccttagaagaagaggttatacaccagagtcaatacgtgatttttctgaacgtgttggagttacaaagcgagatgcagttgtagacgttgcaaaactagaaaattctttgagagatgacctaaacaagagatcgccaagggtaatggcagttcttgatccactaaaggtggtaataacaaactaccccactgatgaattagattatgtcgatgccatcaataacccagaggatgagaatgcaggaaaaagaaaattagcttttttcaaaagaaatatatatcggaaagaaacgattt

SEQ ID NO: 300340 - DNA, 1639 bp, Unknown
  Bacterial polypeptide expressing nucleotide sequence isolated from the Sargasso Sea
atggcggacgttgaacatcgccccactaactttattcgtcagatcattgatgccgatctggcttcaggcaaacacaatacgactgtgacccgtttcccgccggaacctaatggttatctgcacattggtcatgccaagtctatttgtctgaactttggtatagcgcaggattacaacggccagtgtaatttacgttttgacgacaccaaccctgaaaaagaagacatcgactttgtcaattctattcagcaggacgtgcagtggttaggctttcagtggtctggcaatgtgcgttattcgtcagattattttgatactttgtatggttatgcggttgaactgattaacaaaggtttggcttacgtttgtttcttaaacgctgaacaaatgcgcgaataccgcggcaacttaactcagcctggaaaaaacagcccaacccgtgatacttcccctgcagaaaacctggccttgtttgaaaaaatgcgagccggtggttttaaagaaggtgaatgttcgctgcgcgctaaaattgatatgagctcagcttttatctgtatgcgcgaccctgtgatttaccgcgttaagtttgcgcatcaccatcaaacgggtgacaagtggtgtatttacccaatgtacgatttcacgcactgtatctctgatgcgctggaaggtataacccattcgttatgtacattggaattccaggataaccgccgtttatacgactggattttggacaacatcactattgattgccatccacagcaaattgaattctcccgtctgaaccttgagtatcaggtgatgagtaaacgtaagttgcatacgctggtcgaaggtggtcatgttgcaggttgggatgatccacgtatgcctactattgcaggtttacgccgtcgtggttttactccagcgtctttgcgtgagttcgctaaacgtattggtgtgaccaagcaagacaatatgattgaaatcagcgctttggattcctgtatccgtgaagatctagatgccaatgcgcctcgtgctatggctgtgatcgatccgttaaaagtgaccatcagcaactacaacgccgccgatgtggaatggttagaagtgcataaccatccaaaagaagaaagcatgggtagccgtaaagtgccgtttggccgtactttgtatatagaccgtgccgacttccgtgaagaagccaacaaaaagtacaaacgtatggtcacaggtggcgaagttcgcttacgtggcgcttatgtgattcgtgctgatgaagtgattaaaaacgaagcgggcgatattgttgaactgatttgttcttacgatccggacactttaggtgtgaacccggctgatggccgtaaagtgcgtggtgtaattcactgggttgaagcgtcacaagctgtgcctgctgaattccgtatttacgacaagttattcacagtagctaaccctgctgctgaagaagactttttagctgtaattaatccggcttctttaactgtgaaaacaggttgggttgaaccaaagtttaaagcagctgaagcagaaaaagccttccagtttgagcgggaagggtattactgtgccgacaacaaagattcaacgccggatcatttgggtgttaaccgcactgtagcgctgc

SEQ ID NO: 300341 - DNA, 1711 bp, Unknown
  Bacterial polypeptide expressing nucleotide sequence isolated from the Sargasso Sea
catgaataccgaacgcaacgacgcgccagcggcatccaatttcatccgcaacatcattgacgaagacaaccgcaccggcaaatggggccagcgcgtcgaaacgcgctttccgcccgagccgaacggctatctgcacattggtcacgccaaaagcatctgcctgaacttcggcgtggcgcgcaactacggcggcgtgtgccatctgcgcttcgacgatacgaatccggaaaaggaaagcgtcgagtacgtcgactcgatcatcgattccgtgcgctggctcggtttcgaatggcaaaaagacggcaaggaacagctttatttcgccagcgactactacgacaaactgtacgaattcgccgaactgctgatcgagcgcggcaaggcgtatgtggatagccagtcggccgaggaaatgcgcgcgaaccgcggctcggcctccgaagtcggcacgccgtcgcgcttccgcgagcgttcggtgcaggaaaacctcgacctgttccgccgcatgaaagccggcgagttcaaggaaggcgagcacgtgctgcgcgcgaagatcgacatgtcgtcgccgaacttcaacatgcgcgacccggtcatctaccgtatccgcttcgcgcatcactaccgcaccggcgacaaatggtgcgtgtacccgatgtacgactacacgcactgcatctcggacgcgctggaaaacatcacgcattcgctgtgcacgctcgagttcgaagaccaccgtccgctgtacgactggattctgaacgagctggccgaggccggaatcttcacgcgcccgctgccgcagcaaatcgagttttcgcgcctgaacctcacctacgcgatcaccagcaagcgcaagctgctgcaactcgtaacggaaggccatgtcgacggttgggacgatccgcgcatgccgaccatcgtcggggtacgccggcgcggcttcacgccggaagcgatccagttgttctgcgaacgaattggcgtcaccaaggtcgattcgtggatcgacatgagcgtgttcgaaggcgcattgcgcgacgatctggacgacaaggcgccgcgtaccgctgcggtgctcgatccgctcaagctgatcatcgacaacttccccgaaggcgtgagcgagccgtgcaacgcgcccgtccacccgcatcatcccgaaatgggggttcgggagttcccgatttcgcgcgagctgtggatcgaacgcgacgactacaacgaaacgccgccgaagggctacttccgcctgttcccgggtaacaaggtgcgtctgcgctacggctacgtgatcgaatgcatcggcgcggacaaggacgagaacggcaatatcgtcgcggtccactgcaactatttcccggacagcaaatcgggcaccgaaggcgcgaacaactacaaggtcaagggcaacattcactgggtcagcgcggcaggcgcggtcccggccgaagtgcgcatctacgaccggctgttcaaggaaccgcagccggacgccggtggccgcgacttcctcgaagcgctgaatccggattcgaagcgcgtggtcaacgcctacctggaaccgggtgcgcgcgacgcgctgccggaacaacgctatcagttcgaacgccatggctatttcgtcgccgatcgcgtcgattcgaaaccgggcaaacccgtgttcaatcgcatcgtcagcttgcgcgacagttggggcaagccggcataa

SEQ ID NO: 300342 - DNA, 567 bp, Unknown
  Bacterial polypeptide expressing nucleotide sequence isolated from the Sargasso Sea
catgagtcatgtggacactgaagtacgtccgagtaactttatccgtaatatcattgatgaggatctgaaaagcggtaagcacaccagtgtgcagacgcgttttcctcccgagccaaatggttatttgcatataggtcatgctaagtctatctgtttgaacttcggcatcgcgcgcgattaccaaggcctttgtaatttacgttttgatgataccaatcctgaaaaagaagacatcgattatgtgaattctattcaggcggatgtgcgttggttgggattccagtgggatggtgaagtccgttattcctctaactatttcgaccaattacaccaatatgccgttgagttgatcaacaaaggcttagcctatgtgtgtttcctcaatgccgatgaaacccgtgaataccgtggcaccttaaaagagccgggtaaaaacagcccgtaccgtgacacttccgttgaagaaaacctgcaattattcgaaaaaatgcgtaagggtgaattcaaagaaggtgagtgtgcactgcgtgccaaaatcgacatggcatcacctttcatgtgtatgcg

SEQ ID NO: 300343 - DNA, 1663 bp, Unknown
  Bacterial polypeptide expressing nucleotide sequence isolated from the Sargasso Sea
atggcggacgttgaacatcgccccactaactttattcgtcagatcatcgatgctgatctggcttcaggtaaacacaacaccactgtgacccgtttcccgccggagcctaacggttatctgcacattggtcatgccaaatcgatttgtctgaactttggtatagctcaggattatcagggccagtgtaacttacgttttgacgacaccaaccctgaaaaagaagacatcgactttgtcaattctattcagcaggacgtgcagtggttaggctttcaatggtctggcaatgtgcgttattcgtcagattactttgataccttgtatggttatgccgttgaactgattaacaaaggtttggcttatgtttgttttttaaacgcagaacaaatgcgcgaataccgtggcaacttaactcagcctggtaaaaacagcccaacccgtgacacttcacctgaagaaaacctggccttgtttgaaaaaatgcgcgctggtggttttaaagaaggcgaatgctcactgcgcgctaaaattgatatgagctcagcttttatctgtatgcgcgatccggtgatttaccgcgtcaagtttgcccatcaccaccagacgggtgacaagtggtgcatttatccaatgtacgactttacccactgtatctctgatgcgctggaaggcattacccattcgttatgtacactggagttccaggataaccgtcgtttatacgactggattttggataacatcactattgcctgtcatcctcagcaaatcgaattctctcgtctgaacctcgagtatcaggtgatgagtaaacgtaagctgcacactctggtcgaaggtggtcatgtctctggttgggatgacccacgtatgcctactattgcaggtttacgccgtcgtggttttactccagcgtctttgcgtgagttcgctaaacgtattggtgtgaccaagcaagacaatatgattgaaatcagcgctttggattcctgtatccgtgaagatctagatgccaatgcgcctcgtgctatggctgtgatcgatccgttaaaagtgaccatcagcaactacaacgccgccgatgtggaatggttagaagtgcataaccatccaaaagaagaaagcatgggtagccgtaaagtgccgtttggccgtactttgtatatagaccgtgccgacttccgtgaagaagccaacaaaaagtacaaacgtatggtcacaggtggcgaagttcgcttacgtggcgcttatgtgattcgtgctgatgaagtgattaaaaacgaagcgggcgatattgttgaactgatttgttcttacgatccggacactttaggtgtgaacccggctgatggccgtaaagtgcgtggtgtaattcactgggttgaagcgtcacaagctgtgcctgctgaattccgtatttacgacaagttattcacagtagctaaccctgctgctgaagaagactttttagctgtaattaatccggcttctttaactgtgaaaacaggttgggttgaaccaagtttaaaagcagctgaagcagaaaaagccttccagtttgagcgggaagggtattactgtgccgacaacaaagattcaacgccggatcatttggtgtttaaccgcactgtagcgctgcgcgataccttcttcgaagactaaa

SEQ ID NO: 300344 - DNA, 1672 bp, Unknown
  Bacterial polypeptide expressing nucleotide sequence isolated from the Sargasso Sea
atgagtcatgtggacactgaagtacgtccgagtaactttatccgtaatatcattgatgaggatctgaaaagcggtaagcacaccagtgtgcagacgcgttttcctcccgagccaaatggttatctgcatattggtcatgctaagtctatctgtttgaacttcggcatcgcgcgcgattaccaaggtctttgtaatttacgttttgatgataccaatcctgaaaaagaagacatcgactatgtgaattctattcaggcggatgtgcgttggttgggattccagtgggatggtgaggttcgttattcctctaactatttcgaccaattacaccaatacgcggttgagttgatcaacaaaggcttagcctatgtgtgtttcctcaatgccgatgaaacccgcgaataccgcggcaccttaaaagagccgggtaaaaacagcccgtaccgtgacacttccgttgaagaaaacctgcaattatttgaaaaaatgcgtaagggtgaattcaaagagggtgagtgtgcgctgcgtgccaaaattgacatggcatcgcctttcatgtgtatgcgcgatccggtgatttaccgtattcgttttgctcaccatcatcaaacgggtgacaagtggtgcatttacccaatgtacgacttcactcactgtatttccgatgctttggaacacattactcactcgttatgtacgcttgagttccaagacaaccgtcgtctttacgattgggtgctcgacaatttagatgatttccaagcgcccaaccgtactcgtcagtacgagttttctcgcttaaatcttgaatatacgctgatgtctaagcgtaaattaaatgacttagtgacacgtaagttagtttctggatgggatgacccacgtatgccaacaattgctggcctgcgtcgtcgtggttataccccagcgtctatccgcgagttttgccaacgtattggtatcactaagcaagaaaacatgattgaagcggcaatgcttgatgcctgcatccgtgaagagcttaacgaatatgcccctcgtgcgatggccgtactgcgcccattgaaagtcgtgattgagaactacccagaaggtcaaatcgagacgattcaagcggcttctcacccaagcgatgaaagcatgggtacacgcgaacttgcctttggccgcgaactgtatatcgatgtggcggatttcagagaagaagccaataagcagtacaagcgtctagtaatgggcaaagaagtgcgcctgcgtaatgcttatgtgattaaggctgagcgttgtgacaaagacagcgaaggtaatatcaccacggtttactgtagctacgatgcggataccttgggtaaaaaccctgccgatggtcgcaaggtaaaaggcgtaatccattgggttgaagcgactacagctaaacctgctgaattccgtttataccaacgcttgttcacggatccaaatcctgcagcagcagagacagtggatgaagtgcttaaccctaactcacttgaagtggtgaatggtttagttgaggcaagccttgtgaatgcgccagcggaaaaagcataccagtttgaacgtgaaggttatttctgtgctgacaataaagactcatcagccgagcatttagtctttaacctaacagttgcgctgcgtgactcgtttgaatagc

SEQ ID NO: 300345 - DNA, 317 bp, Unknown
  Bacterial polypeptide expressing nucleotide sequence isolated from the Sargasso Sea
ccgcaaggtcaagggtgtgatccactgggtgccggctgccgagagcgtcgagtgcgaagtacgcctgtacgaccgtctgttccgctcggccaacccggagaagagcgaagagggcggcagcttcctcgacaacatcaatccggaatcgctggtggtgcttaccggctgccgcgctgagccgtccctggccaaggccagcgctgacgaccgcttccagttcgagcgtgaaggttacttctgcctggacaaggattcgaccgctggcgcgctggtgttcaaccgtaccgttacgctgcgcgattcgtggggtcagtaat

SEQ ID NO: 300346 - DNA, 1660 bp, Unknown
  Bacterial polypeptide expressing nucleotide sequence isolated from the Sargasso Sea
aatgtctgataaacaacgaaattttattcaacgtattattgatgaagataatttatcaaataaatatgataaaagagttcatactaggtttccccctgaaccaaatggttacttacatattggtcacgcaaaagctatttgcttaaattttaatattgctgatgaatatggaggaaaatgcaatctaagatttgatgataccaatcctgtttcagaagatatagaatatgtaaatgcgatcaaagatgatgttgaatggcttgggtataattgggatgataggttgtgttttgcctcagattattttgaaaagatgcatcagtatgcaatacaactgattgaacaaggagatgcttttgtttgcgacctaactagtgatgaaattagacaatcaaagggcaatttaacagagcctggtaatgatagcccatatagaaatcgaagtatttcagaaaatattgatctcttttctcgaatgactgcaggtgagtttcaaaatggagaaagaacattgcgagctaaaatagatatgtctcatcctaatttgaatatgcgagatcctgtgatgtatcgaattattcataaaagtcatcatcgaactaaaaataattggtgtgtttatccgacttatgattgggcgcatggccttgaagattctattgaaaatattactcattcattatgctctattgaatttgaagatcataggcctttgtatgactggtatttagataagcttaatgtttatcaccctcagcaaatagaatttgctcgattaaatttggactacactgtaatgtctaaaagaaaattaaagaaactagtagacgaaaaacatgtatcaggttgggatgaccctcgtatgcctaccatatctggtatgcgtagaagaggttatacggctcatgcaataagagcttttatggatgaggtaggtgttgcaaaaagagataatgtgatggagttagcaaagcttgagcatcatttaagacaacatttaaacaaagtttctcaaagaagaatggcagtcctaaatcccttaaaaattataattactaattatcctaaaaatagctcagaaaaaatagaagcaattaataaccctgaaaatcctgatgatggtttaagaaatattacatttggttctgaaatatatattgaacaaaatgattttatggaagatccgcctaagaagttttttcgtcttacgctaggacgtgaagtgcgattacgatatgcttattatattacatgtaataaagtgattaaagataaagatggaaaccctatagaattacactgtacgtatgatcctgaaagtaagggtggcacacctgatggtcgtaaagtaaaggcaactttacactgggtaaatgctcaggattccattaaagcaaaagttaatctttacgatcggctattttcagagccaagtcctgactctgttgatgattttttatcagttataaatcaaacttctcttgaagtattatcaaattgtatgctggaaagttctttgttggatttttctccaagtgaaactgtacaatttgaaagattaggttacttttgtttagatcttaattcatcagaagatcacccagtttttaataggactgttaccttaagagattcttggacaaaaatcgcaaaacaataa

SEQ ID NO: 300347 - DNA, 1507 bp, Unknown
  Bacterial polypeptide expressing nucleotide sequence isolated from the Sargasso Sea
ttttaaccttggtaaaaaatataactctcctgttaatttaaggtttgacgacacaaaccctgagaaagaagcaaaagagtatgttgacgccattaaacacgacattaattggcttggctttgactgggacaaagagtgttatgcatctgactactttgatcagcttcatgagtgggcaattattttaattaaaaaaaacaaagcatacatagactctcaaacttcagagcaaatagccactcaaaaaggaacacccactaaaccaggacaaaatagcccctttagagaaagaccaaacgaagaaagcctttcaatttttgaaggaatgtataaaggggagtacaatcaaggagaacacgttttaagggcaaagattgacatggcctcccccaacatgttaatgcgagaccctgttgtttatagggtgatgaaggtaagccaccatagaaccggagaaaattggaacatttacccaatgtatgattggacacacggagaatctgattatatagaacaggtttcacactcactttgtactcttgagtttgagcctcacagggaattgtacgactggtttttagatgcaattagtccattagaaggaattagaccaaaacaaagagagttttcaaggcttaacctctcttttacaattacaagtaaaaggaagcttgctcaattagttgaaaaaaaaatagtttcagggtgggatgatccgcgaatgccaacaatttctggactgagaaaaagaggatatacaccccagtccctaaaaaactttgcagtaacagtcggagtttcaaaaagggaaaacgtcattgatgcttcacttttagagttttgtgtaaggtcacatctaaatgaaattgctcctagggcaatggcggttattaaccctttaaaaataaaaattataaattatgctaagcaagaaggagagaagataaattttgatattaacccacaaaacaaagaagaaggaaaaagagaaataatatttacagatgaaatgtttattgagaaagaagacttccaagaaaacccagaggacgggtttttcaggctgtctccaggagaagaggttaggttaaagaatgcatatataataaaggccgttgatgttgttaaagatgaaaagggaggtgtgactgaagttttatgcgagtacgacccaaaaagtaaaagcggatcaaacacaccagagagcaacaggagggttaaaggaacaattcactgggtttcatcaaaaaaagcagtgagggcaaaaataaacatatatgacaggctatttaaggttgaagagccaggaaaaaacgaaacaatagaaaatgaaataaacgaaaactcactaataacaaaagaagcttttgttgagccatatttatcaaatgcaaaagatgggcagcaatatcaatttcaaagattaggttatttcgttaaaacagacaacaaaaaaaccctagagtttaacaaaactgtagggttaagagatggttggaaaaagtaa

SEQ ID NO: 300348 - DNA, 1669 bp, Unknown
  Bacterial polypeptide expressing nucleotide sequence isolated from the Sargasso Sea
catgagcgacaagaaaaaatatcgaggcaaggatttcattcgacaaatgatccatcacgatattgactctggcgtcaatgatggaagattggccacgagatttcctccagagccaaacggatatttacacatagggcatgcactttcaatttgcattaattttggaatcgcaaaagaatttgacgcgccttgttatcttagattcgatgacaccaatcctgcaaaagaatcggatgagtatgtcaactcgatcatggaagacgttaaatggttgggttttgactggggcaatgatttagctcatgcttcggattactttgactcaattcatgaatttgccatagagctgattgaaaaagatcttgcttacattgacagccaaacgagcgaagaaattaaaaactcaagaggcacgctgaatgctccaggaattgaaagcccgtatcgcgatcgacccatctctgagaatcttggattatttgatcgaatgaagaacggtgaatttgaaaatggtgaacatgtgcttagagcaaagatagacatgtcctcaccaaacataaatctaagagatcccatcatatatagaattttgcatttagatcatcagagaacaggtagtaaatggtgcatatatccaatgtacgactttgctcacaccctttcggatgcgattgaaggaactactcactcgctttgcacactcgaatttgaagaccacagacccctgtatgagtggtttctcgacaaccttgatctcccaaccagaccaagacagatcgaattttcacgtttgaacttggagcacacaataaccagcaaaagaaaacttgctgatcttgttgtttcagggcatgtttcaggatgggatgatcctagaatgccaaccctatccggactcagaaaaagaggctatccagcaagtgccataaaagaattttgcaacagggttgggattactaaaaaagataagaccattgaaatgtcgcttcttgagagcactgttagggaagaattagattcatcctgcaacagagtcatggccatcctgaatccattaaaagtgacaatcaagaattacccagaaggcgagactgaaatgctcgatgcaaggaatcatccaaaagacaaagaaatgggaagcaggcaattgcctttcagtcaaaatattttgattgagaaagacgatttcatggaaagtccaaacgaagacttcttcagactctcgccaggtgctgaagtcagactcagatatgcatacattattagatgtgatgaagtcattaaagatgagaatggtgaaatagtagagctcatatgctcatacgatcctgaaacaaaaagtggtactggaacatcaaataagaaagttaaaagtgcaatccactgggtttcatcggatcattccgtttctggaaatgtgaatctttttgaaacactctataacgatccaaatccagactctgagagtccgatcaatcaaaactccatggttgaaatccacaaccccgcatttgagaaatctcttgttgatgccgtagttggttctcgatttcaatttgagagaaatggatatttcatcctaaacacagtcgaagacgagagactttcgttcaatagaattgtaactctcaaagacacttgggcgaaaattcagaaaaaaaagggataa

SEQ ID NO: 300349 - DNA, 1036 bp, Unknown
  Bacterial polypeptide expressing nucleotide sequence isolated from the Sargasso Sea
ccaatgtacgactttgctcacaccctatcagatgcaattgagggaacaactcactcactgtgtacacttgaatttgaggatcacagacctctatatgagtggtttcttgataacctcaatctatcaaccagacccagacaaattgaattctcacgtttgaatgtggaacacaccatcaccagcaaaaggaagctgggtgagcttgtcgattctggtgatgtatcaggatgggatgatccaaggatgccaaccatatcaggactcagaaaaaggggttatccagcgagtgctctcagagaattttgtaagcgagttggtattacaaaaaaagataagtccattgaaatgtcacttctggaaagtactgtaagagaagaattggatgcaacttgcaatagagtgatggccataatgaatcctctaaaagtgacaattaaaaattatccagatggtgagtctgaaacacttgaagcaagcaatcatccaaagaaaaaagaaatgggaagccgagagatgccatttggtaaaaatatattgattgagaaagatgatttcatggagagtcccgaagaagatttttataggctgtctccaggagctgaagtcagacttaggtatgcatacatcatcaaatgtgaagaaataataaaagatgaagatggagagatcatagaactcatctgttcatatgatccagatacaaaaagtggtgttggtaaatcaaaaaagaaggtcaaaagtgcaatccactgggtttctgcagaccactcaattacaggaaaagtgagcctctttgaaacactctactcagatccaagccctgactctgatagcccattgaatccgaactcaaagcttgaaatcgatgaagctcaatttgagcaatctttgtccaatgccaaaattgggtctaggttccaatttgaaagaagcggatattttattcttgatgagattgaggatgaaaaactctcattcaacaggattgtcactcttaaagacacttgggcaaaaatacaaaagaaaaagaaataat

SEQ ID NO: 300350 - DNA, 1231 bp, Unknown
  Bacterial polypeptide expressing nucleotide sequence isolated from the Sargasso Sea
gatgaaaaatactaataaacattttatccaaaagataattgatgaacataatctttctggaaagtttaataataaagttcatacacgctttcctcctgagcccaatggatatctacacattggacacgcaaaagcaatctgtttaaatttcaatatcgcagaagaatataatggaaaatgcaatttaagatttgatgatacaaatccaattgctgaagaggaagaattcgttcgatctattcaggaagatgtaaagtggttgggttttgattgggaggatcgcctgtgcttcgcctcagattattttcaacagatgtatgaatatgcactacaactaatccaaaaaggctcagcttatgtttgcgagctcacaccagatgaaataaaaaataccagaggaacattaaatgagccgggcagtgaaagtccctatagaaatcgcagtgttgatgaaaatttagatttgtttaaacgaatgaaattgggtgaatttgataatggcagtaaaacattaagggcaaaaattgatatgggtcatccaaatatgaatatgcgcgatccggttatctatagaattttacatgcccaccatcaccgaacgaaagatgaatggtgcatttatcctatgtatgattgggcacatggacttgaagattctattgaaggtgttacgcattcattatgctcattagaatttgaagatcaccgacctttatacgattggtatttagatgagttaggcgcttaccatccacaacagattgagtttgctagattaaatcttagctataccgttatgtcgaagcgcaaacttaagattttggtagataataaacacgttgagggttgggatgatcctaggatgcctaccatatctggctttagaagaaggggttatactccagaagcgatcagaaatttcatggaagaagtaggggtagcaaaacgtgataacgttatggatgtcgcaaagcttgaatcctctttgcgctcagatcttaatcagcgttcactgcgacgtatggcggtattaaatccacttaaagttattattacaaactatcctgaagataaggaagagcttgttacggcaaagaataatcctgaagatgaatccacaggcaccagagagctcccattctcaagagaattgtatattgaaaaagatgattttttagaggaaccatcaaaaaagttcttccgactttcacctggtaatgaggttcgcttt

SEQ ID NO: 300351 - DNA, 1711 bp, Unknown
  Bacterial polypeptide expressing nucleotide sequence isolated from the Sargasso Sea
catgagcaccgaacgtaacgacgcccccgcggcttccaatttcatccgcaacatcatcgacgacgacaaccgcaccggcaaatggggcggacgcgtcgagacgcgctttccgcccgagccgaacggctatctgcacatcggccatgcgaagagcatctgcctgaacttcagcgtcgcgcgcgactacggtggcgtgtgccacctgcgcttcgacgatacgaacccggaaaaggaaagcgtcgagtacgtcgattcgatcgtcgacgcggtgcgctggctcggcttcgactggcgcaaggacgcggtcgatcaccagtacttcgcgagcgactactacgacaagctgtacgagttcgccgagctgctgatccagcgcggcaaggcctatgtcgacagccagagcgccgatgaaatgcgcgcgaaccgcggctcgctgacggaaggcggcaagccgtcgccgttccgcgatcgcacgccggaagaaaacctcgacctgttccgccgcatgaaggccggcgagttcaaggaaggcgagcacgtgctgcgcgcgaagatcgacatggcttcgccgaacatgaacatgcgcgacccggtgatctaccggatccgctacgcgcaccactaccgcaccggcgacgcatggtgcgtgtacccgatgtacgactacacgcactgcatctcggatgcgctcgagggcatcacgcattcgctgtgcacgctcgagttcgaggatcaccgcccgctgtacgactgggtgctgaacgaactcgcggaagccggcaagttcacgcgcccgctgccgcaacagatcgaattctcgcgactgaacctcacgtacgcgatcaccagcaagcgcaagctgctgcagctcgtgaccgaagggcacgtcgacggctgggacgacccgcggatgccgacgatcgtcggcgtgcgccgccgcggcttcacgccggagagcatccacctgttctgcgagcggatcggcgtgacgaagatcgactcgtggatcgacatgagcatcttcgaaggcgcgctgcgcgacgacctcgacgacaaggcggcacgtaccgtcgccgtgctcgatccgctgaagctcgtgatcgacaactatccggaagacctcgaggaagcgtgcacggcgcccgtgcacccgcaccacccggatcgcggcgtgcgcacgttcccgatctcgcgcgagctgtggatcgagcgcgaggacttcgtcgagaacccgccgaagggctatttccgtctgttcccgggcaacaaggtgcgcctgcgctacggctacgtgatcgaatgcacgggcttcgacaaggacgccgacggcaacgtgacggccgtgcactgcaactacttcccggacagcaagtcgggcaccgaaggcgcgaacacgtacaaggtcaagggcaacatccactgggtcagcgcgaagcatgcgcagccggccgaagtgcgaatctacgaccgcctgttcaaggagccgcatccggacgcgggcggcgcgaatttcctcgaggcgctgaatcccgactcgaagaagatcgtgcaggcatacatcgaaccgggcaacgacgacatcgcaccggaaacgcgcctgcagttcgagcgtcacggctacttcgtcgccgatcgggtcgattcgaaaccgggcaagccggtgttcaaccggatcgtcgggctgcgcgacagctggggcaagccggcttga

SEQ ID NO: 300352 - DNA, 394 bp, Unknown
  Bacterial polypeptide expressing nucleotide sequence isolated from the Sargasso Sea
aatgacaaagactaataatactgataattttataagaaagatcattgataaggataatgaatcggataagtggggtgggagagttcacacacgttttcctccagagccaaatggttatttacatattggtcacgcaaaatcaatttgccttaattttggtttggcaatagagtatgatgggaaatgcaatcttagattcgatgacacaaatcccataaaggaagaaagtgagtatgtaaggtcaattattgaagatgtttcgtggctaggctattcatggggcaatgaaccattatttgcttcggattattttggtaaaatgtacgattttgctgtagagcttatcaaggcagggaaggcgtatgtttgtgatttggatccagatcaaaagtaa

SEQ ID NO: 300353 - DNA, 1567 bp, Unknown
  Bacterial polypeptide expressing nucleotide sequence isolated from the Sargasso Sea
atggcggaaaaagagctacaaacaaattttataaaaaatatcattatagatgatattaaatcgaataaaaccaagaagttgattacaagattccctccagaaccgaatggatatctgcacattggtcacgctaaatcgatttgcttaaattttgaacttgcaaaagaatttggtgggcaatgtaatttacggtttgatgatacaaatccagaaaaagaaagtgatgaatatataaaatcaattcaagaagatgttagatggttgggattttcatgggataagctttgttttgcttccgattattttgatcagctttatgattatgcattaaaacttattgagaaagatttagcatacgttgattctcaaaccggagatcaaattaaacaaagtagaggaactcttcaggaaccaggtataaatagtccttacagggatcgttctgttcaagaaaatcttacgttatttaaagatatgaaagatggtaagtttcctgacggaactcatgtgcttcgattaaagattgatatgaaaaattcaaacattaatatgcgagacccagtaatttatagaattaagcattttagacaccaccgcactcaagataaatggtgtatttacccaatgtatgattttactcattgtctttcagatgctattgaaggtattactcattcattgtgtactcttgaatttgaagatcacagaatattgtacgattggatcattgataaatgcgatattaaaaataaacctcgtcaaattgaatttgcaagattagagttagaaaactgtgttatgagtaaaagaaaacttaatgagttagttaataataaagatgttgaaggttgggatgatccaagaatgccaactatttcaggattaagaaataaaggttttacagcaaaatctataagggacttttgcggaagaattggtatcaccaaaaaaaacagcgaaattcaattttcggtattagagaattcaattagagaggaattaaatgagagctcacctagggcttttggaatactcaaacccttaaaagtaaaaattataaattttgatgaaggcgaaagacaaattgaggcatcgaatggtagaaaattgatactttcaaatgaaatatttattgatgaggatgattttatggaatctcctcctgaaaaatattttcgcttatatcctggaaacactgtaaggctcaagtatgcttgtaatattacatgtaaaaacgttgtaaaaaataatgatggaagtatagattttttagaatgcgaatacgataaggatagttatgaacttacaaaagataaaaaagttaaaggtataattcattggcttgatcaaaaaagttccgtacagtcagttattcaaaactttgaaggtgctaaaaaagttacttatgacaaagcagtagttgaagcttcaattttaaacttaaaaaaagaaaacaattgtcagtttgagagagttggttattacaaaattaacaatgtaaataatggctctcatgagtgttatcaaattgtgaccttgaaagatacttcaaaaagaaaagtataga

SEQ ID NO: 300354 - DNA, 1672 bp, Unknown
  Bacterial polypeptide expressing nucleotide sequence isolated from the Sargasso Sea
catgagtcatgtggacactgaagtacgtccgagtaactttattcgtaatatcattgatgaggatctgaaaagcggtaagcacacgagtgtgcagacgcgttttccacccgagccaaatggttatttacatataggtcatgctaagtccatctgtttgaactttggcatcgcccgcgattaccaaggtctctgtaacttacgatttgatgataccaaccctgaaaaagaagacatcgattatgtcaattctattcaggcggatgtgcgttggttgggattccagtgggatggtgaggtgcgttattcctctaactatttcgaccaattacatcaatatgccgttgagttaatcaataaaggcttagcctatgtgtgttttctcaatgctgatgaaacccgtgaataccgtggcacgttaaaagagcctggtaaaaatagcccttatcgcgatactcctgtggaagaaaacctgcgcttatttgaaaaaatgcgtctaggtgaattcaaagagggcgaatgtgcgctgcgcgctaagattgatatggcatcgcctttcatgtgtatgcgcgatccggtgatttaccgtattcgttttgctcaccatcaccaaacgggtgataagtggtgcatttatccaatgtacgattttactcactgtatttccgatgcgctcgagcacattactcactcattatgtacacttgagttccaagacaaccgtcgtctgtatgactgggttctcgataatttagatgatttccaagcgccaaatcgtactcgtcaatatgagttttcacgcttaaatcttgaatatacgctgatgtctaagcgtaaattaaatgacttagtgacacgcaagttagtaactggctgggatgatccccgtatgccaacaattgcaggtctacgccgtcgtggttataccccagcgtctatccgcgagttttgccaacgtattggtatcactaagcaagaaaacatgattgaagcggcgatgctcgatgcctgcatccgtgaagagctaaacgaacatgccccacgtgcgatggccgtactgcgcccattaaaagtggtgattgagaactacccagaaggtcaaatcgagacgattcaagcggcttctcacccaagcgatgaaagcatggggacgcgcgaactcgcctttggccgcgaactgtatatcgatgtggctgacttcagagaagaagccaataagcagtacaaacgtctagtcatgggcaaagaagtgcgcctgcgtaacgcctatgtgattaaagccgaacgttgtgacaaagacagtgaaggtaatatcactaccgtctactgtagctacgatgccgatactttaggtaaaaaccctgccgatggtcgcaaggtgaaaggcgtaatccattgggttgaagcgactacggctaaacctgctgagttccgtttataccaacgcttgttcactgatccaaatcctgctgctgccgagacagtggatgaagtgcttaaccctaactcacttgaagtggttaatggtttagttgaagcaagccttgcgaatgcgccagcggaaaaagcttatcagtttgagcgtgaaggttatttctgtgctgacaataaagactcttcagccgagcatttagtgtttaacctaacagttgcactgcgggactcgtttgaatag

SEQ ID NO: 300355 - DNA, 1516 bp, Unknown
  Bacterial polypeptide expressing nucleotide sequence isolated from the Sargasso Sea
atggcggccattgcttcattgcgttttgatgacaccaacccggtcaaggaggatgcgacctattcccaggccattctggaggatgtccgttggcttgggttcgacttggaaaaccggctgacccacgcatcagattatttcgagaaactctatgagttcgcctgtgttctcatccgccggggaaaggcttatgtcgacagcctgagcgcagagaagattcgggaataccgaggcaccctgaccgaacctggaagtaacagtcccttccgggatcgtaccattgaagagaatctcagccttttccagcgcatgcgtgaaggggaattcgaagatggaagccatgtgcttcgggcaaaaatcgatatggcggcgcccaacatccatatgcgagacccgaccctctaccggatccgcaaggtttctcaccaccgaaccggaaacgtatggtgcatctacccgatgtatgatttcacccactgcctgagcgatgcattggagggggtgacgcattcactctgcacccttgagtttgaagacaaccgtccgctttacgactgggtgctccaggaggccgaagctccatgtctgccgaagcaatatgaattctcgcggctcaacctgcagtacaccgttctcagcaaacgtaaactgatccagctggtggaagagaatcatgtcgaaggctgggacgatccgcgtatgccaagcctgatcggcatccgccgccgggggtttcctcctgaatcgatccgcctcttttgtcaacggatcggaatttccaagagtgagaacaacatcgatttttccgtcctcgaagactgtgcccgggaagtgctcaatcaggatgcacccagggcctttgcggtgctgaaaccgctgaaggtggtgatcaccaattttccggaaaaccaagtcgagatgctggatgctccggttcatccccaggatcctgaagccggaaggcggagtctgcccctgacccgggaaatcctgatcgaggaagatgattttcttaaagatcctccgcgcaaattcttccggttggcacctggaaaagaggtccgtttgcgttatggatatgtgatccgctgtgatgaggtggttcgtgatgattctggaaagatttcagaactccgctgcacttacgatcctcaaactgcgaaaggggctcagcccgaaggaaggaaagtcaaaggcatcatccattgggtttccgcgacccatagcatttccactgaagttagactctatgaccgtcttttccatgaagcttcacccggcagcaaaaatgaggacggagattttctgagggacttgaacccggattctatccaaatcctgaaaaactgccgtcttgaacccggattgaaaaatgtcaagggaggaagccgttaccagttcgaaagactcggatacttttgtgccgatttgaaaaactcttcaaacgaacttcccgtcttcaaccgtatcgtcaccctgcgggatacctgggcgaaactcacgagaagtgattaac

SEQ ID NO: 300356 - DNA, 628 bp, Unknown
  Bacterial polypeptide expressing nucleotide sequence isolated from the Sargasso Sea
atgactgtcgatacacaaaaaagcgatgagcctggcaacgacttcatacgacaacgaataaagagcgatgttagtgctgatcgcttatcacatggagtaatcacccgatttcctcccgagccaaatggatttcttcatattggacacgcaaagagtatttgcttgaatttcggtgtagcccaagaatttggtggcaagaccttccttcgttttgacgatacaaatcccgaaaaagaagatgaaattttcgtccagtcaattttggaagacgtgaagtggttaggttatacctgggataacctgacctatgcgtcggattattttgagcaactttacacatttgcggaaggactgattctggatgggaaagcctatgtttgtagtctgacgagtgaggaaatacgcgaatcgagggggacgttgaccgaggtcggtaagaacagcccctatcgggatcggagtattgatgaaagtctagaaatgtttaggtcaatgaagcagggcaagtttgaggaaggtagccaggtactcaggctaaaaatcgatatggcttcccccaacatgaatctgagggaccccgtcatttatcggattcgttatcaatcgcatcaaagaactggagataagt

SEQ ID NO: 300357 - DNA, 1315 bp, Unknown
  Bacterial polypeptide expressing nucleotide sequence isolated from the Sargasso Sea
aatggccgagactgaacatcgtccgaccaattttatccgtcagattattgataaagacctgtctagtggtctacatgacgcaattaaaacacggtttccaccagagccgaatggcttcttacacattggccacgccaagtctatctgcttgaattttggtattgctcaagactacacaggtacgtgcaatttacgctttgacgataccaaccctgcaaaagaagacattaccttcgttaattcaattaaggaagatgtgcaatggcttggatttacgtgggacggagaagcgcgctattcatcgaattactttgaccaactacacgcatacgccgttgaacttattgaaaaaggcttagcctatgtagatttttcagcgcaagacgttatgcgcgaaatgcgtggcacacttaaagagcctggtcaaaatagcccttatcgcgatacagacgttgaaactaacctcagtgagtttgccaaaatgacggcaggcgaatataaagaaggtgagtgtagtctgcgtgcgaaaattgatatggcatcgccatttatgtgcatgcgtgacccggtaatttatcgcgttaagcatgctcaccatcatcaaactggtgataagtggtgcgtgtatccaatgtacgattttacacattgtatctcagacgccattgagggaataacgcactccctgtgtacactagagttccaggataaccgtcgtctttatgattgggttatcgaaaacatttctatcgactgcacgccaagacagtatgaattctcacgtcttaatctagaatatacggtattaagcaagcgtcgtctgattcagttagtcgacgaaaaccatgtacatggctgggacgacccacgcatgcctaccattgcaggtttacgccgtcgcggctacacaccgggttcaatcgttgagttttgtaaacgcatcggtgtgactaagatggacaacatggttgaaatgtccatgctagaagcgtgcatacgcgacgacctaaatgcaaatgctcctcgcgcaatggccgtactagatccaataaagctcgttatcgaaaattatgaggaaggccagacagaaacgctggttgcgccaaatcatcctaacgatgaaagtatgggtacgcgtaacatcggcttcagtcgcgaagtgtatatagaagcagaagacttccgagagtcggcgaacaagaagtttaagcgcttagtgcttgataaagaagttcgtcttcgcaacgcctacgtggttaaagctaatcgcgttgaaaaagatgaaaatggtaatgtaacaaccgtttttgtactt

SEQ ID NO: 300358 - DNA, 712 bp, Unknown
  Bacterial polypeptide expressing nucleotide sequence isolated from the Sargasso Sea
attgggaaagagagcaagcagaaaaccattcatgagcaaaaaagataaatatcgaggcaaggatttcatccgtcagatgatccatcatgatattgactcaggtgtcaacgatggaagattggcaacaagatttcctcctgagcccaacggatatttacacattggtcacgcgctttcgatctgcattaattttggtatagctgaagaatttgatgcgccctgctatctgagatttgatgacaccaatcctgccaaagagtctgatgaatatgtcaactcaatcatggaagatgtgaagtggcttggctttgattggggcgataatcttgcacatgcttctgattactttgaatcaatccatgaatttgccatagaactgattgaaaaagatcttgcctttgttgatagccagacgggtgaagaaataagaaatacaagaggaacactcaactctccaggaattgaaagtccatatcgtaatcgctcagtatctgagaatcttggattattcaatagaatgaaaaatagtgaatttgaaaatggagagcatgtccttagagcaaaaatagatatgtcatcaccgaatatcaatctaagggatcccgtgatttatcgtatcttgaacttagaacatcaaagaaccggtaagacttggtgcatatatccaatgtacgactttgctcacaccctatcagatgcaattgagggaaca

SEQ ID NO: 300359 - DNA, 949 bp, Unknown
  Bacterial polypeptide expressing nucleotide sequence isolated from the Sargasso Sea
cctgagcggcggggggaaacctccgccgcttttttttcgcccatctgaccccataatcttcttcagatacgtattttcagtaactaatagttgtctctacgccccgcttgtaagatcatgtgccgttatacgttgtttacgctttgaggaacccacgatgagtgaggcagaagcccgcccgactaactttattcgtcagatcatcgatgaagatctggctactggtaagcacaccaccgttcatactcgtttcccgccggaaccgaacggttatctgcacattggccatgcgaagtctatttgcctgaactttggtattgctcaggattatcaaggccaatgcaacctgcgtttcgatgacaccaacccggtgaaagaagatatcgaatacgtggagtcgattaaaaacgacgtgcagtggttaggtttccactggtccggggatgtttgctactcgtctgattattttgaccagctgcaccagtatgccgttgagctgattaacaaaggcctggcctatgttgacgaactgtcggcggatgaaattcgcgaatatcgcggttcgctgaaagcgccgggtaaaaacagcccgtatcgcgatcgcagcgtggaagagaacctggcgctgtttgaaaaaatgcgtgccggtggttttgaagaggggaaggcctgcctgcgtgcgaaaatcgatatggcctcgccgtttatcgtcatgcgcgatccggtactgtaccgcattaaatttgccgatcatcatcagaccggcagcaagtggtgcatctatccgatgtacgacttcacgcactgcattagcgatgcgctggaaggcattacgcactccctgtgtaccctggagttccaggacaaccgtcgcctgtatgactgggtactggacaacatcagcatcccggttcacccgcgtcagtacgaattctcgcgtctgaatctc

SEQ ID NO: 300360 - DNA, 913 bp, Unknown
  Bacterial polypeptide expressing nucleotide sequence isolated from the Sargasso Sea
atgctgcatgctgaaaaagagtttttagtatatgaatccgagcgctttttatttaaagatgttgttgcaaaagcagctcaagttggaaatgctctgattgctgaaggaattacaaaaggggatcgtgttgctatatgcatgcagaataatccagaattcatttttgcttacatgggaatagttgggattggtgcggtctgtgttccgcttaattcatggtgggttccagatgaagttatatattcacttaatcattctgaagctaaacttttatttggtgataagaaaagacttcaaggactagaagatttaaaaaatttgaaaaagattgttactagctatactccagatgacaatttcacatcttttaatgattttataaaagatcactcaactgactggccagatattgaaatagccagggatgatcacgcaactatttattacacatctggttctacgggaagaccaaaaggtgtcttgtcctctcaaagagggattatttcatctatgtttagttgggcctgtatatcaactgttctgagtcaaagagaagctcgtttgggtaaagatagttcacctttggcaagttctgagtcttgcattcttttgtgtgtacctttattccatgcaaccggcagtcatgttgctttcttattgtctatattggttggcagaaaagtagtaatgatgaaaaaatgggatgcaggagaagcgataagactaattcacgatgaaaaaataacagatataactggcgtcccaacccaaacctgggaattattaaatcatccagataaagataattatgatttatcttcattaaaaactcttggtggtggaggaggtccaagaccggctgaacacgtaaagttattggatgataatttcgaaggaagccaggtattggata

SEQ ID NO: 300361 - DNA, 717 bp, Unknown
  Bacterial polypeptide expressing nucleotide sequence isolated from the Sargasso Sea
cttacttcgcttctgatgttgcatatcataaagataaattagatagaggttttgatgaaattataaatatctggggctccgatcatcatggatacataaagagggtcgaagcatctttggaaggcttaggctatgacaaaaataaactttctgtgaagcttgttcaatttgcaaatctaattaaaggtggttcgccagttaagatgtctacaagaagtggagagttttactctctcgaggacttattaagtgatgttggctctgatgttgctagattttattatctttcaaaacaaactgatcagcatttagatttcgatctagacttagcagtctcaagcaagaaagaaaatatgtattactacattcaatacgcacacgctagaatatgctctcttgaaaaaaaggctggcttaaaagattttctagcagaagatatttctgaagaccatgtagatatttgctcaaatcttattcatgagatctcaaaatatccaaatgtacttgaaaaaacctgtaacaacctctcgccacacttattaattttttatttaaaggatttagcttcaatttttcataatttttataacgataacaaaatattagacaagtcagaatctgaaaaattaactatcctcgcagttactcatgccataaaggaagtaatagcggatagcctcaatctgttgggtgtaaaggcattagaagaaatgtaaa

SEQ ID NO: 300362 - DNA, 834 bp, Unknown
  Bacterial polypeptide expressing nucleotide sequence isolated from the Sargasso Sea
atattctttttaaatcaaaaaattttggagatgatgaggatagagttgtaaaaaaacatgatggtcaatggacttattttatgccagatattgcttatcatttaaataaatatgaaagaggatttgttaggatgataaatatctttggggctgatcattcaggatatatagctagaatgaaggcggctgttaaagctgtaactaatgaaaaggcaaatctcgaaataaaaacttgtcaattggttcgtttgtctagaggtggaaagcctattaagatgtcaaaaagggcaggaagcttcattacattaaaagaaattgttaatgaggttggtaaggatgcagttagatttatgatggtttcaagaaaaaatgatgcccagttagattttgatttcgaagtttttaaaaatgaaaacaatgataatcctatcttttatatacaatatgcaaatgcaagaatatcttcgctaattagaaattcgaaagaaaaacttggaagagatattaaagataatgatttgataaatgccgatttagcttttttgcaaaatgaaaacgaaaaaaagataatatttcaaatagctaattttccaaaagtaattgagcagtcagttacatttatggagcctcataggttatcttactatttaagagatcttgcttcttcttttcatcaatattggaatttaaaaatagataacaaacgtattcatattttagataaaagtgaaatcgacctatcattggctagggtagctctgctttttgctgtttcaatcacaatccaaactggtttaggattacttggaattgaagcaatagaggaattgtaaa

SEQ ID NO: 300363 - DNA, 895 bp, Unknown
  Bacterial polypeptide expressing nucleotide sequence isolated from the Sargasso Sea
tcagatattgttaaaaaaaacctcattaaaaaatcaatcaaaaaacttaggaagaaaaatattgtagaagaaggatatcttgaacccccaaaaggagaagaaaatttaaattggaagaaaacaaaaaaacttatctttaagtcaactttatttggtgatgatactaatagatctttgcaaaaagatgatggtacttggacatattttgcaaacgatcttgcttatcacacgaataaaatttccagaaaatttgattatttaataaatgttcttggagctgatcacaccggttatattaaaaggataacctcagcagtaaaagcagtttcgaatgatagagttaaattaatatgtaaagtttgccaattagtaaaactttataaaaatggacaacctttcaaaatgtcaaaacgtcttggagattttatttctgttgatgacttacttaaagaagtaaataaagattctattagatttatgatgctcaataggggaaatgatgttgaattagattttgattttaataaatttcttgagaaaaataaggataatccagttttttatgttcaatactgctatgcaagaataaactcattatttagatctttaaatttaaatttgaacaaagaaattaaaatagataaaaataattttaaactcaatgactatgatttaagactaatgagaaaaattattgaatggcccaaagttcttgatattgcatcaaaaaaattagaaccacacagagttactttttatctttatgatctagctacaatttttcactcatactggagtgagggaaataaaaacgataaatataaatttataatcaatggaaaaataaataaaaaaatatcatttaaaatatttcaactactatcaataatttaga

SEQ ID NO: 300364 - DNA, 889 bp, Unknown
  Bacterial polypeptide expressing nucleotide sequence isolated from the Sargasso Sea
aaagatttgaaaaatttaggtattacacatgataattttttttccgagactgaaatagttaataaagatttggttactaaagccattaaaatattaaaagagaaaagattcgttgaagagggtttcctacagccccctaaaggagaaacaaatgataattggaagaaaatgaaaagacttatttttaaatctacactgttcggtgatgatgcggatagagcacttcaaaaaaatgacggttcatggacttattttgccaatgatgtggcttaccatatggataaagttagtcgaaactatgaaaatttagtaaatgtacttggcgccgatcatactggttatataaaaagaattaacgctgcagtttctgctttatctgacaaaaaagtcaaacttaattgtgtagtttgtcaattagtgaaactttttaaaaacggatcaccttttaaaatgtcaaaaagagcgggcgaatttatttcagcacaagatcttcttaatgaagtagaaaaagatcaaattagatttatgatgctcagtagaagtaatgatgtcgaattggattttgactttgataaagtaaaacaaaaaacaaaagataatccagttttttatgttcaatacgcttatgcaagaatcagctcaattataagatctttaaatataaatttatttgaaaagataaacttgaatgaagatgaatttaatttaaatagcatagaggaaaaaattataagaaaaatatttgaatggcccaagattatagaatcatcatcaaaaaaatttgatttacacaaaattccattttacttgtatgagctttcaactctatttcattcgtattggagcaaggggaatgatagtaaagaatataaatttattgaaaatgata

SEQ ID NO: 300365 - DNA, 898 bp, Unknown
  Bacterial polypeptide expressing nucleotide sequence isolated from the Sargasso Sea
tctatggagcaagcgcttctgcttattaaaaaaaatctaaatagtatgggtattaatcacgataattttgtaagcgaaaagagcattgtactaaacaatgaagtcgaaagtgtaatagattttttagaaaaaaataacttcatttataaaggaaaaattaaagcaccagctggtgaagataacaaggattgggttgaaagggagcaattattatttaaatctactgactttggtgacgataaagatcgtgcacttcaaaaatcagatggtacatggacttattttgcaagtgatgttgcctatcataaaaataaagttgatagaaaatttgattatttaatcaatatactaggcgcagatcatgctggttatataaaacggattacctcatctgttgaagctctttcaggaaaaaaagataaattaatttgtaaaataagtcagttagtaaaattaataaaaaataagaaacctttcaaaatgtcaaaaagaaaaggggattatattaccgtagatgatttgattgaagaagttggaaaagatgcaacaagatttattatgcttaacagaagtagtgatgttgaattagattttgattttgatgctgtcaaagaaaaatctaaagataatccattatattatgttcagtattgttacgctagaatttcatctgtctttagacatataaacaaagatttaaattcaaatattgaattaaatgattttaattttgagtattcaaatgatgaaattaaaatattaaaaaaattatctgagtggccaaaatgtatcgattctgcaagcactaaattagaaccacatagaatacctgtttacttatacgatctagcatctgaatttcattcttattggaatttaggaaaacaattccagaaaa

SEQ ID NO: 300366 - DNA, 535 bp, Unknown
  Bacterial polypeptide expressing nucleotide sequence isolated from the Sargasso Sea
tttgcgaaacagcaaagaactaaatattgaaaagaattttaattacgacggtataattattgaaattccacctgtagaatataattttgatttatcgacaaatattgcaatgattttagcaaagaaaacgaaaaaaaatcctaaaataattgcagaaaagataaaaagttatttatttgctgattgtaaggattttaaaaaaatagaaatagctggccctggttttttaaacattaaactcacggatagttctttgcaaaaaactattttaaaaatttataaaaataagatttcatatggatctaaaagaacaaaaaaaaaatataatatagaatttgtatctgctaatcccactggccctatgcatgttggccattgcagaggagctatatttggagatgttttagcaaatttactaaaatttaatggaaactcagtaaccaaagaatattatattaatgattatggaagccaaatagaaaattttgtaaaatcagtttttttaagattaagagaaattaaatataaaagaaaa

SEQ ID NO: 300367 - DNA, 536 bp, Unknown
  Bacterial polypeptide expressing nucleotide sequence isolated from the Sargasso Sea
gcaggagaaataaaaaaatctccattagaaattgccaaaaatattcaaaaaaatcttttagaaaataacctggataatattaaagaggtgaccgtcacaccgcctggttttataaactttattatcgacccatctttttatcagaataaaataaagtcaatcatcaaagatggtgaaaattttggaaaagataatatcggaaaagggaaatcagctaatgttgaatttgtaagtgctaatccgacaggacctttaaccattggtcatggtagaaatgcggtgcttggtgatacagtctcaaatatactagaatggcatgggtatcaagtaacaagagagtattactataatgatgccgggaaacagatgcgtatgctaggtaagtctgtcagctcacgttattttgaattattaaataaagcttctgattttcctgagcaaggctaccaaggtgaatacattattgatattgcaaagcgtgttctagataaatttgggaaagagcttggcgaagacgatgagagattccttactga

SEQ ID NO: 300368 - DNA, 679 bp, Unknown
  Bacterial polypeptide expressing nucleotide sequence isolated from the Sargasso Sea
atgttcttgggggcagatcatactgggttacattaaaagaatcaaagctgcagtctcagcattatcagaaaaaaaaatagaacttaattgtaaagtttgccaattagtaaaactttataaaaatggaaaaccttttaaaatgtcaaagagagcgggtgattttatttctgtaaaagatcttttaagtgaagtagataaagattcaattagatttatgatgctaaatcgaagcaatgatgttgaaattgattttgattttgaaaaagtgaaggaaaagacaaaagataatcctgttttttatgtacagtatgcctatgccagaattaattctctcttaagatcacttgatataagctttgttaaaaaaattgaatttaatgaaattgattttaatcttaatgagatagaaggaaaaattattagaaaggtatttgaatggccaaaaataatagagtctgcatctagaaaatttgatttacataaaattcctttttatttatatgaactttcaacattatttcatgcttattggagcaaggggaatgaagataaaaaatataaatttatagaaaatagaaaaataaaaagaaaagaaatcctggcaattattaatctcgttgcaatagtaattaaaaatggaatgaatattttagacgtgtcgttgccaaaaaaaatgtaa

SEQ ID NO: 300369 - DNA, 193 bp, Unknown
  Bacterial polypeptide expressing nucleotide sequence isolated from the Sargasso Sea
cgcgagccgcatcacctcacccattacctgcgtgagctggcgggccagttccatacttactacaacgcccacaaggtgctgattgaagataccgccctgcgggacgcaagagtcagcctgtacctggccgtgcgccaggtgattgccaacggcctggacctgctcggcgtaagcgcaccagaggagatgtaat

SEQ ID NO: 300370 - DNA, 718 bp, Unknown
  Bacterial polypeptide expressing nucleotide sequence isolated from the Sargasso Sea
atcaataactaatccaggatttatcaattttaaactttcaaaatcattctatcaaagcataataaatgaagtgcttttgaataataaatttggatcaaatagatcttatgatggaaaaaccgcaaacgtagagtttgtgagtgctaatccaacaggaccgctcactataggacacggaagaaatggagttataggggatataatttccaatattttagactggaatggttatagcgttacaagagaatattattttaataatgctggaaggcaaatgagaattttaggagagtctgttaaggctcgatatttagagctcattggaaagccagtcagctttccttctggtggatataaaggagcctatatcaaagacattgcctcaaaaatattaaaggaaaaaggtaacaagctatcagatagagatgataacatatttaaaaccactgctgaaactctcatgtttaatgatataaaaaagactctttcggatttaaagataaattttgacaaatatagcaatgaaaaagattattacgataatggctcaatcgatagaatgctggatgaatttaagcaaatgggctatatttatgataaggatggagcaacatggttcaatttttcaaaattaggccatgaacaagataaagtatatattaaaaaaacaggagaacctacttatcgagttccagatactgcctatcatcgtgacaaa

SEQ ID NO: 300371 - DNA, 867 bp, Unknown
  Bacterial polypeptide expressing nucleotide sequence isolated from the Sargasso Sea
tgattttcttaaaatagctaataatttaatatcaagtaaaataattgatgaaaatataaacttaaagaatatatctattgattttaattctaagtctaaacaaggagatgtttcatctaacatctttatttttttaaggaaatatttatttgataaaaattataaattagataaaaaaattgaagaagaattattgaaattgatttatatagataatttatctattggcaaaagtggttttataaatattttttttaaaaaagaatttattattaaaaaaattaatgaaattttaaaatttaatgaagattatggtaaaaataataatggcgaaaataaaaaaatcaatattgaatttatatcagcaaatccaactggccctttacatatagctcatataagaggagctgtttttggtgatgtgttagctaatatattgagttcttctggttacaaagtcaccagagaatattatgttaatgatgcggggtcacaaattaaaattttaggtgaatcactgtttaaaagatatcagaacttaaatggaattaatactaaaattctagagaatgaatatccgggtgaatatttaattgattttgcaaaagaaatttttttaaaagataaagataagtggataaataaagaaaaaaataaaacaaatgattatttcaaaaaatatgcaataaataaaattataaataatattaaggatgatttaaaaaaaattgatattaactttgatatatttacatttgaatctgatatagttaaaaaaaattacattgaagatgtttttaaaatcttagaacaaaaaaaattattatatgagggttatttaaaacaacctaaaggtgatgataataa

SEQ ID NO: 300372 - DNA, 640 bp, Unknown
  Bacterial polypeptide expressing nucleotide sequence isolated from the Sargasso Sea
tttggccaagttagaaatcaaggaaaatgtgctggttgaacaatcagcaaattctgactttggtgatttttcatcgaatattgcaatggtactttccaaaatactgcggaaaaatcccctagaaattgcagaaatgatccaatcagaattgacaattgataaaaaaatcatttctgataattcagttacacaaccagggtttctaaattttcgtgtcgcaaaatcattttaccagaaaactgttacggagatcattgtgtcggcggatacatacggccgaacagagactggaaaaggaaagaacgctaatgtagaatttgtcagtgctaatccaactggaccactcactgttggccatggacggcaagcagtgctgggggatacaatcgccaatattctagaatggcataactacgatgtaacgcgggaatattattataatgatgcaggccgacaaatgcgtatactgggcaaatcagttgcagcgcggtattttgatcaattgggccaagaaggtgactttccagaagatggttatgaaggtgactatataaaaaccattgccaaagagattcttgaacggcatggggatggattatcactagaagataaaatatttcgtacctacgcggaagaatcg

SEQ ID NO: 300373 - DNA, 502 bp, Unknown
  Bacterial polypeptide expressing nucleotide sequence isolated from the Sargasso Sea
atgtcggaagcagagcgtttagatattgctgaggcggttggactgggggcaataaagtacgcagacctttcgcagaatcgcacgactgattacgtgttcagtttcgacaaaatgcttgaactgaagggaaatacagctgcatacatgcaatatgcggtggctcgggtagatggaattttttctaagggaggtattgatcgagagcaggtgagagacaaggcattttttaaatgtaccgataagcgcgaaagagcgctcgcagtaaagcttcttcgttttggtgaagttttagaggatgtcgaaagtgattatcgtcctaatcttctgacgagttggctttttgaggtagcatgcgcatactcaagtttttatgacgctcttcccgtcttgaaagcctcaggtgaacaaaagtcaacacgtcttaccttgtgcgatcttactgggcgatccttacgattaggccttgagttgcttggtatccaggtgccaaagagaatgtgat

SEQ ID NO: 300374 - DNA, 403 bp, Unknown
  Bacterial polypeptide expressing nucleotide sequence isolated from the Sargasso Sea
tccaaattcacagatttctactttagtaaataaattaaaagaggatgataatgcatatgagaaagatggagctctttggttaaatactgatgtaagtggtgacgataagcatagagtattaattagagatgatggaagagcaacctattttgcatctgatgtcgcatatcataaaaataaagtcgatagaaaatttgatacgttaattaatatctggggcgctgatcatcatggttatataaaaagaattgaagcctcaatagaggcactgggatcaaaaaaagaaaagttagttgtcaaattggtgcagtttgcaaatttatttaaagatggaaaaaaggtaaaaatgtctacaaggtccggcgaattttttacattaaaagatctgataaatgatattggg

SEQ ID NO: 300375 - DNA, 712 bp, Unknown
  Bacterial polypeptide expressing nucleotide sequence isolated from the Sargasso Sea
ttgaaccaacatacagctccaggtcaaatgttcgaaactaaagatgttgttaatgaaaatggagtgacattcaaagaatatatcaatcttccagatagcttaagaggttatttagattttgcattagctcatgcagaaaaagaatgcttggtatacgaagatgagagatatacctacaaagaggtttttgaaaaaagtgctcaaactggcaatgcattaattaaagctggaattaaaaagggtgatagagtagcaatttgcatgcaaaataatcctgagttcgtatattcttatttcggaattgttggtataggagctgtatgtgtgcctttaaactcatggtgggttccattagaagtgatatatgccttagaacattccgatgctaagttattgataggtgactctaaaagattacaagggttggagtcgttaccaaacttaacaaaaatagtaactagctatacaccagattcctcgtttacttcttttgatgcttttatttctgaacatgataaaacatttccagaagttgagattggtagagatgatcacgcaacaatctactatacctccggatcaaccggaaagcccaaaggtgtcttgtcatcacaaaaagctgtattagctactatgtttagttgggcttgtttttcatctgtaatgaatcaggtcgaagctcaaagaaatcctgatgcagctgctatagtaa

SEQ ID NO: 300376 - DNA, 334 bp, Unknown
  Bacterial polypeptide expressing nucleotide sequence isolated from the Sargasso Sea
catgcagataatttttaaaaaattaacaaacagttttgaacaaatccttctaaatagtcttataaaaaatgcaaagagagaagaatttgaaaaaattcgtaaaaatctaattaatcaagcttctaaagaagaatttggcgattatcaaagtaatgtttgtctcgttttatcaaaaatatataataggaatcccagagaaattgcaattgaatttgttcagtccctcaaggaaaataataaaatatcaaatttatgtgaagatttagagattgctgggccaggatttataaatataaaattaaaaaataatattttgattgaagaaataaaatct

SEQ ID NO: 300377 - DNA, 757 bp, Unknown
  Bacterial polypeptide expressing nucleotide sequence isolated from the Sargasso Sea
tactgatagagcattacaaaagaatgatggctcttggacatactttgctaacgacgttggatatcatatggataaagttaatagaaaatttgactatctaattaatattctaggagctgatcacaccggttatgtaaaaagaataaccgcagttgttaaagcattatctgaaaacaaagtaaaattagattgcaaagtatgccagttagtaaaactatataaaaataagaagcccttcaaaatgtcaaaaagagctggagattttatttcggccaaagatttattaaatgaagtaaataaagattctattaggtttatgatgcttaatagaagtaatgatgttgaattggattttgatttcgataaagttttagaaaaaagcaaagataacccagtattttatgtacaatattcttttgcaaggattaactctttattaagaacgataaacaagaatttaaaagataagatatcattaaatgaaacaaaatttttattaaatcattatgaagttaatatattgaaaaaaatatttgaatggccaaaaataatcgacatcgcatcctctaagtatgaaccacatagaatacctttttacctttatgatcttgcaactttatttcatgcttattggagcaaaggaaacgagagttctgattttagattcattgagaatggaaaaattaaaaaagatgagacactagcgattgtcgttcttgttgatactgtgattcaaaggggaatgagcattctaggt

SEQ ID NO: 300378 - DNA, 789 bp, Unknown
  Bacterial polypeptide expressing nucleotide sequence isolated from the Sargasso Sea
aatttggagatgacacagacagagcgatacaaaaaaatgatggaagttggacttattttgcaaatgatattgcctaccacatggacaaagttgatagaaaatatgagtatttaataaatgttttaggcgcagatcacactggttacaaaaagagaatagaggcagccgttaatgctctttcgaaaaataaagtgaaattaaattgtaaagtttgtcaattagtaaagctatttaaaaatggaaagcctttcaagatgtccaaaagagcaggtgaatttatttcagcaaatgatttacttaatgaagtagataaagactctttgagatttatgatgttaaatagaagtaatgatgttgaactagatttcgattttaacaaagtcttggaaaagaataaagataacccagtttattatgttcagtactcatttgctagaattagttcagtatttagaacaataaatataaataatacaaaaaatgctaagatcaaatctgaagaatttcagataaatgattttgaaataaagattataaaaaagatttttgaatggccaaaaattgtagggacagcatcaagtaaatatgagccacatagaattccttactatctttatgaacttgctacattattccattcatattggagtaaaggaaatgaggatcataactacaagataattgaaaatggaaaaattaagaatcctgcaactcttactatattaattcttatttatattgttttacaaagaaggtatgagtattttaggagtatcattacccgataag

SEQ ID NO: 300379 - DNA, 810 bp, Unknown
  Bacterial polypeptide expressing nucleotide sequence isolated from the Sargasso Sea
cttcaaaaaaatcttggcaatttttctcctcaaaatacttataaaggtaaatatatagaagaaataggcattgcctttagtaaagaaaaagttgtttcttataaagaacctaaattaataattaataatcttccgggagatgctgaagaagaaattgatcaaatcatatctaatctaaaagagatggataataaaatctgggatgaggttaaggagttctctcttaaaaatattctagatctaattaaacaagatctagcaagctttaatgtaaattttgataactggttccaagaatcttctctaggcgatttaaaagatccaaattcacagatttctactttagtaaataaattaaaagaggatgataatgcatatgagaaagatggagctctttggttaaatactgatgtaagtggtgacgataagcatagagtattaattagagatgatggaagagcaacctattttgcatctgatgtcgcatatcataaaaataaagtcgatagaaaatttgatacgttaattaatatctggggcgctgatcatcatggttatataaaaagaattgaagcctcaatagaggcactgggatcaaaaaaagaaaagttagttgtcaaattggtgcagtttgcaaatttatttaaagatggaaaaaaggtaaaaatgtctacaaggtccggcgaattttttacattaaaagatctgataaatgatattggggctgatgcagccagattctattatttatcaagacaagctgatcagcatttggattttgatatagatctagcaaaatcagatagtaaa

SEQ ID NO: 300380 - DNA, 908 bp, Unknown
  Bacterial polypeptide expressing nucleotide sequence isolated from the Sargasso Sea
aatgtcttgtaacccagctattgggggccttggtaaaggccatttagttagagaaattgatgcccttgatggaataatgggcagggctatagataattctggaatacaatttagaatgttaaatctaagtagggggccagcagttcaggggcctagggctcaggcagatagagtcttatacaaaaaatctatacaaaacattgttaaaaaacaagaaaacttagatattttggagggctcagttgaggacattattcttactaacaataaattaaagggtgttttagtagaaaatattggagaaattatgtcaaaaacacttgtgttaacaacaggtacctttttgcgaggcctaatcaggataggtaaaaaaagctatgaagcaggaagagttggagataaacctgctattaatttagctagatcaatagaaagactaaagttttcaataggcagattgaaaactggtactccaccaagaatagaaaaaaaatctataaatttcaatggtttaaaagaacaaaaaccagacttaatcattaagccgttttcttttatcaacaaacttatacacataaaacaagtctcttgttttttaacaaatacaaatgtccatacccatgaaattataaataacaatattcacctctctcccatgtattcaggagaaattaaagcaatgggagcaagatattgcccatctattgaagataaggttagaaagttttctgataaaaacagtcatcaaatatttcttgaaccagaaggtcttgaaagcgaggttatttatccaaatggaatatcaacatctctacccgagaatgtgcaagaagagttcgttcactcaataatggggcttgaaaatgcaaaaataataaaacctggttatgcaatagagtatgattatg

SEQ ID NO: 300381 - DNA, 861 bp, Unknown
  Bacterial polypeptide expressing nucleotide sequence isolated from the Sargasso Sea
aaaatcaatcttattattaaaaataatgagaattatgggaaaggagatattggatctgggaaaactgctaatgtagaatttgtcagcgctaaccccacagggccattaaccgttggacacggtcgaaatgccatattaggagatactatatcaaaaatattggaatggcaaaattttaaagtaactcgggaatattattataatgatgcaggcagacaaatgcgaatattaggaaaatctgttgaagcaagatattatgaattattaggaaaatctttcgattttcctaaggatggataccaaggaaaatatattaatgatatagcaaaaattgttttagaaaaaaaagggggaaatcttaaatctggcgatgaattttttcgaaaaattgccgaagaaattatttttaatgacattaaaaactctttaaggaagctagatgtaaaatttgatcattttactaatgaaaaaacattttatgaaaatggtgacattgataaacttctcaaaaacctagctgataaaaatctaatatataaaaaagataatgccacatggtttagaacatctgctttaggtaaaaatcaggatagggtttacataaaaagttcaggggaaccaacataccgagtaccagatacagcctatcacctagacaaaataaagcgaaaatatgatctaattgtagatatatttggtgctgatcatgctgatacctatccagatgtaatcatcgcacttaaagcattaggactaaaaaccgaccacattaaagtgctactataccaatttgtaacactaattcgaaatggtgaaaaaattaaaatgtctactaggcaagctaattttataactttagag

SEQ ID NO: 300382 - DNA, 565 bp, Unknown
  Bacterial polypeptide expressing nucleotide sequence isolated from the Sargasso Sea
tataaaaaaggaaaaccattcaagatgtcaaaaagatctggagattttatatcagtaaacgaattactaaacgaagtagataaagattcaatcagatttatgatgttaagtagaagtaatgacgtagagttagattttgattttgataaagttttagagaaaacaaaagacaatcctgttttttatgtccaatactgttatgcaagaataaattctttgtttagaatgctgcatcttgatcttaattctaaaattgaattagagaaagaaaaattcaaactcaatacttttgaatataaaattttaagaaaaatatttgattggccaaaagttgttgactcagcgtctatgaaatatgagccgcatcgtattgtgttttacctttatgatctagcaactttatttcattcttattggagcaaaggaaatgaaagcgagaaatataaatttattattgatggcaaaatgaataataaaaatacatttgttataattaaacttgttgccctggttgtagaaaatggaatgaaaattcttggtgtttctttgccaaaaaaaatgtgat

SEQ ID NO: 300383 - DNA, 876 bp, Unknown
  Bacterial polypeptide expressing nucleotide sequence isolated from the Sargasso Sea
accgggccacttcatgtaggacatgtaagaggcgctgtaattggtgatgttctctcgaatattttaaagatggttggatataatgttacaaaagaatactatattaatgatgcaggcaatcaaattgacatcttggctgcttcagtttttattaggtatgaagagttaattacaaaaaataaagctgaaattcctaaaggttattatcctggtgaatatttaattccattagcaaaatcattatataatgttcatggcaatagcttgcttaatagagataaatttaaatcattagaacttataaagaaattttcaattaataaccttcttaatcagattagggatgatctaaaaaagctaaatattgaaatggataaatattcgtctgaaaaaaaattagttgaagatctgtcagttgaaagaacaattcaagaacttgataaaaagggtttgatttatattggggttttaccttctccaaaaagtactgcagatgattgggaaccaaaagagcaaactttgtttaaagctaagaagtttggtgatgatgaagatcggacgataattaagtcagatggttctcttacatattttgcaagtgatgttgcttatcatagggataagttgattagaactaaaggaaagttgattaatatatggggtgcagatcatagtggttatgtgaaaagaatgactgctgcagtaaatgcaattgcagataaagaaggccagttagaaataaaactttgccaaatggtaaatctaataaagaataataaacctttaaaaatgtcaaaaagagctggtaattttataactttaaatgaaattattgatgaggtgggcgcagatgcaatacgcttcataatgttgact

SEQ ID NO: 300384 - DNA, 355 bp, Unknown
  Bacterial polypeptide expressing nucleotide sequence isolated from the Sargasso Sea
gatgtcgcctaccaccacaacaaatgggagcgaggctttgagcgggtgatcaacgagcaaggcgcggatcaccacagcactatcactcgggtcagggcagggttgcaggggctcgatgcaggcataccggaaggctggccagaatacgttctgcaccagatggtgacggtcatgcgcgatggcgccgaggtcaaactctcaaagcgtgctggcagttatgtcacgctgcgtgatctgattgagtgggtcggatgtgatgcgaccaggtactttttagtagcgcgcgcacccacatcacagctcacctttgatattgatttggcgttggcgcgcagcaatgaaaaccccgtgtaat

SEQ ID NO: 300385 - DNA, 577 bp, Unknown
  Bacterial polypeptide expressing nucleotide sequence isolated from the Sargasso Sea
tttgattattagttttaatgaatctaatatcaatattgattattcttctaaatcaaaaaaaggcgatctatctacaaatatttatttagttttatcaaagataattactaaaaaagatttcgatttaaagatctatattctaaattttttaatgaagttagaatatattgctaaagtagattttgcaaaagctggctttattaatatcattattgaaaaaaaatttttaatttcaaatttaattaatttttataataataattttaaattagaaaatgataatatacataaaaaatctatcaacatagaatttatttcagctaatccaactggtccattacatttggctcatataagaggggctgtattaggtgatgttttatcatcaattttggagacagttggtcataaagtaacaagagaatattatgttaatgattcaggtgctcaaattaaatctttaggtgtctcactttttaaaagatataaagagttatttaacgaagaaattattttctccgaaaatgaatatcctggagaatatttaatagatatagcaactaaaattaaagattta

SEQ ID NO: 300386 - DNA, 786 bp, Unknown
  Bacterial polypeptide expressing nucleotide sequence isolated from the Sargasso Sea
ttaaatcttcagcacttggagatgataaagacagagttttaaaaagaagcaatggtgaatttacttattttgcctctgatgttgcctatcacttagataaatatgatcgcggatacgataggataataaatatttgggggtcagatcatcacggctaccttccaagagtaaaggctgccatggaagcaagtaaaaagaatgtagaaaagcttgaagtagtctttattcaatttgctaatttaattaaggcaggaaaaaaagtgaccatgtctactagaagtggggaatttattacgcttaaagaactcatagaagaggttacatcagaagcagcaagatttttttatattaatagaaaagctgatcagcatttagactttgatttagacctcgcgaaagagcagtctaaagataatcctctttactatatacaatacgcgcatgctcgcatatgtagtgttttacttaagtccaaagctagagaagaagaattgaacgcatcagaacttggattattggattccaacaaagagatagaaatacagaaaattcttaaacagtatcctcctctaattgaaagagcggctctagcaagtgagcctcatttaatttgctattacttaaaagacttggctagtatttttcatagttactacaataccgaaaaatttataattgaagaccagaagcttatgaactcaagattgttcttgctgagtggagtgaagcaagttatttataatggactagctgttctgggaataaatgctcctcatgaaatgtaga

SEQ ID NO: 300387 - DNA, 415 bp, Unknown
  Bacterial polypeptide expressing nucleotide sequence isolated from the Sargasso Sea
aatgaatatttttgatatatacttagaaaaaattaaaaaaatactaatagatttatctgaaaaaaaggagttgattttaccagctaaaataaatggtataaccgctgagatacctcctactaaatttaattgtgatatatcaactaacgttgcaatggtattatctaaaataaataaaacaacacctattgaattagcagaaaaattatctaatcaaattaaaaaatcagatgaatttattgaaactatatctgtagctaaaccaggatttattaacattaaatttaaaacaattttctggacaaagtttgtcgaaattataatcaaaaattataaaacttatggaataaattatagcgaaaagaaaaataattatttagttgaatttgtatctgcaaatcctacaggacccttg

SEQ ID NO: 300388 - DNA, 397 bp, Unknown
  Bacterial polypeptide expressing nucleotide sequence isolated from the Sargasso Sea
ttttgataaaatgctttcccttaatggtaatactgctccttatttgttatatacacttgtaagaattttaggaattaaaagaaaaaatgattttgtttatgaatctaaagatttactgtacgtaaattatgaacataaatctgagtggaaacttatcagaaaattacttaggttcgatgaagtcataatttctattgaaaaagacttaatgccaaatagattatgcaattatctgttcgagctatgtcagacttttaatagattctatgatcaagttccaatcctcaaagaagaaaaaaatataaaaatctctaggcttaatttatgtgacctaactgcaaaaacactaaaattaagcttagagcttttaggaattgaaactttagaaagaatgtaa

SEQ ID NO: 300389 - DNA, 694 bp, Unknown
  Bacterial polypeptide expressing nucleotide sequence isolated from the Sargasso Sea
acaggtggaaatggagtgcatccggttgctgacgcttgcgactttgcaagacattgctctgcacttgatttttggtcaattaacgaccacgcagaggcctcaacacctaaacggtggcaggaaacaaaggaaacaatcagaaaatgtaatgcattaaatcttgatcctgctaatcctgactgcgtagcttttttgggttgggaatggacacaggtcggagtgataagagctaatcattgggggcatcacaatgttattcttaaggaagaagatgacgatcttgtaccgccgcgtgcaattgcatctttatcaataacacgccaggccatgacaactcgtccacttctgcctcaaactctttttccatttgttgattttgctaatttcaaaagatataacgactcttacagatatgccaaagaaactgttaaagttcctgattgtgatcttagaactccctcaatagatttacctatagactgccatgaaagagcagttacacctctcggtttagtcaatagaatggaaatgtacccaagtgattatatgatcattcctcatggtcaaacatggggactttatacacctgcaggttatacattggataaaagtcttgagcactcaaaaagatttccaaggatgtttgaattactggaaacatactccggtcatggaaacgctgaggagtatagaa

SEQ ID NO: 300390 - DNA, 524 bp, Unknown
  Bacterial polypeptide expressing nucleotide sequence isolated from the Sargasso Sea
cagatcaggtgaatttatacccttaagacacctaagagaagaagtgggtaatgatgctgcgagatttttttacatcatgcgatcaaatgaacaacaccttgattttgatctagccctagccaaaagcaaaactagtgaaaacccagtttattatattcagtatgcacacgctcgtatagcaagtgttataaatcagttaaatgaaaaatctctaaaatatgataaaaaaaatggcatttctaatcttaaattactcactactgaaaaagaaagacaattgatggtttctatttcaagattttctgaaatacttttcctttctgcaaaaaataaagcgcctcatagtttggcacaatatctaagagatttagctaatgattttcattcatattacaatgaatcgattattataattgatgatcatacattaagagacgcgagagtatctctttcaatatcaactaaaaaggtcatttcaatgggcctcagtcttctgggagtttcgagcccttcctcgatgtaaa

SEQ ID NO: 300391 - DNA, 580 bp, Unknown
  Bacterial polypeptide expressing nucleotide sequence isolated from the Sargasso Sea
cagttagtaaaactcattaaggataaaaaaccttttaaaatgtctaaaagaaaaggtgattatatcactatagaggaccttattaatgaagttggtaaggatgcaacaaggtttattatgttaagcagaagtagtgatgcagagattgattttgattttgacaaagtaaaagaaaaatcgaaagaaaacccaatttattatgttcagtatgcatatgctagaatttcgtctgtgtttagaaatacccaaaatgatataaataataatcttgagataaagaattcagattttaactttggcaatgaagaaataaagctatttaaaaaaattagtgaatggcctaaatgtgttgaagtttcttcagaaaaattagaaccacatagaatttcagtttatctatatgatttagcttctgagttccattcttattggaatatggggaaggaagatgtttctaaaagatttatcgatcaagataatacaattcaacttgaaaaattagttttcctaaaatctatagccaatactttgaaaacaggtatgaatattttgggagtagacacacctgaaaaaatgtaat

SEQ ID NO: 300392 - DNA, 774 bp, Unknown
  Bacterial polypeptide expressing nucleotide sequence isolated from the Sargasso Sea
aaaaattaaagctccagctggagatgaggataaaaactgggtagaacgagaacagttactttttaaatctactgattttggtgatgataaagatagagcattacaaaagtctgacggtgcttggacttattttgcaagtgatgttgcttatcataaaaataaagtagatcgtaaatttgattatttaataaatattcttggtgcagatcatgctggttatataaaaagaatttcatcttcagttgaagctttatcaggaaaaaaagataaattgatttgtaaaattagtcagcttgtaaaactaattaaagacaacaaaccatttaaaatgtctaaaagaaagggtgactacattaccgttgatgatttaattgaagaagttggaaaagatgcaactagatttatcatgctcaacagaagtagtgatgtagaattagattttgattttgatgcggtaaaagaaaaatcaaaagataatccattatattatgttcaatattgttatgccagaatttcatctgtctttagacatattgataaagatttaaattcaaatattaaattggatgattttagttttgaatactcaaatgatgagatcaaaattttaaaaaagatttcagaatggcctaaatgtatcgatgcagctagttcaaaattagaaccacatagaataccagtgtatttatatgatctagcttcagaatttcactcatattggaatcttggtaaacaaaaccctgaaaaaagatttataaatgatcaaaaaatagt

SEQ ID NO: 300393 - DNA, 944 bp, Unknown
  Bacterial polypeptide expressing nucleotide sequence isolated from the Sargasso Sea
gatgaattttatcctgggtgaatatctaatcgatgttgctaaaaaaataatagacaaatacggtacaactattcttgaaaacgacaatcacttttcaacaataaaagctgagtgtgtaaatttactattagaaaacataaaagaagacttaagtaaactatctattaatcaggatatttttgtttcagaaaaagaattaataacccaaggtaaaatcgacaaaaccatagatgaacttaaaaatatgaatttaatctatgagggcattttagataagcccaaaggtaaacaaattgaagattgggaaccaagaaagcaattattatttaaatcatctgaatatggggatgaaatcgatagaccattacaaaaatcagatggtgagtggacttactttgcaaacgatattgcctatcattatgataaatacttaagaggatcgacacatttaatcgacatattaggcgctgatcatggtggatacattaagagaatgagcgcttcgatacaggccctaactaataacaaagcaagatttacagcaaagttatgtcaaatggtaaaacttatcagtgatggcaaggaattaaaaatgtcaaaaagatctggtgacttcattactttaagtgatttagtgaaagaagttggtagtgatagtataagatttatgatgatgtacagaaaaaatgaagcgcccttagagtttgattttaaaaaagtaactgaacagtctaaagaaaatccagtcttttatgtacagtatgctcatgcaagaatttcgtccgtattaaacaatcttcattctcaaaatattaaattaaatttagagaattttagtgaatgtaatttttctgaacttaatgatctttctgaaatatctcttttaaaaaaatcctggattatagtaatatcattaatacgtcagtttctctatttgagccgca

SEQ ID NO: 300394 - DNA, 773 bp, Unknown
  Bacterial polypeptide expressing nucleotide sequence isolated from the Sargasso Sea
taaaactacagattttaaagacgacaaagatagagttttactaagagaaaacggagagccaacatattacttaactgacgttgggtatcacaaaaataaaatagatagaggctatgatctgtgtataaatgtctttggtgctgatcatcatggatacattccaagactaacagctgcatttgatgtcatgaagagcgataaacaagaaatcgagtttatgctttatcagttagtaaacttatatgaagatggcaaaaagaaaatgatgtctaccaggaaaggtgattaccattcattacaagaattgaggaatgagcttggtccagatgtgattaaattcttttttcttgaaaaaaaatcagaccatccaatggactttgatattaatcttgctaaagatgaaagcaaaaataacccttacttttactcacaatatgctcacgtaagatgttgctctattttggcgaagaaaatatttgatcccaataaaaaaattgaagaaaacgaaataaaacaaaattttgatcttgtaaataaaatactaaattttcctaatctcttggagggctttactaatgaaagatctcctcattctctagttcactatataaaagacttatcagcttcttttcatacattctatgaaatgagtcctgtaattggagaaaatgaatcaatcgagaatacaagattgctacttaccacagcaacacaaattgtgttggcgaatagttttagaatcttaaatgtagagccgctagaaaaaatgtaag

SEQ ID NO: 300395 - DNA, 807 bp, Unknown
  Bacterial polypeptide expressing nucleotide sequence isolated from the Sargasso Sea
atatacaaaatatttgatattgaatttgattatctacgaggtgaatcttggtacgaatctgatctagagaatttaataacttggctcaaagaaaaaaatgttacaacaatatctgagggagctcttattgtcgacttaaaccccgaaggcatcaaaactccagctttaatcaaaactgcacacaatacgacactttatattacgcgcgatttagccgctgcaaaatcacgctgggaagagttcaagtttgatcaatccctatatgtagtgggagcagagcaaactttacattttcaacaactaatcgctgtgcttaaaaaatgcaaggttggatgggaaagcaaaatggaacatgttccttttgggctaataaggctaaacgaaggtaaactttctacacgtcaaggcagggtaattactctttatgaagttattgaaaaagcaattgggctggcaaaaacgtctatcaaagcaaaaaatccttctctagagaatcaagaagatgtcgcgaaacagattggtgtcggagctgtggtttttcacgacttaaagcatcaaaggcagaaaaatgtaatttttaactgggacgaagttttgtctttcgaaggtgacacaggaccttatttgcaatacacgcatgcaaggtgttgctctattttaagaaaatcaaactttcaaccaagcaaacttagcgaagctgatattgaagacttagcaaaaaactcagagctatgggtcgctatcggtcgcttgcctaacaatttaaaagaagctgctgaaaaacgagagccaatgatactcgcgcat

SEQ ID NO: 300396 - DNA, 673 bp, Unknown
  Bacterial polypeptide expressing nucleotide sequence isolated from the Sargasso Sea
tgataattttgtttatgaatcaaaattaataaaaaataaatctgtatctaaagtagtaaaaaaattacaaaaaaaaaattatatttacaaaggtgaattagaacctcccaaaggagaaaaaacaaaagattggaaaaaaagatatcaattattgtttaaatcaactttttttggtgatgatatcgatagacctctgcaaaaagcagatggcgagtggacttattttgctggtgacatggcatatcattatgacaaagtttttagaaaatatgatctactaataaatattcttggagcggatcatgctggttatacaaaaagaattatttcagctacaaaagcaatttcagacaacaaaactattttaatttgtaaagtttctcaactagttaaattatttaaaaatggactaccttttaaaatgtcaaagagacaaggcgactatattactgtagacgatttaattaatgaagtaggaaaagactctaccagattcatgatgttaaatagaagtaatgatgttgaattagaatttgattttcaaaaagttacagaaaaatcaaaagataatccagttttttatgttcagtatgcgtatgctagaatttgttctgtatttagattgttaaatataaatcttaataacaaaatcaaattagatagttctttttat

SEQ ID NO: 300397 - DNA, 805 bp, Unknown
  Bacterial polypeptide expressing nucleotide sequence isolated from the Sargasso Sea
atcattgaaaataaaaaaaatataaatgctacaagtcttgaggattgtttcgaagaattaaaagagctttctttaatagagtcgatgagacttattaaagatgatttaaaaaaacttggtattgaacacgataatttctgctcagaaaccgagcttgttcaaaaagatttagttagtaaaactgtaaaagaacttcaaagaaaaaattttgttaaagaaggttatcttaatccacctaaaggggaaaaaacaataaattggaaaaaaactaaaaaacttatatttaaatctacagaatttggagacgatagagatagagctttacaaaaagatgatggagagtggacctattttgctaatgatgttgcttatcactctgacaaaattaagcgaaaatatgataatttgataaatattcttggagctgatcacacaggatatataaaaagaattacagctgcagtttcagcattatccaataaaaaagtgaagttgaattgtaaagtttgtcaattagttaaactttataaaaatggacgaccatttaaaatgtctaaaagagcaggtgatttcatttcagtgcgagatttattgagcgaagtaaacaaagactcaattagatttatgatgttaaatagaagtaatgatgcagaacttgattttgattttgaaaaagtaaaagaaaaaacaaaagataatccagttttctatgttcaatatgcttatgcaaggatcaattcaatctccagaatacttgaaataaatttaaacgacaaagtttcaatgaattcaaaaatattttaag

SEQ ID NO: 300398 - DNA, 661 bp, Unknown
  Bacterial polypeptide expressing nucleotide sequence isolated from the Sargasso Sea
catgctggttatattaaaagaatttcatcatcggttgaagctttatctggagaaaaagataaattgatttgtaagattagtcagcttgtaaaattaatcaaagacaataaaccttttaagatgtctaaaagaaagggtgactacattacagttgatgatttaattgaagaagttggaaaagatgcaacaagatttatcatgctcaacagaagtagtgatgtagaattagattttgattttgatgctgtaaaagaaaaatcaaaagataatccattatattatgttcaatattgttatgccagaatttcatctgtctttagacatattgataaagatttaaattcaaacattgaattagatgattttaattttgaatattcaaatgatgagatcagaattttaaaaaagatttcagaatggccaaaatgtatagatgcagctagttcaaaattagaaccacatagaatacctgtttatttatatgatctggcatcagaatttcactcgtattggaatctcggtaaacaaaactcagaaaaaagatttattaatgatcaaaaaacagtatcaccagataaattaatttttttaaaagcaatatctaacgttgtaaaatcagggatggatatagttggtgtagatacaccagataaaatgtaat

SEQ ID NO: 300399 - DNA, 865 bp, Unknown
  Bacterial polypeptide expressing nucleotide sequence isolated from the Sargasso Sea
gctgacagctttatctatagagcaggcgctacttttaattaaaaagaacctcaagagcctaggtattaaccacgataattttgttagtgaaaaaagcattgtttcaaacaaagaagtagagagtgtaataaaatttttagaaaaaaataaatttgtatataaaggaaaaattaaagctccagttggagaagatgataaaaactgggtagagcgagaacagttactttttaaatctactgattttggtgatgataaagatagatcgttgcaaaaatcagatggagcttggacttattttgcgagcgatgttgcttatcacaaaaacaaagtagatcgtaaatttgattatttaataaatattcttggtgcagatcatgctggatacatcaaaagaatttcatcttcggttgaagctttatcaggaaaaaaagataaattgatttgtaaaattagtcagcttgtaaaattaatcaaagacaataaaccctttaagatgtctaaaagaaagggtgactacattacagttgatgatttaattgaagaagttggaaaagatgcaactagatttatcatgctcaacagaagtagtgatgtagaactagattttgattttgatgctgtaaaagaaaaatcaaaagataatccgttatattacgttcaatattgctatgctagaatttcatctgtgtttagacatattggtaaagatttaaattcaaatattgaattaaataattttagttttgaatattcaaacgatgaaattaaaattttaaaaaagatttcagaatggcctaaatgtattgatgcagctagttcaaaattagaaccacacagaatacctgtttatttatatgatcttgct

SEQ ID NO: 300400 - DNA, 315 bp, Unknown
  Bacterial polypeptide expressing nucleotide sequence isolated from the Sargasso Sea
cccgcaaggggggcgaccttgcggccaccaatgcccaactgcagttcagcgagccccaggagtgggccctggtgcgggagctgctcaagttcgatgccgtgatcgcagaggtggaggaggagctgctgcccaaccgcttgtgcagctatctgttcgagctcagccaggtgttcaaccgtttctacgaccaggtgccggtgctcaaggccgatcctgaagcgctggcatcccgcctcgccctctgccgtttgacggccgacaccctcagactggggctcggactgctgggcatcgccaccctggaccgcatgtgag

SEQ ID NO: 300401 - DNA, 579 bp, Unknown
  Bacterial polypeptide expressing nucleotide sequence isolated from the Sargasso Sea
aaagagcttttggacagaaaccccagtttggaatgttattaccgattttagttgggttagatggaacacaaaaaatgagtaaaagcttagacaatattgttggaataaatgaagattcattgtctatgtattcaaaattggaaaaggttccagatgatttagttttgagttatttaaatttattaactaatgaaaatttaaacgagttaagttcaaccccaagagaggttcaaaaattcatggctttaaaaataacatctatttttaaaggaatggaagccgcaaaaaaagcgcaatttaattctgaaaaattagttttaggtactcaagatgctcttgaggaaataccagaagcctcaatttctgatgtaaattttccagctaaagcattttatttatttagtaaaatgaaaatgtgttcaagtagcagtgaagcaagaagacaaattcttggaggaggagtaagaattgatggcaaaaaaattattgatcctaatttagaatttgattctcctgaggatctaataggaaaaatattgcaggtaggaaagaaaaaatttcttcgtgcttcaaattgat

SEQ ID NO: 300402 - DNA, 533 bp, Unknown
  Bacterial polypeptide expressing nucleotide sequence isolated from the Sargasso Sea
gtcgaaacgtgccggaaccttcgtaacggtgcgtgacgtcatcaaggctgtcgggtcggacgtcatcaggttcatcatgctgacacggcgtagcgagcagacactggattttgactatgcccgggtcacggaacaatcgcgtgacaatccggtcttctatgtacagtacgcgcatgcccgcgcctgttccgtcctcaggcaggcagaagcacaggcggaaggcgacgcggccctgcatcagctgaacgatccggcggagatggccgtcatcaggcttctcgccggctggccacgacaggtcgtatccgccgccgccgcgcacgaaccgcaccgcatcgccttctacctgatggatttggcggcggccttccacgccctgtggacagccggccgcgagaaccccgatctgcggttcatcagggacgagaacccgttgctgaccgctgcacggcttcgccttgtcaaagcaacggctttggtgattagatcggggctcggcgttctcgccatcgacgcgcggaaggaaatgtagg

SEQ ID NO: 300403 - DNA, 919 bp, Unknown
  Bacterial polypeptide expressing nucleotide sequence isolated from the Sargasso Sea
ttgtgtggagagtccaaagaacgaagacaatggagacttaagcactaatatttgcatggttttaagtaaagacctctcccaaccaccaattaaaattgctgaaattcttaaaacctctcttgaaaaatactctgaattcgaacaactggcgatcgcaaaacctggtttccttaattttcgcgtcaataagtctgtttggtataaatttctaagtgaaaaattaaatagtgatgaactgtatgacaaaaatataggtaatggccaaacaattaatgtggaatatgtttcggctaatccaactggaccattacacataggtcactgtagaggtgctgtatttggggatgtattatcaaacttacttacatctacaggttatgatgtaacaaaagaatattacgtaaatgatgcaggagttcaaattaattacttagctgactcagttatcattagaattaaagaaacactaaatcagcgaaacgaaaataattatccggataatttttatcctggcgagtatctcatcgatgttgcgaaaaagataattgataaaaatggagataaaattttagagcaagataattcatttgaattgatcaaagatgaaagtgtagctttgttattggatttgataaaagcagatttaaaacttttatctattgagcaagatcacttcatatctgaaaagaaactaattgctgagggaaagattgatgaggctattacaaaattaaaagatttagaccttatttatgaaggcatcttagataaaccaaaaggaaagcaaattgaagattgggagccacgagaacaaatgctctttaaatcttcaaattacggtgatgagaccgatagacctttacagaaatcaaacggtgagtggacttattttgcaaacggatatcgcttaccatttgat

SEQ ID NO: 300404 - DNA, 473 bp, Unknown
  Bacterial polypeptide expressing nucleotide sequence isolated from the Sargasso Sea
aagatttatcatgttgaacagaagtagtgatgtagagctcgattttgattttgataatgtgattgaaaaatctaaagataatccactttattatgtacaatatgcctatgctagaatagcatctgtttttagacatcttgataaagaattaaaatcagaagttaaaattgatgattataattttgaatattctgatgatgagataaatatattaaaaaaaatatcagaatggccaaaatgcatagatgcatctagtaaaagattagaacctcatagaattccaacctatttatatgagttatcatcgttatttcactcttactggaatttaggtaaagataaccctgaaaaaagatttattaatgatcaaaaaagaattacagatgataaattaatttttttaaaaactatttctaatgtaattaaatctggaatggatattgtgggtgtttctgctccagaaaaaatgtaat

SEQ ID NO: 300405 - DNA, 935 bp, Unknown
  Bacterial polypeptide expressing nucleotide sequence isolated from the Sargasso Sea
cgaatatgtctccgccaatccgacggggccgatgcatatggggcattgccgcggcgcggtggtgggcgatgcgcttgccacgctgctggaatttgcggggcacaaggtcatccgcgaatattatgtcaacgatgcgggcggccaggtcgacgtgctcgcccgttcggcgcatctgcgctaccgcgaggcgctgggcgcgacgatcgaaattcccgagggtctgtatccgggcgagtatctgaagcccgtgggcgaggcgcttgccgccgagttcggtaacacgtttgtcgacgcgcccgagagcgagtggctggtcctgttccgcacccgtgcggtggcggcgatgatggcgatgatccgcgaggatctggcgctgctcggcatccatcacgacatcttctcgtcggaagccgagttgcaggcggcgggcaagcccgaggcggccgaggccgaactgcggtcgcgtggccttgtctatgacggcgtgttggaggcccccaagggcgagacgcccgaggattgggagccggtcgagctgccgctgttccgctccagccaatatggcgacgaccaggatcgcccgatcaagaagtcgagcggcgcctggacctatttcggcgccgacctggcctatcactatcagaaggcgcagacggcggatcagctgatcgacatctggggcgccgaccatgcgggcaccgtcaagcgcatcgtcgcggcggtcgaggcgctgaccggcggcaagaccaggttcgacgtgaagctggtgcagatggtccgcctgctgcgcggtggcgagccggtgaagatgtcgaagcgcgcgggcaatttcgtgacgctggccgatgtggtccgcgaggtcggcaaggacgtggtgcgcttcaccatgctgaccaggcgggccgacgcgcagatggacttcgacttcgccaagg

SEQ ID NO: 300406 - DNA, 457 bp, Unknown
  Bacterial polypeptide expressing nucleotide sequence isolated from the Sargasso Sea
acccttagagtttgattttaaaaaagtaactgaacagtctaaagaaaatccagttttttatgtgcagtatgctcatgctagaatttcgtctgtattaaacaatcttcattctcaaaatattaaattaaatttagagaattttagtgaatgtaatttttctgaacttaatgatctttctgaaatatcccttttaaaaaaaatcctggattatagtaatatcatcaatacgtcagtttctctgtttgagccccatcgaatttcatattacctgtatgaattagcatcagaatttcattctttatggagtcagggaaaagtagataatagtaagaaatttatagatgccgataatataccaaagacttatgctcgaatggcactactgattgctactcagagaacaataaaatctggacttgatattcttggagtttcctcgccagatgaaatgaaataa

SEQ ID NO: 300407 - DNA, 414 bp, Unknown
  Bacterial polypeptide expressing nucleotide sequence isolated from the Sargasso Sea
attatgatttggatttagctaaagagcaatctgatgctaaccctgttttctacattcaatatgcccatgcacgatgctgtaatatgctaagaagatttgaaggtgatttagattcaatagatgaatcatctctggagcatttaaagttggatatagaaactcaacttataaataaattattaacgtttcctgaagtaataagaaaatctagcataacacttgaacctcaaaatatatcaaattacttagctgagctatcatcctctttccatagctactacgcaaaagaaagagtgattgattcagaaaacaaaatattaactgaagctagaatctatctagtcaatgcaactagaatagttattagaaatggattaaaagttcttggagtatcagctccagaacaaatgtaat

SEQ ID NO: 300408 - DNA, 936 bp, Unknown
  Bacterial polypeptide expressing nucleotide sequence isolated from the Sargasso Sea
actgaattttgatgattatgaggaaataagtgataagttaacagctttatcaatagaacaggcgctacttttaattaaaaagaaccttaaaagcttaggaattaaccacgataattttgttagtgaaaaaagcattgtttcaaacaaagaagtagagagtgtaataaaatttttagaaaaaaataaatttgtatataaaggaaaaattaaagctccagctggagaagacgataaaaactggatagaacgagaacagttactttttaaatctactgattttggtgacgataaagatagagctttacaaaaatctgatggagcctggacttattttgcaagtgatgttgcttatcacaaaaacaaagtagatcgtaaatttgattatttaataaatatacttggtgcagatcatgctggttacatcaaaagaatttcatcctcggttgaagctttatcaggaaaaaaagataaattgatctgtaaaattagtcagcttgtaaaattaatcaaagacaataaaccctttaagatgtctaaaagaaagggtgactacattacagttgatgatttaattgaagaagttggaaaagatgcaactagatttatcatgctcaacagaagtagtgatgtagagttagattttgattttgatgcagtaaaagaaaaatcaaaagataatccgttatattacgttcaatattgttatgctagaatttcatctgtctttagacatattggtaaagatttaaattcaaatattgaattaaatgattttagttttgaatattcaaacgatgaaattaaaattttaaaaaagatttcagaatggcccaaatgtattgatgcagctagttcaaaattagaaccacacagaatacctgtttatttatatgatctggcttcagaatttcattcctattggaatcttggtaaaca

SEQ ID NO: 300409 - DNA, 643 bp, Unknown
  Bacterial polypeptide expressing nucleotide sequence isolated from the Sargasso Sea
aatgaatttttttaatatatatctagaaaaaataaaaaaaagtacgattaaaaataaaaaaaagttagatttcaaagaaaatcaaattttaaataaaattatcgttgagacacctcctgaaaacttcgactgtgacctatcaacaaacattgctttaatacttgcaaaaaaaacaaaccaaaatccaaaaataactgcagagaaaattaaagcaattcttattcatgagattaaacatttttcatcaattgatattgctggaccaggttttcttaatataaaattatcagatgacgcatggttttatgttattaaaaatatcgaaaaaaataaaaaaaactttggttctaacaaaaaaaatcataaatacaatattgaatttgtttctgcaaaccccactggtcctttacatataggtcactgtagaggggcaatatttggcgatgttttatcaaatctactcaagttcaatggaaataaagtaacgaaggagttttatataaatgactacggaaaacaaatagatgatttttcaaagtcaatctatttaagattaaaagagataaaattcaacacaaagttcccaagtgacgaaacactttatccgggtagttacattatagatatttcaaagaaattttga

SEQ ID NO: 300410 - DNA, 760 bp, Unknown
  Bacterial polypeptide expressing nucleotide sequence isolated from the Sargasso Sea
tttgggagatgataaagatagagttcttttaagagaaaatggggagccaacctattacttaaccgatgttggttaccataaagataaaatagataggaagtacgaacactatataaatatctttggcgctgaccatcacggttatgtgagaagaatagcctcagcttttgatacgttgaaaaatgattaccaatctttagagattatcttgtaccagttggtaaatctttttgagaatggaaaaaagaagcaaatgtcgacaagaaagggtgacttttattcccttgaggagcttagagaagaaattgggtctgatgtcataaaatttttcttccttgaaaaaaaatctgatcacactattgattttgacgtcttgaaggcgaaagaggagagtaaaactaatccttacttttatacacaatatgctcatgttaggtgttgctccatacttcagaataaaactccagattttaagtgtatgtatgacgaaaaagaaattacaaaaaactttgatctactaaataaaattattaactatccaaaacatcttgaggattttgctaacgagaggtcgccacattcattggttcactttttaaaagagttggcagctgatttccattcattttatgagactaatcctgttctagttgaaaacgatacagttgcaaattcaaggcttattattaccaaggcaacgcagatagtattgaaaaacggattggagctacttagtgtcaaacctctttcaaaaatgtaa

SEQ ID NO: 300411 - DNA, 647 bp, Unknown
  Bacterial polypeptide expressing nucleotide sequence isolated from the Sargasso Sea
tatgaggttgtcaaggaatattatgtaaatgacgctggcaagcaaatagaaattctcgttacttcagtcatccaaaggtatcatgagttaattgatagcaacttaaatttctcatatgaagatttatataaaggagattatatatgggatattgcggcagaacttcatagaaactttagttcagatcttcaaattctaaatattattgatttaaaagacccaaaaattgatttgtacatgcaaagaataaaagatgccttatctatagaaaagtttcttaaaataagagaaatatcaataaatgctattttagaaaatataaaatcaagtctgaggcagtctgatattaattttgataactggttttttgaatcatctttaatagatgataaatctttaataaaagcaattgattttttaaatcaaaataattttacatatcaaaaagataatgcactttggtttaaatcaaaagattttggagacgaaaaagaccgtgttcttattaaagaaaataaggatcacacatatttagctactgatattgcatatcatgaaaaaaaaataaaaagaaactttgatataaatataaatatttggggagccgatcaccatggttatatttctagaattcaaggtgcttttaa

SEQ ID NO: 300412 - DNA, 826 bp, Unknown
  Bacterial polypeptide expressing nucleotide sequence isolated from the Sargasso Sea
aatgaatatatttgataactatttatccaaaatatgtgagattattacagataataagaagctactaaaattaacatctttagataatctagttaatataaatttagaagttcctccagatcatcttgactatgatttatcttctaatgtttcgctagttttagctaaaactaataaattaaatccaatgaacttatcatctgaaataaaagatttattattaaagaaggaaagtcatttcgagaagatcgatgtagcaggacctggctttataaatatcaaactttcaaatgatgctttggttttcaacattaataaaatacttaagattaaagatacttatggatcaaaaaagtctaaaaagtcgtataatatagaatttgtctcggctaatcctacaggccctatgcatgttggtcattgtaggggagcaatttttggtgatgttttatcaaatttattatcatttaatggcaacaaagttgtcagagagtactatataaatgattacggtaatcaaataagaaattttgtagaatcggtttatttaagaataagagaaattaaatttaaagaaaagttcgttgtaagagaaaatttatatcctggtgattatatcaaagatattgctgaaaatatcataaaagataataaaaatatcgatgtggaaaattttaaaaattgctacgaggagctaaaaaaattttccttaatagcttcaatggctttgatcaaagatgatttaaaaaaacttggtattgaacatgacaattttttttcagagtcagaacttgtaaaaaaagatttagtcaacataaccgttaga

SEQ ID NO: 300413 - DNA, 907 bp, Unknown
  Bacterial polypeptide expressing nucleotide sequence isolated from the Sargasso Sea
aatgaatatattcgacaattatttggcaaaaataagtaaactaattttagataataaagaaagtttaaaattaaaaaatcttgataatttaaaaaatataaatttggaagtcccaccagaaaaatttaattttgatttatccactaatatttctttaatgctatctaagccaaataaattaaattctaatgatttagcacataaaataaaagagatatttgtaaaaggtattatccattttgaaaaagttgaagtggctgggccaggatttataaatataaaattatcaaaggatggaattttgtccaatattaaagatatttttaataacaaagattcttatggtgcaaacaaatcaaataaaacttttaatatagagtttgtatcagcaaatcctactgggccaatgcatgtaggccattgtcgaggagctatatttggcgacgtattatccaatcttttatcgtttaatggaaataaagttgttaaggaatattatataaatgattatggaagtcagattaaaaactttgttgagtccgtctatcaaagaataagggagataaaatataatgaaaaatttatagctaaaaaaaatttataccctggaaaatatataaaagatattgctaataatattttaaaacaaaacaaaaatatagtagtaaacaattttcaagaatcatttaaggaattaaaacaactttctttgaaagagtctatgtcattaattaaaaatgaccttaaattacttggtataacccatgataattttttctctgaaacgaatctcgttaataaagatttagtaagtaaagctgttatacatttaaaaaaaggaaactatgtagaagaaggatttctcgctcctcaaaaggtgaaactttctaatattggaaaaaaataa

SEQ ID NO: 300414 - DNA, 898 bp, Unknown
  Bacterial polypeptide expressing nucleotide sequence isolated from the Sargasso Sea
tcatttgggtaatggcacgctgagccagatcgctaactttggtgataacgaggttggtggtgactacatagacgaggcactaatgcgcttcgtcctcgaggaaatgagccgcgaaaagtctactgggaagaagttgcttgaggctcccggagcgcgcgccaagcttttagaacagtgcgaaaaagcaaagatagagctttccaaaagagattctgcaattatctatgtgcctaacttttacaccaacgccggcgatgataacgatattgaccttaacttaacgcgtgaatgtttccagcgggttgccgagagatttattaatcgcggcataggggtcattgatgagttgttgctccgactaaatatagatcgccgccgtattgctctttgtctcgctacaggcggaatgatccatatgcccgctatccacagtgcactcgtgcagctatttggtgccgaccgcctccatatatcgcctcgaggtgatcggataatttcagagggctgcgcgtggattgccgaggatgagtcgcgcctgaagctagcaaaaccattggagctggcggaggcgagggagaactatttgccggttttcaagcctggtgatccgttgcctgtagctggggaaaccatcgcacaaaacctgcttgtctactgcgttgatccgagagatgggatagcaaagatcaaacttgcacgcccacgctttcttgggaagtgtgcagccactgatcctagagacaattatgcaagcgtggccgtaagagttgaatcccaagcaaagccttttatggagcgcatagacgtagagctaaacattgaccacgatctcatcgtgcgcgtgactgccagatcgaccctgctggaagatttcgactacgccgaaatattagattta

SEQ ID NO: 300415 - DNA, 795 bp, Unknown
  Bacterial polypeptide expressing nucleotide sequence isolated from the Sargasso Sea
tatgactattaaaacaattacaaaaaatataaaagaaaatattcaaaattctcttgagcaatttgatatcaacttaagcaaaaaagctttgaatttgtctccgcctaagcaagaatcatttggggatctatcttctagcatagctctgatcttagcaaaaaaaattaaaagaaatcctttagaattagctgaaaaaatatgtgaagatcttataaatagtaatatcgattccattgatgaaataacagtgactgctccagggtttattaattttgtaattgataaaaaattctatcaagataatctgaaattgatcataaaaaatggtgttgagttcggaaaagacccttcagcaaaaaaaagaactgcaaatgtcgaatttgtaagtgcaaatccaacagggcctttgacagtagggcacgggcgaaatgcagttataggagatactgtttcaaacatattggaatggcatggatacaacgtaacaagggagtactactataatgatgcaggaaagcaaatgcgcactctgggaaaatcagtagaagctcgctattatgaacttcttgataaaccatttgaattcccagaagatggatatcaaggagattatattattgaaatagctaaatcaattattaatcattatggcaaagaacttgaaaaagaagataaaaagtttctatcgtatgctgagaaaataatttttaaacaaataaaaaatagtcttaattcattagggattcaatttgatacattcgctaatgaaaaatctttttatgaatctggtgcaat

SEQ ID NO: 300416 - DNA, 871 bp, Unknown
  Bacterial polypeptide expressing nucleotide sequence isolated from the Sargasso Sea
tatggatttggtcaaacttgacttaaaaaatttaggaataaaacatgataattttttttctgaaagcaaactaataagagaagatttagtaaataaaacaatcaaaaatttaaaaaaaaataattttgttgaagatggttttttagatcccccgaaaggaaatgaagggaaaaaatggaaaaaaactaaaaaattaatatttaagtcaactctttttggcgatgacacaaataggtcgctacaaaaagatgatggatcttggacatattttgcaaatgatgttgcgtaccatgcagataaagtatcaagaaattttgattacttaattaatattttgggagcagatcatactggttacataaaaagaattaccgctgctgttgctgctctatctaataataaagtgatattaaaatgcaaagtttgtcaattggttaaactttataaaaaaggaaaaccatttaaaatgtcaaaaagatctggagattttatatctgtaaatgacttgcttaatgaagtagatagagattcgataagatttatgatgttaagcaagagcaatgatgcagaattagattttgattttgaaaaagttttagaaaaaactaaagacaatcctgttttttatgttcaatactgctatgcaagaataagttcattatttaagactttaaatatcaatatgagtgataaaattgtattagaggaaagtaattttaaacttaataattttgaaaataagcttttaagaaaaatatttgattggcctaaagttatagattcagcctcctcaaaatatgaaccacataaaattgttttttatctttatgatttagcaactttatttcattcatattggagcaaaggaaac

SEQ ID NO: 300417 - DNA, 805 bp, Unknown
  Bacterial polypeptide expressing nucleotide sequence isolated from the Sargasso Sea
gatgacgtggatcgcccgattaaaaagtctgatggggcgtggacttacttggccccagatattgcttatcactttgataaagtagagcgcaattttgatcatttgattgatatttttggggctgatcatggtggatacgtgaagcgaatgaaagctgctgtttctgcgctttcagatgataaagtcaaatttgacataaagttaacccaactagtgaagttgttcagacgtggagagccatttaaaatgtcaaaaagggcagggacatttgtaactttgcgggatcttgtggatcaagttggttctgacgtaactcgttttgtcatgctaacacgaaaaaatgatgccccattagactttgactttgaaaaggttcttgagcaaagcaaagataatcctgtttattatgttcagtatgcaagtgccaggatccatagtgtatttcgaaaagctaaagacgccggaatctattttgaaggggagcagatgagatatgaaacatttagcaaaatcacacacgaagcagaaataaaaattgcgaaaaagttagccgagtggcctcgacttgttgaaatatctgctaaaactcatgagccccatcgtatagctttttacctctatgaactagcaagcgattttcatagtttatggaataagggcaatgagaatgacgagctcagatttatccaagaaaacgaccatgaagcaacttgtacaaaaatggccatgatttcggctgttttagttgttatttcctcaggtcttggtattctagggatagagccagcaactcatatgaattaaa

SEQ ID NO: 300418 - DNA, 322 bp, Unknown
  Bacterial polypeptide expressing nucleotide sequence isolated from the Sargasso Sea
atgaaacaagttattgcaggacttatcgattctgccctaaaaacattgattgaaaacggcactttgcctgacgacgtgcaaccaaacattatggttgaaaacacacgagacaagtcacacggcgactatgcatccaatatcgcgctaacgctggcaaaacccgcacgctgtaatcctcgacaactcgccgagaaactggttgcagccctccctcaatcagacaacctgacgcgtaccgaaatagccggaccgggttttattaactttttcattagtgaagcctcaaccagcagtctactcaccacgattcttgagcaaaaag

SEQ ID NO: 300419 - DNA, 788 bp, Unknown
  Bacterial polypeptide expressing nucleotide sequence isolated from the Sargasso Sea
aattcaggatgaaaaaggtaattctttcagcgaatatgtaacatttcctgataatttgaaaggatattttgactttggtttacttcatgcagataaagatttcttagtttatgagtctgagagatatacttttaaggaaacaatctcaaaggcagctcaagttggaaacgctcttattgaagagggtattcaaaaaggggacagagttgcaatatgtatgcaaaacaatccagagtttatttttgcatatatgggcattgttggaataggcgcagtttgtgttccattaaattcttggtgggttcctgatgaaataatttacgcaatggagcattgcgatgcaaaagttttatttggagatcaaaaaagattaaaaggacttgaatctctaacaaatgtaaaaaaaattataaccacctacacgcctgatgatagcttcgaatcatttgatgatttcacaaaaaatcactctgaagaatggcctgatattgatattaatagagatgaccatgcaacaatttactatacttctggatcaaccgggaagcctaaaggagtcttatcatcacaacgtggagtcatatcttcaatgtttagttgggcatttatttcaactgttttaagtcaaagagaagcaagacttggtcaagacgctactccactggcaagttcagaatcttcaattctactttgcgttcctttatttcatgctactggaagtcatgttgcatttctaatgtctattttggttgggagaaaggttgttatgatgaaaaaatgggatgctg

SEQ ID NO: 300420 - DNA, 553 bp, Unknown
  Bacterial polypeptide expressing nucleotide sequence isolated from the Sargasso Sea
gatgaaatcactaaaaaaaaatctttgtaaacacatagacagcgccctatctttacttggttttccaaaaaaagactattcattaattccgccaaaaagctcttcttttggagatatttcatctaacattggattattaattggtagtgaaataaaaattaacccaatgatatgtgcacaaaaaatattgaacgagctaaatagaaataatattgagaatataaaatcaataacagttactaaacctgggttcataaatttttttattgaagattccttttttcaaaactatataagaaatattaactctctgaaatcaaaatttgggagaagctcaattggaaaaggtaaaaaagtaaatgtagaatttgttagcgcaaatccaactggtccattaactgtgggacatggtcgtaatgcagtcataggtgatacggtctcaaatatattaaaatggaatggttttaatgttaccagagaatattattttaataatgcggggaggcaaatgcgcattctaggagaatctgtaaaagccccgttatttagaact

SEQ ID NO: 300421 - DNA, 955 bp, Unknown
  Bacterial polypeptide expressing nucleotide sequence isolated from the Sargasso Sea
aaatcaattgattttattgatcattttgtggtttcaaaaaatggttttattaatttttttctaaaagatgaatttgtattaagaagtttaaaagaaatttatagtaaaaattttttaaattatattaattatggtgcagataaaaaaataaatgtcgaatttgtttcagctaatccaactggaccattgcatatagcccatataagaggtgctgtatttggagatgtattaagctccctttatactaaaacaggttttgatgttactagagagtattacgtaaatgatgcaggttctcaaattgacaaattatctaactcccttctgaaaagatatttacaattatttgataaaaaaattgagttagatgaagatgagtatcctggtgaatatctaatagatattgccaaaaaaattaaaaatgaagatggtgataagtggttaaattttcagcaagaagaaactattcaatattttaaaaattttgcattaaaaaatatacttttaagcataaaatcagatttagaattaattaatataagatttgataaatttactcatgaaactgaaatagaaaaaagtaaaattattgatgaacttttttcaatcttagatgaaaaaaaattattatatgaaggtattttagaaaagccaaaaggtgatgactctgattgggagccaagagagcaattattatttagatcctctaacttattagataatgaagaccgggcattaaaaaaatcaaatggcgaatggacatattttgctaatgatgcagcatatcatttagataaatgtaaaagaaattttgatagattagtaaatatttgggggtctgatcatattggctatattccaagaatgaattcgttaattaaagctattaaagatgatgaaacttatttaaacattttaacttgtcagattgtaagtttaattcaaaataaacaaa

SEQ ID NO: 300422 - DNA, 700 bp, Unknown
  Bacterial polypeptide expressing nucleotide sequence isolated from the Sargasso Sea
tttttactctcaaaaacagctcaaaaaaagccctcaagaaatatctaacgaggtatcaaaactttacaaatttgataatatcccacaaatcaaaaatgtcgagtcacatcctagtggatatctgaatttcaatattgattacacgcaattttctaatctggtaatcagttcttctctacaagaaaattatggttcacttgatattggacataatgaaaaaattgttgtagagcacacgtctgtaaatccaaacaaagctttgcacgttggacacatacgaaatgtaatcttgggagatattgtttctaaaattcttagaaaaggaaattttgatgtaaaggtactaaattatgttgatgattctggcttacaagttgctgacattatagttggtttcacagaacttggattctcacaagaaccacctggaaatgaaaaatttgatcattactgtggtgacactgtttatgttaaaaccactgaaaaatatgaaactaataaaaaattagaagaaaaacgtcatgaaattctaaaacaaattgaagatagttctagtcttatatcaaaaatggcacaaacgattactcgaaaagtattgaatgaacagctaaaaactgtatggaatttgggtgtcttttacgattgtcttaattttgaatctcaaattatacattcaaaactatggggagaaaatatttga

SEQ ID NO: 300423 - DNA, 1096 bp, Unknown
  Bacterial polypeptide expressing nucleotide sequence isolated from the Sargasso Sea
atgagcaaaaaaataaaatctaaaatagttgatactttaaataagctctatagctcttttgaaagtatagatagcttaacaatagagataaaccgaaccactgatacgtctcatggagacctctatacaaatgttgctatgaagttagcaaaaatacttaaaaaaagtcctatgttaatagctgaagaaataatgaaaaacttagaagcaatagatagtatcgaaaaaatagaaattgcgacacctggatacataaacttttttcttactaagtctaataagtttaacgaaatgaataaaatcatgagtgatgacttaacaatcttgaaagaaaacaataaaaaaaatgtacacatagaatttgtatcagcaaatcctacaggcccacttcacatcggtcatggaagaggtatggttgttggagatacaactgcaaggtttttatcttatcaagggcattctgttaatagagagtattatgtgaatgatgctggtaggcaaattgatctactgcttgtaagtgtactattaagttaccttaacaaagaggatcatgtattcagtgatgagaaggagagcgatgaggctcttttagttacctataaaggattatatataaaggatgtctcaaatgttatttcgaatgttcttaaagatattgatagtcagaaagtcttaagtttacttaatgaaccaatagatattctaataaaatttctcaaaaaacataaaaattatttaaatattagaaaaactttagttgatgtaattataaatgattatatcaaagaagatttatcatcagttagtatagcgtttgatagctggtactatgagagtgaactatataaaacaggtcttctcaaacaaatactcattgatttagataatagaaatttaagctataaaaaagacggtgctctatggtttaaaaatactaagtatggtgaagaaaaagatagagtgctagtaaaaagtaacggcgatatgacatactttgccacagatattgcttatcatgcgcataagtttaaacattatgatttattaattgatatctggggagctgatcatcatgattacgcagtaaggtgac

SEQ ID NO: 300424 - DNA, 1453 bp, Unknown
  Bacterial polypeptide expressing nucleotide sequence isolated from the Sargasso Sea
atgaatgatttattatctttaattaaaaaagatttaacaagtcttattgaaaaactttttaatgatgatgttattaaaaatgatatatcaaataaattaacaattgattacaattcaaaatctaaacaaggagatttatcttctaatgtattatttatactaaaaggacaaatcttagataaaagttttaatatcaatgactatgttgaaaattatttatcaaatttagaatatattgaaactatagatattcataaggctggctttgtaaatataattttaacaaaagattatattacaaaatttttgaataaaatttatattttagaaaatatttatactaaaactaataaacaaaaaattaatttagaatttgtatccgcaaatcctacaggtccaattcatgttgcacatcttagaggcgcagttttaggtgatgtattgtcatcaatattaaaacgaattggtcatgaagtaactagggaatattatgttaatgatgctggttcacaaattacaattttaggaaattctttatttaaaagatatcaagaattgtgtggtaaaaacattcaatttttggatggtgaatatccaggtaattatttgatagaaatagctaaagaaattaaaaatttagataatgaaaagtggttatcagttaaagattctaataaagtgcaatcctattttgaacaatatgctattcaatatctagtaaaaaaaattcaagatgatctattacttttaaatattaaatttgatcaatttacttttgaatcaaaaattgtaaaaaataatttaataaataaagttttctcaattttaaaagataatgatttaatttatgaaggaattttagaaaaacctttaacggttgattctgaggattgggaaccaagaaaacaattattatttcgttctacaatattttcagatgataatgatagagcattccaaaaatcaaatggtgaatggacttattttgcaaatgatgcagcatatcatttcgataaatataaaaggggatatgataagttaataaatatttggggagcagaccatattggttatattaagcgaatggtttctatagtcgatgttttctcaaacaaaaaagaatatttaaaagttattgtctgtcaaatcgtaagactatttaaagataatcaattattgaaaatttcaaaaagagagggcaattttgttaccttagaagaaatttacaaacaagtaggaaaagatcctttaagatatttcatgatctcaactaaaaatgaaacccctatggatttttatatggataaagtagttgaaaaaaataaagacaatcctgttttttattgtcagtatgcgtatgctagagcttcttcagtaattaataatgccaaaaaactatcaaatatagacatatctaaaatttcttttacagattttaataaattatctattt

SEQ ID NO: 300425 - DNA, 1888 bp, Unknown
  Bacterial polypeptide expressing nucleotide sequence isolated from the Sargasso Sea
aatggtatttctagaattacttgaaaatatacgaaaggagacgtctgaaattttagattctcaaaattatgatcctgtctcattctcagttgaatctgcaaaacctggatttggtgacataacgtgtaatgttgcatttttactctcaaaacagctcaaaaaaagcccccaagagatatctaaagagctgtcaaaattatacaaatttgatcatatcccacaaattaaaaatgttgaatcacatgccagtgggtatctcaatttcaatattgattacacccaattcactaatcttgtaattgattcttctctccaagaaaattatggttcacttgatattggacataatgaaaaaattgttgtagaacatacttctgttaatccaaacaaagctctacacgttgggcacattcgaaatgtaatcttgggtgatattgtgtctaaaattctaagaaaaggaaattttgatgtaaaggtcttaaattatgttgatgattctggtttacaagttgctgacatcatagttggttttactgaacttggattttcacaagaacctcctgaaaatgaaaaatttgatcattattgtggtgatactgtatatgttaagactactgaaaagtatgaaaccgataaacaattagaagaaaaacgacatgaaattctgaaacaaattgaagacagttcaagtaccatttcaaaaatggcgcaaacaattactcgaaaagtattggatgaacaactaaaaactgtgtggaatttaggagtcttttatgactgtcttaatttcgaatctcaaattatacattcaaaattatgggataaaatatttgaaaaattaaaatctgaaaaccaaataaaatatgaagaaacaggagataatgctggatgctgggttattcctgcagaaggcgaagatgataagatactagttcgtagcaatggtgttgcaacgtatattgcaaaagatattccatatgcagcttggaaactaggtcttgtcgatgatccattttcttataaaattcactctacacaaaaaaattctcaaacactctatgaaacaactttggatgaaatttctgatcatgatgacgataaactaaatttatctggtaacaaagtgattactgtaattgataatagacaaattcgtttacaaaaaatagtatctggtttgatggcaaaattcaaagaagaaggcgcatacacgcaccttggctacgaatctgtcactttgagtgctgatactgtaaaatcacttggattgtccgttgatggagaatctgcacaaatgtctggtcgtaaaggcctgtatgtgaatgccgataccgtgcttgaaacactcacaaaacgtgtttatgatgaatcaaaaagcagaaatgaaaatttgtctgaatctgaacttgaaaatattgcaaatattgtagcggttggaacaatacgttatgaaatgataaaacctgatttagacaaaatcattacatttgatttgaaaaactctcttcgtttagaaggtgacacctgtagttacatacaatattcatatgcacgcgcatctagaatacttgaaaaaacagaaactaaacccaattttgattctggatttgaattattatcttctgaatatgaaaaaaatctcataaaaaaaattgcaatgtttgatgttcaggtcaacgactctgtcaataacttttcgcctaaagtgattgcaaaatattcctacgatttggcagtgaccttttcttcattttatgaacatgttaaggtgttaaaatctgaaactcctgaattactaaatgctagattatgtcttgttgtatcattccaaaaaactctcaaatcttcattaggtttacttggtattgacgcacctgaaagaatgtag

SEQ ID NO: 300426 - DNA, 1175 bp, Unknown
  Bacterial polypeptide expressing nucleotide sequence isolated from the Sargasso Sea
ttttggatctgtgttatcaaagcttctgaaagaagcaggatttgaagtagatgaagaatattatgtaaatgattttgggagacaaatgaacattctttctgtgagcttatggattagatatgcacagatatttgataagaacataaaaatgttaaataacggttatcaaggcgattatcttattgccattgcacaaaatttaaagaaattcaggtctgatgagctgtatgaagatgatgaggagatcaaaagtcttctagaaaatgagaacgaagaagctgaaaaacatactgacgaagtcatcgatagcatcaaatctaagctaagtgatgaattttcttatgtgagagattttgcgctcagggaaatattagagttaataaaggaagatctattagaattcggcgtcgatcacaatcactggttttcagaatctgcactttataaaagtgaactacatgatctcagcaaagttgatcaatctattgaagaactttcatctaaaggatttgtatacgaaaaagaaggtgctatttggtttaaatcttcagaacttggagatgataaagacagagttttaaaaagaggcaatggtgaatttacttattttgcctctgatgttgcctatcacttagataaatatgatcgcggatacgataggataatcaatatttgggggtcagatcatcacggctaccttccaagagtaaaggctgccatggaagcaagtaaaaagaatgtagaaaagcttgaagtagtctttattcaatttgctaatttaattagggcaggaaaaaaagtgaccatgtctactagaagtggggaatttattacacttaaagaactcatagaagaggttacatcagaagcagcaagatttttttatattaatagaaaagctgatcaacatttagactttgatttagacctcgcaaaagagcagtctaaagataatcctctgtactatattcaatacgcgcatgctcgcatatgcagtgttctgcgtaagtccaaagctagagaagaagaattgacctcatcagaacttggattattggattccaacaaagagatagaaatacagaaaattcttaaacagtatcctcctctaattgaaagagcagctctagcaagtgagcatcatttaatttgctattacttaaaagacttggcta

SEQ ID NO: 300427 - DNA, 711 bp, Unknown
  Bacterial polypeptide expressing nucleotide sequence isolated from the Sargasso Sea
aatgaaagatccaaatatcctatttaaagaaattgctgatgaatttacttcctcgggccaattatttgagacaagagactataaagattctaatggcatcatccataaagagtatgctgcattcccggataacttaagaggatattttgattttggtttattgcatgctgataaagagtttatagtttatgagtctgaaagatttctttataaagatgtaatagctaaggcagcacaagttggtaatgcacttatatcagaaggtataaaaaaaggagatcgagttgcaatatgcatgcaaaataacccagagtttatatttgcatatatgggaatagtcggaattggcgctgtatgcgttccattaaattcatggtgggttcctgatgaagttatttatgcacttgaacactctgaagctaagctgctatttggagatcaaaaaagacttcaaggattagagtccttaaaggatgtaaaaaaagtaattactagttataccccagatgaaaatttcatctctttttcagatttcataaaggatcattcgagtgaatggccagatattaaagtatctcgtgatgatcatgcaactatttattacacatctggctctacaggcaaaccaaaaggagtattgtcatctcaaagaggtcttatttcttctttctttagttgggcatgtatgtcaatgattttaagtgaaagaga

SEQ ID NO: 300428 - DNA, 466 bp, Unknown
  Bacterial polypeptide expressing nucleotide sequence isolated from the Sargasso Sea
gatgtccgatatatttcatttttataagtctattatctcaaaggaatttgcatcaaattttaaattgccagagcaagctataaacgaaagttcttttgttgttgagagtccaaagaacgaagataatggagacttaagcactaatatttgcatggttttaagtaaagacctctcccaaccaccgattaaaattgctgaaattctcaaaacctctcttgaaaaatactctgaattcgaacaactagaggttgcaaaacctggtttccttaattttcgcgtcaataagtctgtttggtataaatttttaagtgagaaattacataccagtgaactttatgacaaaaatataggcaatggccaaacaatcaatgtggaatatgtctcggctaatccaactggaccattacacataggccactgtagaggcgctgtatttggagatgtattatcaaatttacttacatct

SEQ ID NO: 300429 - DNA, 917 bp, Unknown
  Bacterial polypeptide expressing nucleotide sequence isolated from the Sargasso Sea
ccttaagagtttaggtattaaccatgataattttgttagtgaaaaaaccattgttttaaacaacgaagtagagagtgtaataaaatttttagagaaaaataaatttgtatataaaggaaaaattaaagctccagctggagaagacgataaaaactggatagaacgagaacagttactttttaaatctactgattttggtgatgataaagatagagcattacaaaaatctgacggtgcttggacttattttgcaagtgatgttgcttatcacaaaaacaaagtagatcgtaaatttgattatttaataaatattcttggtgcagatcatgctggttacatcaaaagaatttcatcatctgttgaagctttatcgggaaaaaaagataaattgatttgtaaaattagtcagcttgtaaaattaatcaaagataataaaccctttaagatgtctaaaagaaagggtgactacattacagttgatgatttaattgaggaagttggaaaagatgcaactagatttatcatgctaaacagaagcagtgatgtagaactagattttgattttgatgctgtaaaagaaaaatcaaaagataatccgttatattatgttcaatattgttatgctagaatttcatctgtttttagacacattggaaaagatttaaattcaaatattaaattagatgattttagttttgaatattcaaatgatgagatcaaaattttaaaaaagatttcagaatggcctaaatgtatcgatgcagctagttcaaaattagaaccacatagaatacctgtttatttatatgatcttgcttcagaatttcactcatattggaatcttggcaaacaaaacccagaaaaaagatttattaatgatcaaaaaacagtttcaccagataaattaattttttaaa

SEQ ID NO: 300430 - DNA, 1119 bp, Unknown
  Bacterial polypeptide expressing nucleotide sequence isolated from the Sargasso Sea
tatggtttttcttgaattactagaaaatatacgaaaaaaaacagataaaattttagactctcagaatctagaacctgtaccattctcagttgaatctgcaaagcctggatttggtgacataacatgtaatgtctcatttctactctcaaaacaactcaagaaaagccctcgagacatatctcgtgaactttctgatttgtataattttgacgacttgcctgaaataaaaaatgttgaatctcatcctagcggatatctcaattttagtatagattatgaaaaatttaatgaagttgttatttcttcatcacttgaagaaaattatggctctcttgatattggtaacaacgaaaaagttgtggttgaacacacatcagtaaatccaaacaaggcgttacatgttggtcatattcgaaatgtgattttgggtgacatcgtatctagaatactccgaaaaggaaattttgacgtaaatgtactaaactatgtagatgattctggtctgcaagttgctgacattattgttggttttactgaattaggtttttcacaggaaccaccaaacaatgaaaaatttgatcattattgtggtgatactgtatatgtaaaaactactgaaaaatatgaaaccgataaaaagttagaagaaaaaagacatgaaatcctaaaacaaattgaagaaagttctagtgaaatatcaaaaatggcacaaacaattactcgaagagtattggatgagcaattaaaaacagtttggaatctaggggttttttatgactgtctgaattttgaatctcaaatcattcattcaaaactttgggaaaaaatttttgagaaattaaaatctgataatcaaataaaatttgaagaatctggtgataatgcaggttgttgggtaattcctgcggaaggcgaagatgataaaatattggttcgaagtaatggggttgcaacttacattgcaaaagatattccttatgctgcatggaaacttggattggtagatgatccattctcttacaaaatacactcgactcaaaagaattctcaaattctctatgaaactaatcttgatgagatttctgatcataatgataaactacatttgtctggaaacaa

SEQ ID NO: 300431 - DNA, 409 bp, Unknown
  Bacterial polypeptide expressing nucleotide sequence isolated from the Sargasso Sea
atggataattatattaaaaatttattagattttttttatgatttctcatcctttttagaaaatgaaaattatatatcagcaattgataaaaatcagattagtatagactattcttcaaataataaacagggtgatttagcaactaattttttattaataattaaaagaaaaattattaaaaaaaattttgatattgaaaaagaattaaataagagaattaaatctattgaatttatcgatagaattctcatctcaaaaaatgggtttataaatttttttttaaaaaatgattttgtattcaaaaaattaaatgaaatttataataaagattttttaaaatacataaattatggagatggtaaaaaaataaatgtagaatttgtctcagcaaatccaactgggccacttc

SEQ ID NO: 300432 - DNA, 424 bp, Unknown
  Bacterial polypeptide expressing nucleotide sequence isolated from the Sargasso Sea
atgaatatttttgaattatatttagataagattaaatctataattgttgatttaaataaaaataatcaactagaaattcctgaaagttttaatggtattaatgcagaaatacctccaccaaaatttaattgtgatatttcaacgaatgttgcgatggttttgtcaaaaatcaataaaacttcaccaatacagcttgcagaaaaacttgctcctgaaattaaaaataaagacagccaaattgaaaatatatctgtagccaaaccaggatttattaatattaaatttaaaccatcctattggtcaaactttattaaaaatattacagataatgcagatagttttggaataaatgaaaaagggaaaaaaaataattatttagtagagtttgtttcggcaaacccaacaggacctttacatgtaggac

SEQ ID NO: 300433 - DNA, 1201 bp, Unknown
  Bacterial polypeptide expressing nucleotide sequence isolated from the Sargasso Sea
caattttaaaataaataataatacatggcaaaaaacaatagattctattttaaaatcaaataaaagttacggatcaaataaatttaaaaaaagttttaatatagaatttgtttctgcaaatcctactgggcccatgcacgtaggtcactgtcgtggtgctgtatttggtgatgttttaagcaatttattaatttttaacggtggtaaagttacaaaagaattttatataaatgattatggaaatcaaattgaaaattttgttaagtctgtttatttaagaataagagaaattaaatttaaagaaaactttcctgataataaaagtttatataatggagaatacattaaagacattgcaaacgcagttttaaaaaaattaaagaaaattaaatttgatagttatgaaaaagattttgagatattaaaaaaagagtcattaaattactctttaaatctaataaaatctgatctcaagcttttaggagtaaaacatgacctttttttttcagaaactaaaatggtaaaaaacaagtctgttgataaaataattaaaatattaaaaaaaaataattttgtatttgaaggttttttagaagctcctagaggtgatgattctagttcttggaaaaaaactaaaagactaatattcaagtcttcaagttttggagacgacatagatagagctttacaaaaaaatgatggaacgtggacctattttgctaatgacattggttatcattcaacaaaactaaatagaaaatatgacagtctaattaatatattgggcgctgatcacataggatatataaaaagaatttcagctgcagtcagcgctatgtccaataataaaataaatttgacctgtaaagtttgtcaactagtaaaatttttaaaaaatggagagccttttaaaatgtctaagagatcaggagatttctttccattaaataaattattaaaggaggttaataaagattcaattagatttatgatgttatatagaagcaatgatgttgaattagaatttgattttaaaaaagttttagaaaaaaataaagataacccagttttttatgttcagtattgttatgctagaataaattctatatttagaactttaaaaattaatccttcaaaaaaaacaagtcttagttctgttgattttaaaataaataattttgaacaaaaacttcttaaaaaa

SEQ ID NO: 300434 - DNA, 419 bp, Unknown
  Bacterial polypeptide expressing nucleotide sequence isolated from the Sargasso Sea
gatgaacatttttgataaatatttagataaaattaaaaaaattttgttagatctttcaaaaaatggtgatttaattttacctgataaattggatggtattaccaccgaaacaccacctttaaaatttaatagtgatatatctacaaatgttgcaatgattttatcaaaagtaaacaacaaacctccagtagaattagccacaactttagctgaagcaatcaaaaaaagtgataatttaattgatgatatatcaataattaaaccaggctttattaatattaaatttaaatcaattttttggactaactttatagaagaaataattaaaaactctaaaatttttggaattaattcaaaagaaaaaaagaataactatttagttgaatttgtttctgcaaatccgacaggtcctttacatg

SEQ ID NO: 300435 - DNA, 1078 bp, Unknown
  Bacterial polypeptide expressing nucleotide sequence isolated from the Sargasso Sea
tatgaaagatccagaaatattatttgaagaaattaccaatgaaataactgcaaaaggtcaattatttgaaacaagagaatatgtagatactaaaggcattactcataaagaatatgcttcttttccagataacctaagaggttactttgattttgcaatgctgcatgctgaaaaagagtttttagtatatgaatccgagcgctttttatttaaagatgttgttgcaaaagcagctcaagttggaaatgctctgattgctgaaggaattacaaaaggagaccgtgttgctatatgcatgcagaataatccagaattcatttttgcttacatgggaatagttggaattggtgcggtttgtgttccccttaattcatggtgggttccagatgaagttatatattcacttaatcattctgaagctaaacttttatttggtgataagaaaagacttcaaggactagaaaatttaaaaaacttaaaaaagattattactagctatactccagatgacaatttcacatcttttaatgattttataaaagatcactcaactgactggccagatattgaaatagccagggatgatcacgcaactatttattacacatctggttctacgggaagaccaaaaggtgtcttgtcatctcaaagagggattatttcatctatgtttagttgggcctgtatatcaactgttctgagtcaaagagaagctcgtttgggtaaagatagttcacctttggcaagttctgagtcttgcattcttttgtgtgttcctttattccatgcaaccggcagtcatgttgctttcttattgtctatattggttggcagaaaagtagtaatgatgaaaaaatgggatgcaggagaggcgataagactaattcacgatgaaaaaataacagatataactggcgtcccaacacaaacctgggaattattaaatcatccagataaagataattatgatttatcttcattaaaaactcttggtggtggaggaggtccaagaccagctgaacacgtaaagttattggatgataatttcgaaggaagaccaggtatggatatggattaa

SEQ ID NO: 300436 - DNA, 1069 bp, Unknown
  Bacterial polypeptide expressing nucleotide sequence isolated from the Sargasso Sea
ttgaattttgatgattatgatcaaataagtgaaaagttaacagctttatctatagaccaagcgctacttttaattaaaaagaatcttaagattttaggaattaaccacgataattttgttagtgaaaaaagcattgttttaaacaacgaagttgagagtgtaataaaatttttagaaaagaataattttgtttacaaaggaaaaattaaagctccagctggagaagacgataaaaactgggtagaaagagaacagttactttttaaatctactgactttggtgacgataaagatagagcattgcaaaaatcagatggaacatggacttattttgcaagcgatgttgcctatcataaaaataaagtagatcgtaaatttgattatttaataaatattcttggcgcagatcatgctggatacatcaaaagaatttcatcctcagttgaagctttatcaggaaaaaaagataaattgatttgtaaaattagtcagcttgtaaaattaattaaagataacaaaccatttaagatgtctaaaagaaagggcgactatattacagttgatgatttaattgaagaagttggaaaagatgcaaccagatttattatgcttaacagaagtagtgatgtggaattagattttgattttgatgctgttaaagaaaaatctaaagataatccgttgtattatgttcaatattgttatgctagaatttcatctgtttttagacatattggaaaagatttaaattcaaatattgaattagatgattttagttttgaatattcaaatgatgagatcaaaattttaaaaaagatttcagaatggcctaaatgtatcgatgcagctagttcaaaattagaaccacatagaatacctgtttatttatatgatcttgcctcagaatttcactcgtattggaatcttggtaaacaaaacccagaaaaaagatttattaatgatcaaaaaacagtttcaccagataaattaatttttttaaaagcaatatctaacgttttaaaatctggaatgggtatagtcggcgtagatacaccagataaaatgtaat

SEQ ID NO: 300437 - DNA, 751 bp, Unknown
  Bacterial polypeptide expressing nucleotide sequence isolated from the Sargasso Sea
ttgctcttaatttatataaggagattagtgaataattttataaaagacctttcagattttttatttgattttacagattttttagagaataacaaatttatatctccaatcaataaaaaacagattagtatcgattactcttcaaataataaacaaggtgatttggcgacgaacttttatttaattgttagaagaaaaattattaatgaaaaatttaatattgaaaaagaactaaatgatagaattaaattaatcggatttattgatcattttgtggtttcaaaaaatggttttataaatttttttctaaaagatgaatttgtattaagaagtttaaaagaaatttatagtaaaaattttttaaattatattaattatggtgcagataaaaaaataaatgtcgaatttgtttcagctaatccaactggaccattgcatatagctcatataagaggtgctgtatttggagatgtattaagctctctttatactaaaacaggttttgatgttactagagagtattacgttaatgatgcaggttctcagattgataagttatcaaactctcttttgaaacgatatttacaattatttgataaaaaaattgagttagaagaagatgagtatcctggtgaatacttaataaatattgccaaaaaaattaaaaatgaagatggtgataagtggttaaactttcagcaagaagaaactattcaatattttaaaaattttgcattaaaaaatatacttt

SEQ ID NO: 300438 - DNA, 1105 bp, Unknown
  Bacterial polypeptide expressing nucleotide sequence isolated from the Sargasso Sea
gaatttatcgatcattttgtggtttcaaaaaatggttttataaatttttttctcaaagataagtttgtattaagaagtttaaaggaaatttatagtaaaaattttttaaattatattaattatggtgcaggtaaaaaaataaatgttgaatttgtttcggctaatccaactggaccattacatatagcccatataagaggggctgtattcggagatgtattaagctctctttatactaaaacaggttttgatgttaccagagagtattacgtaaatgatgcaggttctcaaatttataaattatcaaactctcttttgaaacgatatttacaattatttgataaaaaaattgaattagaagaagatgagtatcctggtgaatacttaatagatattgcaaaaaaaattaaaaatgaagatggtgataagtggttaaaccttcaacaaaaagaaactattcagtattttaaaaattttgcattaaaaaatatacttttaagcataaaatctgatttagaattaataaatataagatttgataaatttactcatgaaacagaaatagaaaaaagtaaaattattgatgaacttttttcaatcttagatgaaaaaaaattactatatgcaggtattttagaaaaaccaaagggtgatgattctgattgggagccaagaaaacaattattatttagatcttctaaattattagacaatgaagatcgagcattaaaaaaatcaaatggtgaatggacatattttgctaatgatgcagcatatcatttagataaatgtaaaagaaattttgatagattagtaaatatttgggggtctgatcatattggctatattccaagaatgaattcgttaattaaagcaattaaagatgatgaaacttatctaaatattttaacttgtcagattgtaagtttaattcaaaataaacaaaaaattaaaatgtcaaaaagatctggaaattttgtgacattagctaatgtttattctaaggttggaaaagatccaataaggtactacatgatttctactaaaaatgagacagcaattgactttgatttagatgctgttgttgaaaaaaataaagataata

SEQ ID NO: 300439 - DNA, 1454 bp, Unknown
  Bacterial polypeptide expressing nucleotide sequence isolated from the Sargasso Sea
atcagcacaagttgcaaatgctctaatagaggagggaataaataagggagatcgtgttgcaatatgtatgcaaaataatcctgaatttatatttgcatatatgggaattgttggcattggtgctgtttgtgttcccttaaactcatggtgggttgctgatgaaattacttatgctttagaacattgtgatgcaaagcttatgtttggagataaaagaagattaaaaggtctagatgatctaaaaataacaaagatcataacaagttatacacctgatgataagtttatgtctatttccgagttcattaatgatcattctgatgaatggcctgaggtagatatctctagagatgattttgcaacaatttactatacctctggatctactggaaaacctaagggagttctttcatcacaaagaggcataatttcaactatatttagttttgcatgtatctcaacgatattaagtcaaagggaagaaagaatgggtaatgaattttctcctctaacaggatcagagctagcgatcttactttgcgttcctttatttcatgttactggaagtcatgtatcttttttaatgtcgatccttgtcggaagaaagattgtcatgatgaaaaaatgggatgcaggcgaagcgcttaaattgattaatgatgaaaaagtaacagacattactggtgtcccaactcaaacctgggaattattaaaccatcctgataaaaataaatatgaccttacatcacttaaagtacttgggggtggaggtggtccaagaccagcagaacatgtaaaacaattagatgaaaactttaaaggcaggcctgggataggatatggtctaacagagacaaatgcccttggaacacttgcaggtggggatgaatatatttctaatccatcaactgcaggaagagttgtaccacctgttactgaaataaaaataatagatagtaaatggaatgaggtaccacttggagaaataggtgaaattgcaatcaaatctgaatcaaacatgatcggctactggaaaaatgatgcggcaactaaagaatgtgtgaatgaggctggttggtttaagtctggtgatatgggcaaatttgaaggacctcttttatatatcctagataggattaaggatatggtaattagaggtggtgaaaatattgcatgccctgaagttgaaaatgcaatatatgatcatcctgatgttttagaggcaagtgtttttggtattcctgatcaaagactgggagaaattttatgctcagcagtagtcttaagagaaggatctaaacttaataaagatgatttagtaaactttctatctgacaaattggcagcatttaaaattccagctctaattaaattcatggattcaaatcttcctcgagttgcatctggaaagtttgataagccagctcttagagagatgtttatttctaaataat

SEQ ID NO: 300440 - DNA, 1624 bp, Unknown
  Bacterial polypeptide expressing nucleotide sequence isolated from the Sargasso Sea
attgtttgaaacaagagaatatacaaactctaaaggtatagcgctgcgtgagtatgcttcttttccagacaatttaagaggttattttgattttggtctattacatgctgataaagagtttttaatttatgactctgaacgatttttatataaagatgtaatagctaaggcagcacaagttggtaatgcactagtatcagaaggtataaaaaaaggagatcgagttgcaatatgcatgcaaaataacccagagtttatatttgcatatatgggaatagtcggaattggcgctgtatgcgttccattaaattcatggtgggttcctgatgaagttatttatgcacttgaacactctgaagctaagctactatttggagatcaaaaaagacttcaaggattggagaacttaaaggatgtaaaaaaagtaattactagttataccccagatgaaaatttcatctctttttcagatttcattaaagatcattccagtgaatggccagatattgaagtatctcgtgacgatcatgcaactatttattacacatctggctcaacaggtaaaccaaaaggggtattgtcatctcaaagaggtcttatttcttctttctttagttgggcatgtatgtcaatgatcttaagtgaaagagagaataggttaggtaaagatgcaacaccattagcaagctcagaatcttgtattcttttatgtgtcccattgtttcatgctacgggaagtcatgttgcttttttaatgtctattttagtaggtagaaagattgttatgatgaagaagtgggatgctggagaggccattaagcttatacatgatgaaaaaattacagatgttactggagtgccaacacaaacatgggagttactaaaccatccagataaagataattatgatttatcttcattgaaaactctaggtggtggagggggtcctagacctgctgagcatgtaaagttattagatgataattttgaaggaaggccaggcataggctatggattaacagaaaccaatgcacttggaacacttggtagcggagatgaatatatttcacatccatcttctgcaggaagagttgttccgccattaactgaaattaaaatttttgatgatgaatggaaagaattacctgaaggtaaaatcggagaaattgcaattaaatctcaatctaatatgttaggttattggaaaaatgaagaggccacggcagagtgtatgaacgacgaaggctggtttagatcaggtgatatgggcaagtttgaaggcccatatttatttattgttgacagaatcaaagatatggtaattagaggtggcgaaaatattgcatgtcctgaagtagaaaatgctatatatgagcatccagatgttctacaggcttgtgtttttggaataccagatgagagacttggagaaatattatgtaccgcaatctacctcaaagaagatgcaaaattaaatgaagaatctttagtggaattcctatcagataaattagcagcatttaaaattccagctctaattaaattcatggattcaaaacttcctcttgtagcatctgggaaatttgacaagccagctctaagagaaatctttactcaagagtaa

SEQ ID NO: 300441 - DNA, 1444 bp, Unknown
  Bacterial polypeptide expressing nucleotide sequence isolated from the Sargasso Sea
ttggaacgcccttatcaagggggaattcaaaaaggggacagagttgcaatatgtatgcaaaacaatccagagtttatttttgcatatatgggcattgttggaattggcgcagtttgtgttccattaaattcttggtgggttcctgatgaaataatttacgcaatggagcattgcgatgcaaaagttttatttggagatcaaaaaagattaaaaggacttgaatctttaacacatgtaaaaaaaattataaccacctatacgcctgatgatagctttgaatcattttataatttcacaaaaaatcactctgaagaatggcccgatattgatattaatagagatgaccatgcaacaatttactatacttctggatcaaccgggaagccaaaaggagtcttatcatcacaacgtggagtcatatcttcaatgtttagttggggatttatttcaactgttttaagtcaaagagaagcaagacttggtaaagacgcttctccactggcaagttcagaatcttcaattctactatgcgttcctttatttcatgctactgggagtcatgttgcatttctaatgtctattttggttgggagaaaggttgttatgatgaaaaaatgggatgctggtgatgcaattaaactaattagcgaagaaaaagtatcagatataactggagttcccacgcaaacttgggagttattgaatcatccagatagagataaatatgatctttcctctttgaaagtattaggtggaggaggcggtccaagaccagcagagcatgtaaaacttttagatgagaattttaaaggaaggcctggcattggatatggattaacagaaacaaatgctttaggaactcttgcaagcggagatgaatatattcaaaacccatcttctgctggcagagttgtaccaccgttgacagaaataaaaataattgactctaattggaatgaattacctgaaggcgaaatcggtgaagttgcaataaaatcacaatcaaatatgttgggttattggaaaaatgatgatgctacaaaagaatgtatgaacaatgaagggtggtttaaatcaggagacatgggaaaatttgatggcccttttttatatatcgtggacagaattaaagatatggtaattagaggtggtgaaaatattgcatgccctgaagttgaaaatgctatatatgaacacccagatgttcttgaggcatcagtttttggaattcctgatgaaagactgggagaaattttatgctcagcagtagtcttaagagaaggatctaatcttaataaagatgatttaggaaagtttttatctgacaaattggctgcatttaaaattccagctctagttaaattcatggattcaaatcttcctcttgtagcatctgggaaatttgacaagccagctctaagagaaatctttaataaagattaaa

SEQ ID NO: 300442 - DNA, 1681 bp, Unknown
  Bacterial polypeptide expressing nucleotide sequence isolated from the Sargasso Sea
tatgaatgattctaataaattatttaacgaaataaccaacgaacttactcaaaaaggtcaaatttttgagacaagagaatataaaaataattttggaataattactaatgaatatgcctcgttccctgatagtttaagaaaatactttgactttgctcttatgcatggagataaagagtttctggtgtttgaggaagagagattcacgtttgctgaagcttttaagattgcagcaaaatttggcaatgctttaataaatgctggcattaaaaaaggagataaagtttctatttgtatgcaaaataatcctgagtttatgtttgcttacatgggaattgttggtattggtgcggtttgcgttccgctaaattcatggtgggttcctaatgaggtgatttacggcatagaacattcacaatctaaacttcttcttgcagatcaaaaaagattacaaggcctagaatctataaatattactaaaattatatctagctatacgcctgacgaaaattttacagactttaaagaatttattaaaaatgaaagtgatgaatggccagaggtagaaatttctagagatgatgatgcaaccatatattacacctcaggatctacgggtaggccaaaaggtgtcctttcaactcaaagaggacttttatcttctatgtttagttgggcttttatggcttcggttcttagtgaaagagaaaaaagattaggtaaggacagtacttcattagcaagcggtgattcatcaattttattatgtgtaccattgtttcacgcaacaggcagtcacgttgctttcttgttatctattcttgtgggtagaaaagttgtaatgatgaagaaatgggatacaggcgaagctctcaagctaatcgataacgaaaaaattacagacataacaggtgttccaacccagacatgggaattactaaatcatccagatagagatagttatgacttatcatccttaagaacgcttggtggtgggggtggtccaagacctgctgaacatgtgaaagcacttgataaaaactttaaaggtcgtcctggaattggatatggcttaacagaaactaatgctcttggaacaatgggtgctggcgatgaatacataaacaatccttcatccgcaggaagagtagttccgcctttaactgaaattaaaatcatcgatgaaaactggcaagagttacctgaaggtaaaattggagaagttgcaatcagatctcagtcgaacatgaaaggatattggagaaatgatgatgcaactgctgagtgcatcaattcagagggttggtttaaatcgggtgatttaggtaagtttgatggcccatttttatatattcttgacaggttaaaggatatggtaatccgaggtggtgaaaatatagcatgtcctgaagttgaaggtgcaatctatgaacatccagatgtacttgaggcaagtgtttttggcatacctgatgaaaggttaggtgaaattctatgtagttcaatttgtctcagggaaggatcaaaattatctgccgaatcattaaatgaatttttatctgataaattggccgctttcaaaatacctgtaaaaataaaatttacttataatcctttaccaaaaattgcttcaggtaaatttgataaaccaactatgagacaaaattttattgaagaataa

SEQ ID NO: 300443 - DNA, 1684 bp, Unknown
  Bacterial polypeptide expressing nucleotide sequence isolated from the Sargasso Sea
atgactgattcaaaccaactatttaatgaaatcgtatctgaattaatcaaacctggcgaaatttttgaaacacgagaaattcaggatgaaaaaggtaattctttcagcgaatatgtaacttttcctgataatttgaaaggatattttgactttggtttacttcatgcagataaagattttttagtttatgagtctgagagatatacttttaaggaaacaatctcaaaggcatctcaagttggaaacgctcttattgaagagggtattcaaaaaggggacagagttgcaatatgtatgcaaaacaatccagagtttatttttgcatatatgggcattgttggaataggcgcagtttgtgttccattaaattcttggtgggttcctgatgaaataatttacgcaatggagcattgcgatgcaaaagttttatttggagatcaaaaaaggttaaaaggacttgaatctctaacaaatgtaaaaaaaattataaccacctacacgcctgatgatagcttcgaatcatttgatgatttcacaaaaaatcactctgaagaatggcccgatattgatattaatagagatgaccatgcaacaatttactatacttctggatcaaccgggaagccaaaaggagtcttatcatcacaacgtggagtcatatcttcaatgtttagttgggcatttatttcaactgttttaagtcaaagagaagcaagacttggtaaagacgctactccactggcaagttcagaatcttcaattctattatgtgttcctttatttcatgccactggaagtcatgttgcatttctaatgtctattttggttgggagaaaggttgttatgatgaaaaaatgggatgctggtgatgcaattaaactaattagtgaagaaaaagtatcggatataactggagttcccacgcaaacttgggagttattgaatcatcctgatagagataaatatgatctttcctctttgaaagtattaggtggaggaggtggtccaaggccagcagagcatgtaaaacttttagatgagaattttaaaggaaggcctggcataggatacggattaacagaaacaaatgcattaggaactcttgcaagcggcgatgaatatattcaaaatccatcttctgctggcagagttgttccaccattaacagaaataaaaataattgattccaactggaatgaattacctgaaggtgaaatcggtgaagttgcaattaaatctcaatcaaatatgttgggatattggaaaaatgaggatgcgacaaaagaatgtatgaacaatgaaggatggtttaaatcaggagatatgggcaaatttgatggtccttttttatatatcgtggacagaattaaagatatggtaattagaggtggtgaaaatattgcatgccctgaagttgaaaatgctatatatgaacatccagatgttcttgaagcatcagtttttggaattcctgatgaaagactgggagaaattttatgctcagcagtagtcttaagagaaggatctaatctaaataaagatgatttagtaaagtttttatctgacaaattggcggcatttaaaattccagctctaattaaattcatggactcaaatcttcctcttgtagcatctgggaaatttgacaagccagctctaagagaaatttttactcaagagtaaa

SEQ ID NO: 300444 - DNA, 679 bp, Unknown
  Bacterial polypeptide expressing nucleotide sequence isolated from the Sargasso Sea
tcatggcggatacattaagagaatgagtgcttcgatacaggctctaactaataacaaagcaagatttacagcaaagttatgtcaaatggtaaaacttatcattgatggtaaggaattaaaaatgtcaaaaagatctggtgacttcattaccttaagtgatttagtgaaagaagttggcagtgatagtataagatttatgatgatgtacagaaaaaatgaagcacccttagagtttgattttaaaaaagtaactgaacagtctaaagaaaatccagttttttatgtgcagtatgctcatgcaagaatttcatctgtattaaacaatcttcattctcaaaatattaaattaaatttagagaattttagtgaatgtaatttttctgaacttaatgatctttctgaaatatcccttttaaaaaaaatcctggattatagtaatatcatcaatacgtcagtttctttatttgagccccatcgaattgcatattacttgtatgaattagcatcagaatttcactctttatggagtcagggaaaagtagataacagtaagaaatttatagatgccgataatataccaaggacttatgctcgaatggcactattgattgctactcagagaacaataaaatccggacttgatattcttggagtttcctcgccagatgaaatgaaataa

SEQ ID NO: 300445 - DNA, 691 bp, Unknown
  Bacterial polypeptide expressing nucleotide sequence isolated from the Sargasso Sea
tgaaaaatcatcactagcgaaacttattgaactaacttcaaaaattgaaaatattgagagaataagatatacgactagccatccatatgaatttaaagatgatctcgtagatatttacgataaagttcctgaattagtaagccatgttcatttacctgttcaaagcggctcagatagaatattaaaattaatgagaagaagatatacgatagacagctatttaagtttagttgataaaattaagaaagttagatctgacatgagcttttcatctgattttattgttggatttccaggagaaacagcaaatgatttcgagttaacaatgaatttaatcaatgaagtccagtttgatgaatcatatagttttatatatagcccacgcccaaacacaactgcctctgatatggacgatgatgtaacaaaagatgaaaaaaaagaaagattagatattttacaaaatagattaaatcaactttcttttgggtatagcagaaaaaaagtggacacacttcaaacttgtctagtgtatggccaatcaaaaagggaccctggccaacttcaggctagaacaatttgtaacagaattgttaatttttcatcatgtgatattgatttaattggccaaatggttaatattcaaattaatgaagcattaccaaatagtcttagaggcacattaagtaattaa

SEQ ID NO: 300446 - DNA, 823 bp, Unknown
  Bacterial polypeptide expressing nucleotide sequence isolated from the Sargasso Sea
catgacgatggaagaaaaaataaaaggtttgatcattaatgcattggctgaaagccaaggtattaatgaggatgaagtgaatgagatcggcctcgagctttctagaaacaccaacaatgatcacggagacttttccagcaacattgctctcaagttggccagcaagtttaagagtcctccaatgaaacttgctgaggaaattattggctctcttgaaacccctgctgaactagagctggcagagtgtgttaagcctgggtttataaacttctacctttctgctgaaaaaaaacacagcgttctcgaaaccatattgaaaaatggcaaggattttggctcatcttgtgctccagaaaaaatgagggttcttctagaatttgtctcagcaaatcctactgggccacttcatgtaggacatggtcgacatgctgcctttggtgattcgctggcgcgccttctaaaaaaagcgggtcatgatgtttttactgaatattatctgaacgatgcgggcaggcagatagatatcctttgtttaagtgttatcttggagatacttcgtgctgaagggcttgaattaaagaatatcaatggcctttacaaaggcatatacatcaaagaaatttctcaagcattaataaaagaaggtttcgagataaataaaaaagtcttgattccaaagctcgacggatcagctgatgaaattgttgatgcgcttatattagaaataaaaaatgttataggatccgagctttttcaaaaaatttcagacaaaaccgtatctcgaatgacaaaattgcttaaagacgacctttcagactttaga

SEQ ID NO: 300447 - DNA, 883 bp, Unknown
  Bacterial polypeptide expressing nucleotide sequence isolated from the Sargasso Sea
atgtctaaaaatggtaaaataattttaccagataaattagatggtattaatacagaaattcccccagcaaaatttaatagtgatatctcaacaaatgttgcaatgtttttatcaaaaataaataaaaaatccccagcagatttggctgaaattttagctaaagttataaaaaaaagtgacaatttaatagaaaatgtttccgtagttaatcctggttttattaatatcaagtttaaaccaattttttggacaaattttattaaagaaattacacaaaaatctagaacttttggaattaacgataaagaaaaaaagaaaaattatttaatagaatttgtatctgccaatcctacagggccacttcatgttggtcattgtagaggtgctattttaggtgatgttattgctaatgttttattattcaataatcataaggttactagagaatattatgtaaatgattatggcaaccaaataataaattttactaaatcagtttattttagaattagagaaattatattcaaggaaccgtttcccagtgataacgaagatttataccctggtgattatttaattgattttgcaaaaaatattatcaattcaaatgaaaaaattgattttataaattttgaaaatatttctgaaaaattaactgcattatctatcaatgaagcattaaagttgattaaaaaaaaccttaatagtctaggcataaaccatgataattttgttagtgaaaaaaaattaattttaaatcaagaagttgaaaaagttattgattatcttaaaaaaaataagtttgtatataaaggtaaaatcaaagctccagcaggtgaaaataatgataaattggatagaaagagaacaattgctttttaaa

SEQ ID NO: 300448 - DNA, 433 bp, Unknown
  Bacterial polypeptide expressing nucleotide sequence isolated from the Sargasso Sea
aatgaatatatttgaagaatataaaaataagatattaataattttaaaaaaagctcataaagataaattattaaatcttccagataatctaaacagtattaatgtcgattctacaccaccaaaaattgattttgatatatccacaaatgtttcaatggttctttcaaaaccaaacaataaacccccaaatgaattagctcaaattttaattaagctattaaaaaacgaggacaaaagtattgatgaaataacttttgctgagccaggattcattaatattaaattcagtaacgattattggagtaattttacaaacaaattaattaattcaccaaataactatggcgcatcaagtaaaacaaaaaaaaaatatttagtagaatttgtttctgccaatccaacaggtcctttacacgttggtcactgcagaggt

SEQ ID NO: 300449 - DNA, 892 bp, Unknown
  Bacterial polypeptide expressing nucleotide sequence isolated from the Sargasso Sea
ctcagatgagattgaaagattagagtttgcaaaaccaggctttatatatttctatctttcgtctgacaaaaaaaatagggttcttgaagagataatgagcaaaggaagagactttgggtcgtcttgtgtttcagaaaagaagaaggttcttttagaatttgtctcagcaaatccaactgggcctcttcatgtagggcatggtcgccatgctgcttttggtgattcgttggcaagattacttagaaagtctggccatgaggtctttacagaatactatctcaatgatgctggaaggcaaatagacatcctatgtgtgagcgtcatgtttgagcttcttttgctagaaggacagaagcttggccaacttggtggtctttataaaggttcatatattaaaaagattgctggagcgcttcgtgatgaaggtatcgtgattaataaaaaagtatcgatcccaaaagcaagtggatcagatgataaaattatcgatgctctcattttggaaatgaaggatgttgttggaaatcagatttttcagatggtttcagacaagactgtgctgcagatgactaaactgcttaaagatgatctttcagactttagggtcaaacaagatggtttttattcagaaaaatcgctcttttctgaaggcaggattgaagaggcttgcgggataattaagaaaaatcgaaatgcttatgagaaagatggtgcgctttggcttgaatcaacaaaatatggggatgacaaggatcgtgtggtgatcagagaagatgggagatctacttactttgcatctgatattgcttaccaccatcacaagaagcttagaggctttgatctcttaatcaatgttctgggttcagatcaccacggctatgtttcaaggctt

SEQ ID NO: 300450 - DNA, 436 bp, Unknown
  Bacterial polypeptide expressing nucleotide sequence isolated from the Sargasso Sea
ttgattgggcttattgataaagaaattgattcatttttactatctttagttgatactgcaaataaagataagataaaaaaaataattgataaatattctactacgataactgaaaatctgaataatggtcacattacaactaatgtttgtatggtggctgctagcattttgaaattaaatcccaacgagcttgcatctaagttagttgaaaagctaaatttattagatttattccaagctgttgaagcagccggtccaggctttattaacataacacttcacagaaaggatttcgtatcaataattcgttctattaataaagataaagaacgatatggacaaacaaatattggtaatggaaaaaaaatacaaatcgaatttgtatctgcaaacccaacaggacctttgcatgtaggtcatggtagaggagctgcct

SEQ ID NO: 300451 - DNA, 565 bp, Unknown
  Bacterial polypeptide expressing nucleotide sequence isolated from the Sargasso Sea
atgaaagaaaagatccaagagaacctaaaagggattttaggtgatttatacaacagtgctgattttgatattaaagaatttgacatcaacattcaggagaataaagaaaaagagcatggagacttagcgtcaaatatcgctctagttttagctaaacctcttggaaaaaatcccaaagaaatagcagatcagattaaagataatttttttacagatgaagatataacaaaagtcgaggtagctggacctggttttatcaatttcttcttatcaaaaaaatctcatggatctgtgcttaaagagatatctgtagaaaaggatagttatggttcatccaaatcaaataataaaaaagtattaatagagtatgtatcaagcaaccctactggtccgttacatgtaggacatggaagaggagctgtctttggatcagttctcgccaggctcttaagtgaagcagggtttaaagttgatgaagaatattacgtaaatgattttggcagacagatgaatattctagctgcgagtctgtgggtaaggtacgcacaaattttcaatactaact

SEQ ID NO: 300452 - DNA, 443 bp, Unknown
  Bacterial polypeptide expressing nucleotide sequence isolated from the Sargasso Sea
aatgaatatttttgatctatatctaattaagataaaagacattcttaaagatttgtctaaacaaaataagattattttgcctcaaaatttggaaggaattactgctgaaattccaccggtcaaattcgatagtgatatttcaacaaatgtagcaatgttcctagcaaagattaataaaaagacacctaatgatattgcagaaattttatctccaattttaagcgataatgacgagcaaattgaaaggatatcaattgaaaagcctggttttattaatattaaatttaaaccaatattttggacaaattttataaaagacgtaatcgaaaattacaaaagttttggagtaaataaagaagaaaaaaaaataaattatttaatagaatttgtatctgccaatccgactggaccattacacgtaggtcattgtcgaggtgctattt

SEQ ID NO: 300453 - DNA, 685 bp, Unknown
  Bacterial polypeptide expressing nucleotide sequence isolated from the Sargasso Sea
aatgaatatttttgaattatatttagataaaattaaatctattatcattgatttaaataaaaataatcaactagaagttcctgaaagttttaatggtatcaatgcagaaatacccccaccgaaatttgattgtgatatttcaacaaatgttgcaatggttttatcaaaaatcaataaaacttcaccattacagctagcagaaaaacttgcttctgaaattaaaaataaagacagcgaaattgaatcaatatctgtagcaaaacctggatttatcaatattaaatttaaaccatcttattggtccaattttattaaaaatatcacagataatgcagatagttttggaataaatgaaaaagagaaaaaaaataattatttggttgagtttgtttcggcaaacccaacaggtcctttacatgtcggacattgtagaggtgctattttaggcgatgttatctccaatgttttaatttttaataaacataaagttacaaaagaatattatgtaaatgattatggtaaccaaattataaattttactaaatcagtatattttagaattagagaaattcattttaaagagacatttcctgaagataatcctgatttatatcctggagattatctaattgattttgcaaaaaatataatttcaaataattcagatcttaactttgataatttt

SEQ ID NO: 300454 - DNA, 892 bp, Unknown
  Bacterial polypeptide expressing nucleotide sequence isolated from the Sargasso Sea
gagtgtgttaagcctgggtttataaacttctacctttctgctgaaaaaaaacacagcgttctcgaaacaatattgaaacacggcagggattttggctcgtcttgtgctccagaaaaaatgaggattcttcttgaatttgtctcagcaaatccaactgggccacttcatgtaggacatggtcgacatgctgcctttggtgattcgctggcacgccttttaaaaaaagcgggtcatgaggtttttactgagtattatcttaatgatgcgggcaggcagatagatatcctttgtttaagtgttatcttggagatgcttcgtgctgaagggttggaattaaagaatatcaatggcctttacaaaggcatatacatcaaagaaatttctcaagcattaatcaaagaaggtttcgagataaataaaaaagtcttgattccaaagctcgacggatcagctgatgaaattgttgatgcgcttatattagaaattaaaagtgttataggatccgagctttttcaaaaaatttcagacaaaaccgtatctcggatgacaaaactacttaaagatgacctttcagactttagagttaaccaagatggtttttattctgaaaaatctcttttttctaaaggaaaaattgaagaggcttgtgaaatcataaagaaaaacggaaatgcctatgaaaaagatggtgcgctctggcttgagtcatcaaaatatggtgatgacaaagaccgtgtggttataagagaagacggaagatctacctactttgcgtctgatattgcataccatcatgacaagaaaatgagaggttttgatcttttaatcaatgttttaggctctgatcatcatggttatgtttcgaggcttgaggcaggtctcgtctcaactg

SEQ ID NO: 300455 - DNA, 966 bp, Unknown
  Bacterial polypeptide expressing nucleotide sequence isolated from the Sargasso Sea
gttggttcgcaaggttgttgatgcggatccacaggaacttgcacacgactcaattgcagcagaactggtcgagaagtacccagatgcacggcaggaagtgcttggtgaaactgtcaaattgcacgaaggagattcagagaacaacaagctctgggagcaatttatgccggtctgtcgtgaagagattgaacggatttatagccgtttagatgttactttcgatcacacgatcggtgaaagtttctatcaaccacttctcactggagtggttgacgatctgactgcttgtgggatggcccgcgaaagccgcggggcagttggtgtcttcctcgagggttacgagtcaccacttctggttcagaaagctgatggagcgtttctctacgcgacaacagaccttgcaacgcttgcctggcgtgccgagcactggaagccagatcgaatcctttacattgttgaccaccgtcaaagccagcatttcgagcaagtgtttgcaactgcccgttcttggggttgtcgtgcgggagagcaactttctggaatggacctgatccatgtggcctttggtacagtccttggagaagatgggaaaccctttaagacgagagcaggagatactgttggtttagaagctttgcttgatgagggagttcagcgagcagcttgtgttgttggggacggagagcaggcgcggcagggaatggatgacgccaggcgacaggaagtagccgaagctgtcggaattggagcgatcaagtacgcagatttatcacaaaatagaagcacagattatgtgtttagttttgacaaaatgcttgaattaaaggggaatactgccgcgtatatgcagtatgcggtggcacgggtcgaaggcattgttactcgaggaggtgttgaccgagaacttctccgtcgtgaagttctcgatgacgcatctgtcttgggactatcagatccttttggaac

SEQ ID NO: 300456 - DNA, 593 bp, Unknown
  Bacterial polypeptide expressing nucleotide sequence isolated from the Sargasso Sea
aatgaatatttttgatcaatatttagataagataaaaaaaattctcttagatttgtctaaagaagatttaattactttgccagaaaatcttgatggaataaatactgaaattcctccagaaaaatttaattgtgatctttcaaccaatgtaggaatgattttatcaaaaataaataaaaaacctcctttagaaatagctggaactatagctgatgcactaaaaaaaaaagatccattgattaaagatatatcagtagtgaagcctggttttataaatatcaaatttaaaccaattttttggactaattttattcaggaaataataaaagatgcaaaaacatttgggaaaaataataaagaacaaaagaaaaaatatcttgtcgaattcgtatcagccaatcccactggcccattacacgttggccattgtagaggtgcaattttaggtgatgttattgctaatgttttaacatttaataatcataaggttactaaagagtattatgtaaacgactatggaaaccaaattataaattttactaaatcagtatattttagaataagagaaataaaatttaatgaaccttttccaa

SEQ ID NO: 300457 - DNA, 899 bp, Unknown
  Bacterial polypeptide expressing nucleotide sequence isolated from the Sargasso Sea
tgctgctaaacaacacagcaccttgaatagacttaatattgttatggatgtgctatacaatgagcaatcactctatgaagatggttcactagataaagtggttgcaaaacttagacagaaaaagttagcttatgataaagatggtgccgtgtggtttgctgtaaaagagttaggtggattagatgatagagtcatagtgaaatcaactggagagccaacatataggttgcctgatatcgcatatcattgcaataaaatggaacgaaaatttgatttggttatagatgttttgggggcagatcataaggattcgtttcctgatgtaatattaggtgtcaaagcgatgggttatgaggctgataggataaaaatgctcatgcatcagtttgtaaatattaagggtcaacgtatgagcaaaagatctggtaaatttatcagcttggatgacctgatcgatgaagttggtgctgatgtggtgcggttttttatgcttatgcgtgcgtctgaaagtcatctggaatttgacattgatttggctcgtgatcaatcggacaagaatccggtgtattacgtacagtatgcacatgctcgcatttgcagtattttggaaaaggcgtctatagctggatactcgttgaaggatactaaagtggatggtctagtacatccttcagaacgattgctaatgcgtaatttgctagaattatcggatacgatagatcgtgctgtaagtgaaatggcgccacattatttgaccacatatgtgagagatcttgcaagtagtttccatactttttatggtgattgtagagttttagatgatgatgatgtatcacttactattgcacgtttaaatcttattagagcagttagagtaggattgtcacacgctttaggtt

SEQ ID NO: 300458 - DNA, 816 bp, Unknown
  Bacterial polypeptide expressing nucleotide sequence isolated from the Sargasso Sea
taaaccaggttttattaatataaagtttaaacctttattttggtcaaattttatccaagaaattaccgataattcaaatacttttggaataaatcaaagtgaagaaaagtttaattatttagttgaatttgtttcagcaaatcctaccggacctttgcatgttggtcattgtcgtggagcgatacttggtgatgttatttcaaatgttctaacatttaataagcacaaagttattaaagaatattatgttaatgattatggtaatcaaataattaattttaccaaatctgtttattttagaataagagaagtgaagtttaatgaaacttttccttcagataatccagatttatacccaggagattacttaattgattttgccaaaaatattgtttcatcaaatccagatataaattttgatgattataatgatattagtgaaaaattaacctcattatcaattgagcaagctttattgttaattaaaaaaaatcttaatagtttaggcataaatcacgataattttgttagtgagaaaaacttagtattaaatgacgaagttaagaaagttataaaatttttagaagacaataactttgtatacaaaggaaaaattaaagctcctgctggtgaggataataaaaactgggttgaaagagaacagttattatttaaatcgacagattttggagatgataaagatagagcacttcaaaaatcagacggtaattggacttattttgctagtgatgttgcgtatcataagaataaagttgatagaaaatttgattatttgataaatatattgggtgccga

SEQ ID NO: 300459 - DNA, 474 bp, Unknown
  Bacterial polypeptide expressing nucleotide sequence isolated from the Sargasso Sea
ttaggtttatgatgctaaatagaagtaacgatgtggagttagattttgattttgataaagttaaagagaaaaccaaagataatcctgtttactatgtacaatatgcttatgcaagaattaattctattactagaacacttaaaaaaagtttgaatgataatattttaataacaaataaatctttttcacctaacgagtacgaagaaaaaattattagaaaagtttttgaatggccaaaaattatagagtccgcttcctttaaatttgaaccacacaaaatccctttttatttatatgagctatcgactttatttcattcctattggagcaaaggtaatgaagatgatagatttaaatttattgaaaatggtaaagtgaaaagagaagaaattttaatatttctatatttagtatcaatagtaattagaaatgggatgaaaatattaggtgtttcacttcctgaaaaaatgtaat

SEQ ID NO: 300460 - DNA, 904 bp, Unknown
  Bacterial polypeptide expressing nucleotide sequence isolated from the Sargasso Sea
aatttttcagagtttgaaaaaattgatgtagcaaatccaggatttataaacattacctttaaaattaatttttggaataaacatattatgaaaatacttaaatcaaatactaattttggagcaaacaaaattagtaaaaaaaaatataatattgagtttgtttcagctaatcctacaggtccacttcatgttggtcattgtagaggggcaattttaggagacacaatatcaaatttacttaaatttaatgggcacaaagttactaaagaatactatgtaaatgattctggcaaccaaatacaaatttttgtttcttcagtttataatagaattttggaaattcttgaagaaaaagaatttccttataataaaaatttgtaccctggcgactacataattgatatagccaaaaatataattaaaaaaaaaaatattaaaagtttttctaattatgaaaaaatttataaaaaattagaaaaagaatctttaaatcaatctataaaaattattaaaaataatttatataaattaggagtcactcatgataaatttgtttatgaatcagatttaattaataaaaagttagttttaaaaactattaataagttaaaaaaagataaatatgtctatacaggtaaattgctaccccctaaaggagaggaaaatcaaaattggaaatctagagatcaactgctattcaattcttctaagtttggagatgatgttgacagagctttacaaaaagaagataaaacctggacatactttgctagcgatattgcttatcatgcgcataaaataaaaggtaaatacaatgtattggtaaatgtacttggggccgatcatgcaggctacattaaacgaataaaatctgctgtaagcgcaatttcaaataataaataaa

SEQ ID NO: 300461 - DNA, 946 bp, Unknown
  Bacterial polypeptide expressing nucleotide sequence isolated from the Sargasso Sea
gattacggctcttcagcattgggtgctgggaaaaaaataaatatagaatatgtgtctgcaaaccctacaggcccattacacgctgcccatgcccgcggagcagtcgtaggtgacgctcttgcacgattacttatgaaaaccggttacgaagtgtgtaaagagtactatattaacgatgcgggaagtcaggttgatattttgggtcagtccacttttttgcgttatcaagagattttaggagatgattctattgtaatacctgaagggcattacccgggcgcctatttaaaagacatagccgcggaaatagtggaaaaagatggaaataagtggttatcaaagagtgtcgaagaaagattagatgcctttagaaaatattcagttcaaatgatgatggagaaagttaaagctgacttaaatagcctagggattgaaatggatatcttttcctctgaacagtcattaattcagtctggaggagttgatagcgtattaaacattctcgaggacagagaactactttatgaaggtgtcttagatccacctaaagggaaacaatccgaaaactggatatcaagaccgcaaagattattcaaatcgactttatttggcgatgatgtagacagagcgatacaaaagacagatggaagttggacttattttgcatcggatatagcatatcattacgataaatataagcgcggttttaccgaaatgatagatatctggggcgcagatcatggggggtatgttaagcggatgcagtcagcagttaatgctgtgacctttgatgaagcaaaactggatgtaaaaatctgtcaaatagtccacatgcttagagatggaaaaccagtaaggatgtcaaaaagatctggagattttataacgattgaagatgttgtcacggccgttggaaaaaggatgttatccgggtttattatgctca

SEQ ID NO: 300462 - DNA, 903 bp, Unknown
  Bacterial polypeptide expressing nucleotide sequence isolated from the Sargasso Sea
actgcaggaaaataaagataaagaacatggtgattatgcaagcaatatagcaatgattcttgctaagaatctagctacaaacccaaagaatttagctgaacaaatatctaaagactttccattagatgatgacatcttaaaagtagaggttgctggacctggatttataaatttcttcgtttccgaagctactcatgctgaagttctaaaaaagatagattctgaaaaagttaaatacggtcatagcaaacaaaaagcagggaaagttttaatagaatatgtttctagtaatccgacaggcccattgcatgtgggtcatggaagaggtgcagtatttggatcggtcttagcaagtcttttaagagctgccggacatgaagtagatgaagaatactatgtgaatgattacggaaggcagatgaatattctaactgtaagtgtttggctaagatatctacaaacctctaatgaaaatatatccatgagcgctttgggatatcaaggagactacattaaattaatcgctgaagagctctttaaaaaaaataaagaaaaatatcagctttcagataatgaccaagataatatcctgccaatacttaaagaacagcaagatgaaaaggatatcgatactttaatttctttcatgcaatcaatattaggagaagggttttttgaaattagatcttttgctttagataacatgttagacattattaaatcagacctaatcaattttggggttgagcataatttatggttctttgaatcgtccctctacgtcgaagaaaaaggggaatctagtaaagcttataaagctatatctgacctaagttcaaatgactttgtttacgagaaagatggagcaatttggtttaaatcatctgaattaagagatgataa

SEQ ID NO: 300463 - DNA, 786 bp, Unknown
  Bacterial polypeptide expressing nucleotide sequence isolated from the Sargasso Sea
gactatccaattatagatattaatgtccaagtaccaaaaaaaattactcatgggcatctaactacaaatgtagctatgattttagctaaagacttacaaaaaagccctattgagttagcaaacaatttaattaaatacctcaaaacaaacttttctgaattttatgaagaagtaaatgttgcagggccaggattcattaatataaaaatgaataaaaaaataattctggatttaattagagagattaaaaaacaaaacgataattttggtaaaaataatcaaggtcagggtaaaaatgcaattgttgaatttgtgagtgcaaacccaacaggtcctttaactgtggctcatgggcgaggagcaatcgttggtgataccatatctagaatattagagtggaatggatactcagttgatagagaatattattttaataatgctggaaggcaaatgcgaatactaggagaatctgtgaaagctagatatctaaataattgtggtataaaaacaaaattcccagatgaaggatatcaaggagagtacattaatgatatcgctatatcatttcaacaagaatttgataataaatatatcaatgaagaaaatattgagatatttaaaaattatgcggaacagcaaatttttgatgatattaaacaaacgctaaatactcttgaaattaattttgataattattttaatgaagatgatttatataaaaataatagtattgaacaaactgtatcagatttagataaaaaaggattaatctataaaaaagataat

SEQ ID NO: 300464 - DNA, 892 bp, Unknown
  Bacterial polypeptide expressing nucleotide sequence isolated from the Sargasso Sea
tttttcacaaatttattttggcagaatcaattaagtcaattcattaagcttgacggctcgtataattacaatataaaacctaaatctatttgcattgaatttgtatcagctaatcctactggtttgatgcatattggtcatgctagaggagcagttttaggtgatactatttcttcagtattagaagaggttggtcataatataaaaagagaatattacataaatgatgccggtgaacaaataaaaaaactcaataaaactattatatttcatattgagaatattttaaaaaatactactaatgaactatttaacgatctatatccaggagaatatttagaaaatattgctaaagaaatatttaataaattttctataaaaaatttaaatgaattaaaaaaatttgaaaaaaatattattgattttgtactgaacgacataaaagaagatttagctgaacttggtataattcatgacaattttgtttctgaaaaaaacatttcttcatcagataacatcaataaacttaaaaataaattattggagtcagaattagcctattatggttttcaagaaaagccaaaaaatatttccgataaagattgggaaaaaaaagagcaactgcttttttgttctaagaaatttggtgatgactcagatagatctttgatgaagccaggtggagaaataacttattttatgtctgatttactttaccatattaataaaattgaaagaaactttgatgttttaatcaatatatggggagtggatcattttggttatgttaaacgtttacaaaatgcattatatgctctttgtaaggagaacttccttttagatattaaacttacttctttagtgaatttgataaaaaatggtggaaaaactt

SEQ ID NO: 300465 - DNA, 640 bp, Unknown
  Bacterial polypeptide expressing nucleotide sequence isolated from the Sargasso Sea
atgaatatatttacggattaccaaaaaaaaataatttcaattttaaaaaaattggagaaaaaaaatataataaaaatctccgataatataaaaggtattctagttgaacttccaccaaaaaaccaggaaggagatatatcctgtaatgctgcattagttatttctaaaatcaataataaatctcctttagatatagcaaaggaaattaaaaaatatcttttgattaatttaaaagaattagaaagtatagaagtagctggaccaggatttttaaatattaaatttaagtcttatttttggaatagagttttattaaaggtaattaatctaaataaaaaatttggatcacttaacaataaaaaaaaaaaatataatatagaatttgtgtcagcaaatcctaccggaccactacatgttggtcattgtagaggagctataataggcgatgccttggccaatttgctaatctttaacggcaataatgtaacaaaagaatattatgttaacgatcatggtggtcaaatagaaaaatttattttgtccgtgtataaaagaattttagagataaaatataataaaccatttcctttaaatgaagatttgtacccaggaaattatataaaagatatagcaattaaaa

SEQ ID NO: 300466 - DNA, 860 bp, Unknown
  Bacterial polypeptide expressing nucleotide sequence isolated from the Sargasso Sea
taccaatgtagcaatggtcctttcaaaaccgaataataaatcaccattggaactagcaaagataatagctgatattattaaaaaaaatgatgaaaatttagatgatattaaaattgaaaaaccaggatttataaatctaaaatttaaaaaaattttttggaataattttcttaaaactattattaatcaaagtaattatggatcaaatacatcaaatgtttctaaaaaatatcttgtagaatttgtttcagccaatccaactggacctcttcatgtcggtcattgtagaggagctatcttaggtgatgttatatctaacttactaatatttaataatcacaaagttacaaaagaatattatgttaatgattacggaaatcaaattatacatttcgctaaatcagtttattttagaattcgtgagatcttatttaaagaaaagtttccaattgataataaagatctttatccaggagattacttaatagatatagcaaaaaacataattgataaaaatactggtatcaaatttgataattttgaaaacatctctaatgatttaacaaaattatcagtgcaagagtcgcttaagctaattaaatttaacttaaataacctaggtatttcacatgataattttgccagtgaaacagatgttgtcttaaacaaagaagttgatcaagttgttgataaattaaagaaagataattttgtatatttaggaaaaattaaagcaccagaaggagaaagttctaaaaattggactgaaagagagcagttgctttttaaatcaacagattttggtgatgataaggatagagcattacaaaaatcagacaaatcatggacatactttgcta

SEQ ID NO: 300467 - DNA, 523 bp, Unknown
  Bacterial polypeptide expressing nucleotide sequence isolated from the Sargasso Sea
aatgaatatttttgatcaatatttagaaaaaattaaaaaaattatatttgatctttccaaaaacggtaatttgatattgcctgataagttagatgggataactgtcgaaactcccccagctaagtttaatagcgatatctctacaaatgttgccatgattttatcaaaaataaataaaaaatcccctactgatattgctaaaaatttatctgatgtcttaaaaaaaaaggatgacttaatagaagatatagaaataataaatccaggttttatcaatattagatttaaaccaattttttggacaaattttattaaggatttaaataataattcagaaacttttggaataaatactaaagaaagaaaaaaaaattatttagtagaatttgtttcagctaatccaacaggtccattgcatgtaggtcattgcaggggagcaatcttaggtgatgtgatagctaatgttttattatttaaccaacataaagttacaaaagaatattatgtaaatgattatggtaat

SEQ ID NO: 300468 - DNA, 829 bp, Unknown
  Bacterial polypeptide expressing nucleotide sequence isolated from the Sargasso Sea
cttgataaataaagttaataaagaaataaaattatttataagctctattgatgggattgacaaagattctgttggcgaaatttgtgaaaagtttaagacttctatatccgataatttaaaaaatggtcacattacaaccaatgtttgcatgatcgctggaagcattcttaagtgtgatccaaaaaacttggcaacagatttacataaaagaattagtaatcttaaaatatttgaaaatgtagaagtagcaggcccaggattcattaatattactttaaaaaggatagattttttatctatcttaaataagatatatgaaaaaaatgtgacttacggatcttctagtttaggtgaaagaaaaaaggttcaaatagagttcgtttcagctaatcctactgggcctcttcatgttggacacggaagaggagctgcttatggagatgcattatcaagaattctcaaaagcactggttacaaagttgagaaagaatattatgtcaatgatgctggcagacaaatagacatcctcacagctagtgtaattattagaatgcttaaaaaagagcttaacggatttttcccacaaaatgcgtataaaggtgagtatatagaatctattggggaaaaatttggagaaaaaattaaatttgatgatgcaaataatctaataaaaaatttgtctagcgatgctgaagatgaaattaatgaaataattgccaatctaaaaatgaaagatttaatgatctggaataaagttaaaaatcgttcactcgcgttcaaagttgatcttataaaagaagaccttaaaaattttaatgtttcatttgat

SEQ ID NO: 300469 - DNA, 810 bp, Unknown
  Bacterial polypeptide expressing nucleotide sequence isolated from the Sargasso Sea
gaattagcagaaaaacttgcacctgaaataaaaaatagtgataatcaaattgacaatatatccgttgttaaacctggtttcataaatataaaatttaagccatctttttggtcaaactttattaaagaaataattgataactctgaaaaatttggaattaatgaaaaagagaataaaaataattatttagttgaattcgtatcagctaaccccactggacccttgcatgtaggccattgtagaggagctattttaggcgacgttatatctaatgttttaatatttaataaacacaaggttacgaaagaatattatgtaaacgattatggtaaccagattataaattttactaaatctgtatactttagaattagagagataaaatttaacgaaacatttcctcaagataacactgatttgtatccaggagattacttaattgattttgcaaaaaatatagtttcagaaaattcagatttaaattttgatgattatgatcaaataagtgaaaagttaacagctttatctatagaacaggcgctacatttaattaaaaagaaccttaagagcttaggagttaaccacgataattttgttagtgaaaaaagtattgtttcaaacaacgaagtagagagtgtaataaaatttttagaaaagaataaatttgtatataaaggaaaaattaaagctccagctggagaagatgataaaaactgggtagaacgagaacagttactttttaaatctactgattttggtgatgataaagatagagcattgcaaaaatcagatggagcatggacctatttt

SEQ ID NO: 300470 - DNA, 859 bp, Unknown
  Bacterial polypeptide expressing nucleotide sequence isolated from the Sargasso Sea
ttggacaaattttataaaagatattattataaattcaaaaacttatggaattaataataaagaaaaaaagaaaaattatttagtagaatttgtatctgctaatcccacaggtcccttacatgtaggccattgtagaggagcaattttaggtgatgttattgctaatattttattatttaacaaacataaagttacgaaagaatattatgtaaatgattacggcaatcagattataaattttacgaaatcagtttatttcagaattagagaaattgcattcaaagaacctttccctatcaacgatgaaaatttatatccaggcgactatttaattgattttgctcaaaatattatcaataaaaataataaaattgacttcaaaaattttgaaaatatttcagaacaattgacaacattatcaatcgaggaagcattaaaattaattaaaaaaaacctaaatagccttggcattattcatgataactttgttagtgaaaaaaaattagttttaaatcaagaagtagaaaaagtcatagatatccttcataaaaacaaatttgtttacaaaggcaaaatcaaagccccaatgggcgaaaataataataattggatagaacgagaacagttgctttttaaatcaagtgattttggtgatgataaagatagagcattgcaaaaatcagatggtgcttggacttattttgctagtgatgttgcttatcataaaaataaattagatagaaattttgattatttaattaatattttgggagccgatcatgctggttatataaaaagaatttcatcttcagttgaagctttatcaaattcaaaagataagctaatttgcaaagttagc

SEQ ID NO: 300471 - DNA, 436 bp, Unknown
  Bacterial polypeptide expressing nucleotide sequence isolated from the Sargasso Sea
acttattttatcaaaaaaattaaaaatggacttagatcagatatttttagaagttaaaaagttttttgaagatagtgacgattttagagatatcgtattagcaaaatcaggttttattaattttttcgttaaagataatattttacatgattttattcgagaggttttaaaaaatagagaaaattttggaaaaaaagaatttggaaaaggagagaagattaatattgagtatgtttcagctaaccctacaggacctttacatgttggacatacaagaggagcagtttttggtgatacgctagctaatatatttgattttgtgggttttgatgtttgtagagaatattatattaatgactcaggtgagcaaataaacaatttagcaaaatctgtttatttaagatatttacaaaatttttcagataatgaaattgtg

SEQ ID NO: 300472 - DNA, 904 bp, Unknown
  Bacterial polypeptide expressing nucleotide sequence isolated from the Sargasso Sea
tcaaatatagcaatgattgggtgtaaaattcttaaaacttctccgatgcatcttgctgatgagtttgctatttatttaaaaaaagaagataaaattcaaaaaattgaaattttaaaacctggttttataaactttttctttcatgaatcatattggcaaaaccaattaaaagagtatttaaatataaaccaaaaatttgattataaaattaaaagtaaaaaaatttgccttgaatatgtttccgccaatccaacaggattaatgcacatcggtcatgcaagaggtgctgtgttaggtgatacactatcttctatcttaaaagaggtgggtcatgatgttactgatgaatattatataaatgatgctggggaacaaataaataaattattacgtacagttaattttcatttgtcgaataactttgaatcaagtagtagttttccagactcactatatcctggtgattatttaaaaaatgtagctaaagtgatacataaagaaaataaaaaaaacattttagaacaaagtaatttaaacaaaaaggttattgattatattttgaacgatataaaagaagatttaaaaactttaaaagtaaatcataaaaactttatttcagaaaaaaaattatcttcaaaagattgtgtagataaattaaaaaaaaaattactagatatgaagatcgcttattatggttttcaagaaaaacctaaaaatattgataatgataaatgggaaaaaaaaaaacagcttcttttttgttcaaaaaaatttggagatgattctgaccgagctttgatcaaaccaaacggaagtttgacatattttatgtcagatattttataccatcaaaataaagttgagagaaattttgatactttaataaatatttggggagtagatc

SEQ ID NO: 300473 - DNA, 163 bp, Unknown
  Bacterial polypeptide expressing nucleotide sequence isolated from the Sargasso Sea
ttgaatcagtcacatgactatggatcatcaaacaaagataagaaaaaatatttggttgaatttgtttcagctaaccctactggtcctttacatgttgggcactgcagaggtgccattttaggagacgttatatcaaatttattaaagtttaataaaaatgtag

SEQ ID NO: 300474 - DNA, 730 bp, Unknown
  Bacterial polypeptide expressing nucleotide sequence isolated from the Sargasso Sea
gaaccaagggtgctagttaaatcagatggtacttatgcatattttgcaacagatctagcatatcatcatatgaaactagaaaagtatgatcttgtgattgatatttggggagcagaccatcatggatatattccaagaatgaaagctggattaaaagcactagggcatgatactagcaaattagatattcatttaatacagtttgccaatttatttagagatggtgaaaaaatatctatgtctactcgtaaaggcgagtatgttgaaataaatgaattgaatgatcaaataggaaaagatgcaatcaactttttttatctgactaaaaacaaagatcaacacttagactttgatttagatgtcgcaattaaacaaaataagaataatcctgtttattatattcaatatgctcatgccagaattgaaaagattcttaatgaggtagatgattataaaaataaaaaatatgattttagcagtttaaatcatgaattagaaaaagaactaatttctacactcattaaatttgaggaagtttctaataaaacaataatggatcttcaacctcagctaatgacacattacttacaaaagctagctcaatgtttccatagttattatgcgaatattaaaattcttaatgatggcaaggctgattatagcaaggttcatttaatagcagctgttcaaaaggtaattaagtgtgggcgtagatttattaaatattaat

SEQ ID NO: 300475 - DNA, 718 bp, Unknown
  Bacterial polypeptide expressing nucleotide sequence isolated from the Sargasso Sea
aatgaatatatttgaaatatataaagaaaatataattaaaattataaaaaattttaatactaaaaatattcttaaacttccagagaatttaaataatattaatgttgatgttccaccagtaaaatttgtgtgcgatatttcaacaaatgtagcaatggtaatttcaaaaataaatgaaaaaaatccagaggaagttgcaaaattaattataaaagaactttacaaacaaaaagatattgaaaatataacttttgagaaacctggattcataaatattaaatttaaaaaaatattttggtctaattttttactagatgttcataataaccacaaaacgtatggtattaataataaaggtgtgaaaaaaaactatctagtagaatttgtttctgccaatcccacaggtcctcttcatgttggtcattgtagaggagcaatattgggagatgttttatcaaatctactaatttacaataataataatgtgactaaagaatactatgtaaatgattttggtggtcaaattaataattttactaaatcaatatttttaagaattagagaaattttatttaaagaaatttttcctaacgacgataaagatctttacccgggtgattatcttattgatatagcaaaaaatataattcaaaataataaaaatcttaaatttgataactttgaaaatatttcagatgaacttacaaaaatatcagtt

SEQ ID NO: 300476 - DNA, 445 bp, Unknown
  Bacterial polypeptide expressing nucleotide sequence isolated from the Sargasso Sea
aatgaatatattcgtagagtatcaacaaaaaatattaaaaagtcttaatggtttgcaaaaagctaaaaaaattaagttaccattaaaatttaagaatattacagtcgaaatatcaccgaaaaatcaaaaagctgatatctcatgtaacgctgcaatggttttatcaaagtataataataccaatcctgttaaattagctgaaattataaaaaaaaatttattaattacctttaaagagtttaaaaagatagaaatttctggtccaggttttataaatatatcattccaaactaccttctggaaaaattatctttctaaagttatttctttaaattcgaaatttggttcaaatagaattaaaaataaaaaatataatgtagaatttgtttccgccaacccaaccggacctttacatgttggtcattgtaggggagctattttagga

SEQ ID NO: 300477 - DNA, 649 bp, Unknown
  Bacterial polypeptide expressing nucleotide sequence isolated from the Sargasso Sea
caaagattcatttggtagttctgctgtaggtaagaaaaataaggtgcaaatagaatttgtgtctgccaatcctactggtcctcttcatgttggtcatggaagaggagctgcctatggcgatgcaattggtagaattcttgaatcaacaggctcaattgttgaaaaagaatactatgttaacgatgctggaagacaaatcgatattttgactgcaagcgttatattaagattaataaaaaatgatacaagtaattattttccagctaatggatataaaggtgaatacattgatgaaattggaaaaaaattagataagaaagtaaaaatacaagacttcaagtcactttcaatcaaatcctatgaggatcctgaagaagaaatagatagtattattcatgaattggaaaaattaaataataattcatggaatctcataaaaaatttctcattaaaagaaattgttaaatctattgaggatgatttaaaagcatttaatgtgaattttgataactggttttatgaatcatcgcttggcgagattgatgatgactcatctgatatagcatcttcagtaaataaactaaaaaaagatggtcatgcttatgagaaagataaggccatatggctcaatacagatgtaaagtggtga

SEQ ID NO: 300478 - DNA, 676 bp, Unknown
  Bacterial polypeptide expressing nucleotide sequence isolated from the Sargasso Sea
aatatcgaatatgtctctgctaatcctacgggcccgcttcatgctggtcacgcaagaggtgctgtatttggagatgctcttgcatctcttttgactgaggttgggttttcagttaccagggagtactatattaatgatgcaggaaatcaaattgaaaaattagtagagtcttctttgttaaggtataatgaactattaacaaataagtcagttgatatcccagagggtctttatccaggtgaatatctaaaagatgtaggtaaaatactttttgaaaagtatggagataagttagaattaggtgataaagaaaaagtttttgaaaaagttagatctgtttctttggaagttataatgggaatgattaaaaaggatcttcttaaattaggaatagaaatggatgtttttaccagcgaaaaagaaattatttcaggacatttattaactgaaatattaaaaattcttgaaagtaaaaatcttatttttaatggcgttttagatccacctaaaggtactgaccctgaaaattgggaaaaaagaaaacaattactatttaaatcatctcagtatggtgatgattcagatagggctcttaaaaaatcagacggaacatggacttattttgcaactgacatggcatatcatttagataaaatgaatagaaccaaaggtaatt

SEQ ID NO: 300479 - DNA, 667 bp, Unknown
  Bacterial polypeptide expressing nucleotide sequence isolated from the Sargasso Sea
gttgaggcgcttacagacggcgttgggggtgttacggtagctctgtgccagatggtgcgattattcgatcagggtgagcccatgaagatgtcaaaacgagcgggaaatttcgtaactgttcgggatctaattgaagctatggataagagggtgggtgaggggcaagggaaagacgtgatccgcttcattatgttgactaggaaaaatgatgctccgctagactttgattttgcaagggtatcggagcaatctcgggacaaccctgtcttttatgtccaatatgcacatgcacgcatttgctctgttttgaggcgtgcccaagaaattaagattgagatggtcccaactagcatcgatggcacgggctatgtttttaaaggtgctgagttggaacttttgcggatgcttgccgactggcctagaattgttgagcttgcctcagccgctagggaaccccatcgggttgtcttttatctaaacgagctcgcttctgaattccatagtttgtggaacaagggcaatagtagttctgatgcgcgcttcattgtggaggaagattgggaagcgaccaatgctcggttaacacttcttagtggagttaaagtaatactagttagcggccttcagggtattgttggggtgttaccccaggcagaaatgcgctgaa

SEQ ID NO: 300480 - DNA, 532 bp, Unknown
  Bacterial polypeptide expressing nucleotide sequence isolated from the Sargasso Sea
aatgaatatttttgaattatatttagataagattaaatctataattgttgatttaaataaaaaaaatcaactagaaattcctgaaagttttaatggtattaatgcagaaatacctccaccaaaatttgattgtgacatttcaacgaatgttgcgatggttttgtcaaaaataaataaaacttctccactagagcttgcagaaaaacttgctcctgaaattaaaaataaagacagccaaattgaaactatatctgtagctaaaccaggatttattaatattaaatttaaaccatcctattggtcaaattttatcaaaaatattacagataatgcagatagttttggaataaatgaaaaagagaaaaaaaataattatttagtagagtttgtttcagcaaacccaacaggccctttacatgtaggacattgtagaggtgctattctaggagatgttatttctaatgttttaatttttaataaacaccaagttacaaaagaatactatgtaaatgactatggtaaccaaatataa

SEQ ID NO: 300481 - DNA, 745 bp, Unknown
  Bacterial polypeptide expressing nucleotide sequence isolated from the Sargasso Sea
cttgattgatgaaattaataaagaaatagaaatgtttctatcttcaattataaataataagaagaatattgattctattatggaaaaatgtactacttctataacagatgatcttaacaagggtcatttaactactaatgtatgtatggtcacggcaagcatactaaagattaatccaaaaaaattagccgaggaacttaaaacaagattacaaaaaattaacaaatttgataacgttgaagttgcaggaccaggatttataaacatctcactaaagagagagaattttgcatcaataattgaatatattaataaaaataaggattcattcggcagttctgacattggtaaaaaaaataaggtacaaattgaatttgtttccgcaaatcccaccggccctcttcatgttggccatggaagaggagctgcctatggtgatgcaattggtagaattcttgaatcaacaggctcaatagttgaaaaagaatactatgttaacgatgctggaagacaaatcgatattctgacagcaagcgttatattaagattgataaaaaatgatattaataattactttccagccaatggatataaaggcgagtacattgacgaaattggaaaaaaattagacaagaaattaaaaatagatgacttcaagtcaatttcaatcaaatcctgtaaggatccagaagaagaaatagataatatcattcttgaattagaagaattaaataataattcatgg

SEQ ID NO: 300482 - DNA, 601 bp, Unknown
  Bacterial polypeptide expressing nucleotide sequence isolated from the Sargasso Sea
aatgaatatttataatttataccaaaaaaaaatattgagtattttaaaatcagcgaataaatctgatattattaaattacctgaaaaattagatggaataaatgtagaaattcctccaccaaaatttaattgtgatatctcaacaaatgtagcaatgatattagctaagactaataataaatctccaacagatatggcaaatcaaattttagaacttattaaaaaacaggatgaagaaatagctttaatagaagctgtcaagcctggatttataaacattaagtttaaaaatactttctggaattcttttttaaaagaattaattaagtcaggagaaaattttggtaagcccattaatattaaaaaaaataaatatcttattgagtttgtttcagctaatccaactggacccttgcatgtaggtcattgtcgaggagctattttaggagatgttttgtcaaatttactatcatttcacggtcatagtgttgacagagaatactatgtaaatgatcatggaaatcaaatattacattttagtaaatctgtttttttgagaataagggagatattaaataatgaacctttcctcaaaacgaca

SEQ ID NO: 300483 - DNA, 793 bp, Unknown
  Bacterial polypeptide expressing nucleotide sequence isolated from the Sargasso Sea
tatgaaaaaaatgatgcgttgtggctgaaatcaactgtgcatggtgatgataaagacagggtgctcgttagagaaaatggaaagggaacatatctagcctctgatgttgcttatcacaaagataagctcgatagaggttttgatgaaatcataaatgtttggggtgctgatcatcatggctatatcaagagaattgagagtgcaatcgaatcaattggatactcaaaagataaactagttgtccagcttgtccagtttgcaaaccttatcgaaaacggaaaaaaattaaaaatgtccactaggtcaggtgaattttatcaactttcagatttaattactgcaatagggtctggtgcagcgagattttattatttatcaaagcaggctgaccagcattttgattttgatatcactcttgccaagtcaaaaactaaagaaaatctcttttactatattcagtatgctcacgcacgtatatgttcactcacaaaaaaatataatcaaggagataatgaagaattaagtcaattttcagatgaaaatttctcaaaatgtgatgatctcatactgaaagttagtaaatttaatgaaattattgaggctgctgcccaaaaatatcagccacatttaatcatcttttttttaagagacgttgctcaaacctttcacaaattttataacgataataatattcttgattcagacaaagatgaaagagaaaacattatgttatgcatggtgaatgtaaggcatgtcattgcaaaatgtttgggtttgcttggaattgagccga

SEQ ID NO: 300484 - DNA, 808 bp, Unknown
  Bacterial polypeptide expressing nucleotide sequence isolated from the Sargasso Sea
aatagagaatgatttaaaaaaatttaatgtttcatttaataactggttcagagaatcgtccttgggaaatattaatgaaaattcatcaattatttcatcgtcaataaataagctcaagaaagatggccatgcatacgaaaaagataatgcaatttggttaaatactgaatcaagcggggatgataaacacagagtattggttagggacgatggaaggcctacatactttgcctcagatgttgcatatcataaagataaaattgatagaggttttgatacgcttataaatgtttggggagcagatcatcatggttatataaaaagaattgaggcttcaatagaagcattgggttctgaaaaagaaaaaatgattgttaagttagtgcaatttgcaaatctctataaaaatggcaaaaaggttaaaatgtctacaaggtcaggagattttttcacactagaaaatttgattgatgaaattggatcagatgcatcaagattttattatctttcaaaacaagcagatcaacatttagattttgatttagaccttgcgcaatcagacaaaaaagaaaatattttttattacatccaatacgctcatgccagaatctgttcgctattagataaatacaataaaaatgcggatattaaaaatctaaatctttctagtattgaaaaaaattcctacaataaatgcgatgaattaattcacgaaatatcaaggtaccccgatgtggtaactaaagcttcaaacacattacaaccacatttaattattttttatttgagagatttatcccaactattt

SEQ ID NO: 300485 - DNA, 793 bp, Unknown
  Bacterial polypeptide expressing nucleotide sequence isolated from the Sargasso Sea
atttcaataattaaagattctattggtaaatctgtttttgaagaaattacagcttctgttgtgggtaatatgttaaaaataatcaaatcagatttaagtgattttggtgttgagtttgattattggttctcagaaaaaaatatgatcaaggattctaagattgctcttgccttaaaaaaattaaaaaaagaaaacgaattatttaagaaagatggagcaacttggttaagaacaactaattatggtgacgataaagatcgagttgtcttaagagatgacggaagaagcacttattttgcttctgatattgcttaccatgctgataaaaaggacaggggttttactaaattaattaatattcttggctcagatcatcatggctacataaaaaggctgaaaggcggtcttgcctctatgggttttaatgcaaaagatctggaggtaattctaatgcagtttgttactctttttagggggaacaagaagatacaaatgtctacaagatctggggaatttattccaatgagagagctctatgaggaagtaggtattgacgcagcaaggtttttttatgtgagtagatcatttgatcaacacctagattttgatctagaactagcaaaacaacaaaacaaccaaaatcctgtttattatattcaatatgctaatgcaagaatatctagtgtaatcaaagagatagagaaaaaaggatataaaaacaatcaaagattaggtataaaaaatattggttcccttgatggtaagcacgagtctgaactgatatctatgcttc

SEQ ID NO: 300486 - DNA, 712 bp, Unknown
  Bacterial polypeptide expressing nucleotide sequence isolated from the Sargasso Sea
ttttttacagatatgtcatatcactatgataaattccaagaaagaagattcgaaaaagtaataaatatttttggcgcagatcaccattcacatgtgaatagactaaagtctgccgtatcagcaatggatatagaagttgaaaaattaaatattttactaactcaaatagtgcattttaagaatcaagaaaaaatagaaaaattttcaaaaagatctggaaatatctattctataagagacctaatagatatagttggatctgattcaatcaggttcaattttcttaatagaactttagatagtcaacaagaatttgacttagacttagctgtaaaacaatctaatgaaaatcctgtttactacgttcaatatgcacatgcaaggctttgctcgattattaattcagcagatatgaatattcaagatgctaatttaagtttattaagtacaaaatatgaaaaaaaattaatagataatattgatttttttgaggatataatcattcattcagtagaaaatttagaaactcataatataacgcaattttctatagatctagcaaaagatttgcaaatattctatgaaaattgcagagtcttatcggaagataaagaattaacaaaatcaagattaaatttagtgctaagttgtaaaatagttttatgtaatttgctaaacatacttggcgttaatgctcctgaaaggatgtaaa

SEQ ID NO: 300487 - DNA, 901 bp, Unknown
  Bacterial polypeptide expressing nucleotide sequence isolated from the Sargasso Sea
ttgcctgaaaatttagattccattaatgtagaaattcctccatcaaaatttaattgtgatttatctacaaatgcagcaatggttcttagcaaaattaacaaaatgtcaccacagcaaattggtgaacaattgaaaattttgatgttaaaaattgacggtgtagaaaatgttacttttgtaaaacctggatttttaaatttaaatctatctaacaattattggaatttttttttaaaagatctattaaagaaccaaaatgaatacggaataaacaaatcggaatctaaaaaaaaatatttaattgaatttgtatctgctaatccaacaggacccttacatgttggtcattgtagaggtgcaatcctaggtgatgtaatttctaatttacttatttttaataaacatcatgtaactaaggagtattatgtaaatgactatggtaaccagattaattcttttactaaatcggtatttttaagaataagagaaattaaatttaatgaaaaatttccttatgataatacagaactttatccaggcgattatgtaaaagatattgctgaaaatataataaaaaaacataaaaatttagattttgaaaagtatgacaagatatctgaaaaattaacagtttttgctattaatgaatcgcttaaccttataaaaaataatttgaaaaatttagggatttatcaagataattttgttagtgaaaaatctttagttcttaacaatgaggtagagaaagtaatagataaattaaaatcaaaaaatcttttgtatagtggtttaataaaagctccagaaagaattaaatctagcgactataaggaaagagaacagctattatttaaatcaacatcttttggtgatgacaaggatagagcattacagaaatcag

SEQ ID NO: 300488 - DNA, 901 bp, Unknown
  Bacterial polypeptide expressing nucleotide sequence isolated from the Sargasso Sea
aaattaaattctaaatatggatctagtagaattaataaaaaaaaatataatatagaatttgtgtcagctaatcctactggaccgctgcacgtaggtcattgccgaggtgctgtattaggagatacactttccaacttacttagttttaatggaaacaaagtgacaaaagaatattatgtaaatgattatggcggtcaaatcgaaaattttgttttatctgtttattacagaatattagaaatcaaagaaaataaaccttttccaactgataaaaatttatatcctggagattatgttatagatattgcaaaaaaaataattaagagcaaaattataaaaaattttaataatttagaaaagataaaaactaaattatctttagagtctctaaaatattccattcaattaatttcaagtaatttaattttgctaggcgtcaaacatgataattttgtttacgaatctaaattgatcgataaaaaaatggtatcaaaaataattaaaaaattaaaaaaccaaaattacatttataagggaaaattggatgctccaaaaggagaacaaataacagattggcaaagtagaaatctattattatttaaatcaacaatttttggagatgatgttgatagacctttgcaaaaagctgatggtacatggacttattttgctggtgatatggcatatcatgctcataaaatttctagaaagtttgatgttttaataaatattcttggagctgaccatgctggatatataaaaagaattatatcagcaacaaaagcgatctctaacaataaagtaaatttaatatgtaaagtttcacaattagttaaattatttaaaaacggcgaaccttttaaaatgtcaaagagaaaaggtgattatattactgtagaag

SEQ ID NO: 300489 - DNA, 939 bp, Unknown
  Bacterial polypeptide expressing nucleotide sequence isolated from the Sargasso Sea
tatgaattttcttattttaaatggtgaggtaggtgattttgaatttaagaaacaatcatttggaattgaaatacctcaaaaatcaggttttggagatatttcatcaaatattgcaatggttttggctaaaacttttaaaacttcacctataaaattagctaaacttatccaaaatgaactcattaaaaaaaactttataaagaaagttgaggtagttaatccaggttttatcaatatttttttttataaagaattttggcataaccaattatctttaattttaaagaatggcttgaaatttaattataatgtaaagaaacaaaaagtttgtattgaatttgtatcagcaaacccaacaggtctaatgcatattggacatgctagaggagctgtgcttggagattctataagttcattattagaagaagttggttatgaaactttaagagaatattacataaacgatgctggtgaacaaataaaaaagcttataaagactatagattttcacttaattaataatcataaaaaaaatgtagaatttccagaagatttatatccaggggagtatttaagaactttatcatctagttttgctaataataaaaaagtaaaaaaaaacaaaattatagatatggttatgtcagatataaagaaggatttaaatgaattaaaggttaaacacacaaactttgtttctgaagagaataatcttaaaccaattaaaattgaaagtttaaaaagtaaattattaaaagatgaccttgcatattatggatttcaggaaaaacctaagataagtacttctgattggaaaccagaacaacagtttttatttagatcaaaaaagtttggtgatgattctgacagagcattattaaaaacaaataatgaattgacttattttatgtctgacataatttatcataatgaaaaatt

SEQ ID NO: 300490 - DNA, 445 bp, Unknown
  Bacterial polypeptide expressing nucleotide sequence isolated from the Sargasso Sea
attgaatctcaataactttaaaggtgttaccgtcgaaatacccccagatcagtttaaatttgatctatcttgtaatgtctctctagtgttaggaaaaattaatcaaattaattctaaagatctagcggttaaaattagagaaataataatccaaaatttaaaagatttcaaagatattgaaattgcagggcctggttttataaatattcagtttactaatgatgcgattattaaaaatataaataagattttaaaaaatagaaaaacttatggaaaaaagaactcgaacaaaaattataatatagaatttgtttcagcaaatcctacaggaccaatgcatgtaggccactgtagaggagctgtttatggagatgttttagctaatcttttaaagtataatggaaataacgttactagagaatattatattaatgattatgggcaa

SEQ ID NO: 300491 - DNA, 769 bp, Unknown
  Bacterial polypeptide expressing nucleotide sequence isolated from the Sargasso Sea
aatgaatatatttgaaaattatttattaaagatagaaaaaattattaagtctgcccacaaagataatttgttagagttgccagataatttatcaggcataaatgttgatatacctcctgcaaagtttactggagatatttccacgaatgttgcaatggtattatcaaaaattaataaaaaacctccacttgaacttgctaaacagatagctgacttaataaaagatagtgataacaatatcgacgaaattagcattgaaaaaccaggttttatcaatctaaaatttaaaaatgaattttggaatggtttcatattagatgtcttaaataattcatcatatggaagtagcacgagtggaagaaaaaatagttttttagtagaatttgtatctgcaaatccaactggacctttacacgtaggccactcaagaggcgctatacttggagacgtaatatctaatcttttatcctttaacggtcataaagttactaaagaatattatgtcaatgattatggaaatcaaatttctcattttacaagatcagtttatttaagaataaaagaaattctttacgatgaaattttcccgatagaagataatgaattatatcctggagactatcttatagatatagcaaaaaaaataatttcaaaaaacaaagatttagatttcaaaaattttgagtcagtttcagaaaaactaaaaaaactttcaatacaagaatctttaaaattaataaaaatcaatttggaaaatctgggtataaag

SEQ ID NO: 300492 - DNA, 451 bp, Unknown
  Bacterial polypeptide expressing nucleotide sequence isolated from the Sargasso Sea
aagtatgatgtagaattagacttcgattttgaaaaggtgaaagaaaagacaaaagaaaacccagtttattatgtacaatatgcgtatgctaggattaattcgattacaagaactcttaagaagaaattaagtgataaaattttaatagagagtaaatcatttaatcccaatgaatacgagaaaaaaatattaagaaaaatatttgagtggccgaaaataatcgagtcagcttcttataaatttgaaccacataaaattcctttttatttatatgagctttcaactcttttccactcatattggagtaaaggaaatgaagacaaaaattatagatttctagaaaatgataaggtcaaaagattagagactctagcattcatttacttgactgcaatagtaattaaaaatggaatgaatattcttggagtttctcttcctgaaaaaatgtaat

SEQ ID NO: 300493 - DNA, 496 bp, Unknown
  Bacterial polypeptide expressing nucleotide sequence isolated from the Sargasso Sea
atgaatctttattcacattatctattcaagattaaaaaaactatacaagataacaaaagaaacattaattttgattctgaaaaagtattaaatagcatagttttagaatcacctcctgataaattcaattttgatttatcatccaatgccgcattaattttatctaaaaacaacaaagaaaatccaagagatcttgctgaaaaaattaaaaaaattcttttaatcaatataaaagacttttctgaaatcgatatagccggtcctggttttttaaatttcaaacttacctttgatgcctggattaaaattatgcaaatgattcttaaaagtaaaaaaaaatttggatcaaataataaaaataaaaaatataatatagagtttgtctcggctaatcccaccggacctttacatgtaggacattgcagaggagcagtttttggagatgttttgtcaaatttattaatctttaatggcaataaagtaatcagagagtttt

SEQ ID NO: 300494 - DNA, 450 bp, Unknown
  Bacterial polypeptide expressing nucleotide sequence isolated from the Sargasso Sea
catgaaagctgaactggctgcgctcatcactgaggcgctggaaaaactcgttaccgagggcgtactggaggccataacagatcctcgaccgcagatcgatcgcccgaaggatacaagtcacggcgacctctcctgcaacattgccatggtcctggccaaacgcgcaggcttgccgccccgcgatctcgccatccgcatcatcgatgcgctgcccgacaatacgctggtggaaaccagcaacatcgcagggcccggcttcctcaattttttcatcaacgccggtcaacacacacaggtaatcaaaacgatattggagacaggtaatggctttggctgttgtgacgagggcgcaggtaggagcgcacaggtggaattcgtatcagctaaccccaccggcccgcttcatgtcgggcacggccggggagccgccatcggcgactcgctcagccg

SEQ ID NO: 300495 - DNA, 607 bp, Unknown
  Bacterial polypeptide expressing nucleotide sequence isolated from the Sargasso Sea
atgaatatttttgatcaatatttggataatattaaaaaaactttactagatctttctaaaaagggagatttggttttacctggtacacttgatggaattacagcagaaataccaccttctaaatttaatagtgacatttcaacaaatgttgcaatggttttatctaaattgaatgaaaaacctccaattgatcttgctaatgttttgtcagcagaaattaaaaaaaaggataaattgattgatgaagtatctgtagtaaaaccaggatttatcaatatcaagtttaaaccaattttttggacaaactttattaaagaagtaatccaaaattctaaatcttttggaataaataaaaaagaaaataaaaaaaattatctaattgaatttgtttctgcaaatccaactggacctttacatgttggtcattgtaggggtgcgattttaggtgatgtcatagcaaatattttattatttaataagcataaagtaactaaagaatattatgtaaacgattatggtaatcagattattaattttacaaaatctgtttattttagaattagagaaatttctttaaatgagccatttccaaatgataacgaagatt

SEQ ID NO: 300496 - DNA, 541 bp, Unknown
  Bacterial polypeptide expressing nucleotide sequence isolated from the Sargasso Sea
gatgaatatatttgattattatcacagctctttattaaaaggtcttaaagattttgaaaaaaaaggagcaattaaaatcccagaaaaaactaatagtattagtgtggaggttccacctgataagtttgatgctgatatttcaacaaacgtttgtatggttttgtcaggtattaataaaagtaaaccaaaagatatatatgaaaattatgtatcaaaacttttaagtaaagacgataatttagaaaactttgaaattgtaaatcctggttttgtaaatttaaaatttaaaaagaaattttggaactcctttttagaaaaaattgtccaattaaaagaatatggatcaaataagaatgaaaaaactagaaaatatttagttgaattcgtttcagctaatccaaccggaccattacatgtaggccactgtagaggagctgtatttggagatgtcctttcaaatttactaaaatttaacaatcataatgttacaaaagaatattacataaatgatcacggaaatcagataacaaactttactcac

SEQ ID NO: 300497 - DNA, 871 bp, Unknown
  Bacterial polypeptide expressing nucleotide sequence isolated from the Sargasso Sea
gattttattcgagaggttttaaaaaatagagaaaattttggaaaaaaagaacttggaaaaggagagaagattaacattgagtatgtttcagctaaccctacaggacctttacatgttgggcatacgaggggagcagtttttggtgatacactagctaatatatttgattttgtgggttttgatgtttgtagagaatactatattaatgactcaggcgagcaaataagaaatttagcaaaatctgtttatttaagatatttacaaaatttttcagataatgaaattgcgataccggataacctttatcctggagagtatttaattcctatagcaaaaaaaatcagtgacgagcatggagaaaaattcatagataaagatgagactgattggttagatttttttaagaaagaatcgatatctagtgtaatggatattattaaaagcgaccttaaatctcttgaaataaatcatgatgtatttatctcagaaaaagctttattggaagaaggccatgtaaataaagcatataaatacctagaggataaaaaactactttataagggcaatacaaacccacctaaaggcagcaaaaatgacgaatggagcgaaaagaaacatattctttttaagtcaaaaagttttggagatgatgaagatagggttgtaaaaaaacacgatggtcaatggacttattttatgcccgatattgcctatcatttaaataaatatgaaagagggtttattcgaatgataaatatctttggagcagatcattcaggatatatagctagaatgaaggcggctgttagagctgtaactaatgaaaaaacaaatctcgaaatcaaaacttgtcaattggttcgtttatcaa

SEQ ID NO: 300498 - DNA, 835 bp, Unknown
  Bacterial polypeptide expressing nucleotide sequence isolated from the Sargasso Sea
aatgaatatttttgaaatttacttaaataaaattaaagaattagttttgtctttaaacaaagataattcaattcaaattccaagcaatttaagttcaattaatgtagatgtacccccagaaaaatttgattgcgatatatcaacaaatgtagctatggttttggcaaaaataaatcaaaccaacccattagaattagcaaaaacaattgtaaatgagcttaaaaaaaatgacaaaaacatagaaaagatcgatatagcaaaacctggatttatcaatatcaaattcaaattaaacttttggaatggtttcctcaaagatattctttctaaccataaaaactttggcataaataaaaatgaagataaaaaaaaataccttgtagaatttgtttcagctaaccccactggacctcttcatgttggacattgtcgtggcgctattttaggagatgttatttctaatattttaaagtttaatgaacataaagttacaaaagagtattacgttaatgatcatggtaaccaaattttaaattttactaaatctgtttattatagaatattagaaattactaaaaataaaaaatttccaaaagaagataaggatttatatccaggagagtatattatagaaatagcaaaaaatattattaatgataataagaatgttgattttaataattttgataaaattacaaaaaaacttacttccttagctgtttctgaatctcttaaactaataaaaactaatttaaaaaatttaggtattactcatgacaattttcaaagcgaaactgaaatagttaaaaacaaggaagtagaaactgtaatagat

SEQ ID NO: 300499 - DNA, 832 bp, Unknown
  Bacterial polypeptide expressing nucleotide sequence isolated from the Sargasso Sea
tttgtctaaaagcgcaaaaaaaaaaccaaggcaaattgctgaaacattagcaaatcgattgactaacgtggacattattgaaaattcacaagttgctggtccgggttttctaaatcttcgaataagcattaaagcctggcaatcaaccttaaataaaattttagagttgggaagcgcctacggccggacaggattaggaaaaaatttgcgcgtcaatgttgaatttgtttcagcaaacccaacagggccgcttcatgttggacatactcgtggagccgtttttggagactctctgtcagaattattaagttttgccggatataaagttacacgtgagtattatataaatgacggtggatcccaggtggatacattagctaggtcagtttatcttcgctatctagaggctcacggtcaagatgttgctttcgaagatggaacatatccaggtgattaccttatcccagtagggcagtctcttaaagaaaaagttggtgctgattatatcgataaaccagagcattactggttggaagatgttcgtgaattttcgacaggtgctatgatgaaactgataaaggatgacctcgcctcattaggagtcgaaatggatgcttttttttcagaaaaatctttatatggtggcggtaaaattgaagaagcaattgaaagtcttaaaagtaaaaatttgatatatgaaggaattttggaccctcctaagggtaagaaagtagaggattgggagcctagagttcaaactttatttaaatctacctctcatggcgatgacgtagatcgccctattaaaaagtctgatggggcctggacgtat

SEQ ID NO: 300500 - DNA, 748 bp, Unknown
  Bacterial polypeptide expressing nucleotide sequence isolated from the Sargasso Sea
atggatctcttttacacagtaagacagcatgtgcttaatgaacttaaaagcatggttgctgctggagaacttccttctggcttagatatgaccagcgtagcagttgaacctcctcgagatccgtcgcacggtgatatggccactaacgcagctatggttttgtctaaaagtgcgaaaaaaaatccaagagaaattgctgaaacattagcaaatcgattgtctaatgtggacattattgaaaattcacaagttgctggtcctggttttctaaatcttcgaataagcattaaagcctggcaatcaatcttaaataaaattttagagttggggagcgcttatggccaaacaggattaggtaaaaatttacgcgtcaatgttgaatttgtttctgcaaacccaacagggccgcttcatgttggacatactcgtggagctgtttttggagatgctctgtcagcattattaagttttgccggatataaagtcacacgtgagtattatataaatgacggtggatctcaggtagatacattagctaggtcagtctacctgcgctatcttgaggcccatggtcaagatgttgctttcgaagatggaacgtatccgggtgattaccttatcccagtcggacagtcgcttaaagaaaaagttggttctgattatatcgataaaccagagcattactggttggaagatgttcgtgaattttcgacaagatgctatgatgaatctgataaaagaagatctc

SEQ ID NO: 300501 - DNA, 800 bp, Unknown
  Bacterial polypeptide expressing nucleotide sequence isolated from the Sargasso Sea
actttctttaaaagagtcaatgaatcttattaaaaacgatttacaaaaacttggtataaaacatgataattttttctccgaaacagatttagttaatcaagatttagttaaaaaagcagtggaaaaactacaagataaaaaatttgttgaggaaggctatctcgatccaccaaagggtgaggagtctaaaaactggaaaaaggttaaaagattaatttttaaatcatcaaaatttggtgatgacatggatagagctttacaaaaaaatgatggatcatggacttactttgctaatgatgttgcatatcactcagataagataaacagaaaatttgataatttaattaatattcttggtgcagatcatacaggttatataaaaaggattacagctgcagtttctgctctatcaaatgaaaaggtaaagcttaattgtaaagtttgtcaattagtaaaactttataaaaatggaaagcctttcaaaatgtcaaaaagagctggtgattttatttctgctcaagacttattaaatgaggttaataaagacgcaataagatttatgatgttaaacagaagcaatgatatggagcttgattttgattttgaaaaagtaaaagaaaaaacaaaagataatccagtttattatgttcaatacgcgtacgctagaattaattcaatagccagaacacttcaaaagaatttaaaagatgaaatatatattgatacaaaatcttttagttttaatgagtatgaagaaaaaatttatagaaaagtatttgagtggccgaaaagtaattgag

SEQ ID NO: 300502 - DNA, 640 bp, Unknown
  Bacterial polypeptide expressing nucleotide sequence isolated from the Sargasso Sea
aaaccgaggttttatcaatctaaaatttaaaaatgaattttggaatggttttatactcgatgtcttgaataattcatcatatggaagtagcttaagtgggaaaaaaaatagttttttagtagaatttgtttctgccaacccaactggacctttacacgtaggccattcaagaggcgctatacttggagacgtaatatctaatcttttatcttttaacggtcataaagttactaaagaatattatgtcaatgattatggaaatcaaatttctcattttacaagatctgtttatttaagaataaaagaaattttttacgatgaaactttcccgatagaagataatgaattatatcctggcgactatcttatagatatagcaaaaaatataatttcaaaaaataaagatttagatttcaaaaattttgaatcagtttcagaaaaactaaaaaaaatttcaatagaagaatctttaaagttaataaaaattaatttagaaaatcttggtataaaacatgataattttgccagtgaaaccgaagttataaataataatgaagttgacgaggtaattaaaaatttaaaagataaaaaatatatttatgagggaaaaattaaagctcccgaaggagaaaacaatgat

SEQ ID NO: 300503 - DNA, 964 bp, Unknown
  Bacterial polypeptide expressing nucleotide sequence isolated from the Sargasso Sea
ttattaggcatacaacataataattttgtttatgagtctaaattgatcaaagaaaatgaagttacaaaagtggttaaaaaattaaaaaaagaaaattatatttatgaaggaaaattagatgttcccaagggtgagcaaaccaaagactggaagataagaaatcaattattatttaaatcaactttgtttggagatgacacggacagagcgcttcaaaaagctgatggaagttggacttactttgcagcagacgtagcatatcattcatataaagtttctagaaaatttgatgtcttaataaatattcttggtgctgatcatgctggatatataaaaagaattacctcagcaaccaatgctatttctaaaaataaagtgaatttaatatgtaaagtatcccaattagttaaattatttaaaaatggtaagccttttaaaatgtcaaaaagaaaaggagactatattactgttgaagatttgatcaaagaagttggtaaagactctacaaggtttatgatgttaaatagaagcaatgatgtagagttagattttgattttgaaaaagttactgaaaaatcaaaagataatcctgttttttatgtacagtatgcatacgcccgaattaattcaattttccggttacttaaacttgatttgaaaaaaaatattaaatttggtgcaaaaaattttactcttaatcgatatgaaattgaaattttaaaaaaaatatcggaatggccaaaatgtgttgagatttcctcttcaagacttgaacctcatagaataccgttttacctttatgaacttgttactttgtttcactcatattggaacttgggtaaagataataaagaattcagatttgttcaggagcatgataacctcaacaaaccgagactagttgttttgcaagccctatctattgtgattaaaaatggaatgtttattctaggagtttctgctc

SEQ ID NO: 300504 - DNA, 952 bp, Unknown
  Bacterial polypeptide expressing nucleotide sequence isolated from the Sargasso Sea
gcaaatcaattaatcgaattaattaaaaaagatgataatgaaattgaagtaatatctgttgcaaagcctggatttattaatattaaatttaaaagttccttttggaataattttttaaaaaatattatttcaaatagtaaaagttttggaaaagacacaaaaacaaataaaaaaaaatatttactggaatttgtttctgcaaatccaactggtcctctacatgttggtcattgtagaggcgctatcttaggtgacattttgtcaaatcttttagtttttaatagtcataatgtgacaaaagaatattacgttaatgattatggaaatcagattttacatttttctaaatctgtttatttaagaataagagaaactcttaaaagtgaaccattccctaaaaatgatcctgatttatatccaggtgactatgttataagcatagctaaaaatattattcaaaataataaaaatttaaattttgataattatgaaaaaatatcccaaataattataaaagaagcagtaaaagagtcacttaaactaataaaatttaaccttaaaaatcttggtatagtccatgacagttttgtgagtgaaacagaaattgttaaaaataatgaggtagaaaaggttatagaaaaattaaagaaaaataattttgtttatgagggtaaattaaaagccccaaataatgaaaaaacaactgaatggaaggaaagaaagcaacttttattcaaatcaaccgactttggtgatgataaagatagacctttgcaaaaagcagataaatcttggacttacttcgcaagcgatgttgcttatcataataataaattagatagaaattatgatattttaataaatatattaggagctgatcacgctggttatattaaaagaattacctcagtggtcgatgccttatctggtgaaaaaaacaaacttattgtaa

SEQ ID NO: 300505 - DNA, 639 bp, Unknown
  Bacterial polypeptide expressing nucleotide sequence isolated from the Sargasso Sea
ggataaaaatatagatacaataaatgttgccaagcctggatttataaatattaaatttaataattttttttggaatgatttttctaaaaaagttttaaatttaaaagatgagtatggatcgaataccaaaggaaaaaagttaaaatatttaattgaatttgtttctgcaaacccaacaggaccattgcatgttggtcattgtagaggggcaattttaggtgatgttatatctaatatcttaattttcaacaatcataatgtttctaaagaatattatgtcaacgatcatggaaatcaaataatgaattttactaaatcagttttttttagaataagagaaattaaatatggagaaaaatttccaactaataataacgaactttatcctggagattatataattgatatcgcgaaagatataatttcaaaaaaaataaaattagaatttgatgattttgacaaaatatccaataagttaaaaaaattagcaattgaacagtcattattaatgattaaatcaaatttaaaaaatttaggaatttttcatgataattttcaaagcgaaacaaagattattgaaaataaagaagttcagttagtaatcgatcttcttaaaaagaaaaaatttgtttacgaagg

SEQ ID NO: 300506 - DNA, 473 bp, Unknown
  Bacterial polypeptide expressing nucleotide sequence isolated from the Sargasso Sea
aatggatatactagaaaaatataagaatattttaattactgagcttaataaatcttattcaaaggaagatttatcgaatatatcttttgaatttccaagagatacttctcacggtgatttttctacgaatgcggcacttgttttatcaaaaaaattaaaaatgaacttagatcagattttcctggaagttaaaaagttttttgaagatagtggtgatttcaaagatatcgtattagcaaaatcaggttttattaattttttcgttaaagataatattttacatgattttattcgagaggttttaaaaaatagagaaaattttggaaaaaaagaacttggaaaaggagagaagattaacattgagtatgtttcagctaaccctacaggacctttacatgttgggcatacgaggggagcagtttttggtgatacactagctaatatatttgattttgtgggttttgatgtttgta

SEQ ID NO: 300507 - DNA, 873 bp, Unknown
  Bacterial polypeptide expressing nucleotide sequence isolated from the Sargasso Sea
actttacctgatgagctagatggaattaatactgaaattcctcctgaaaaatttaattgtgatatttcgacaaatgttgcgatgtttttatcaaaagcaaatcaaaaatccccaacagatttagctgaaaccatagccaaagctataaaaaaaaatgatgagttaattgaagatatatcaatagctaaacctggttttattaatattaaatttaaatcaattttttggactaactttatagaagaaataataaaaaattctaaatcttttggaattaacacaaaagagaagaagaaaaattatttagttgagtttgtttctgccaatcctactggaccattacatgtaggtcattgtagaggtgctattttaggagatgtaatttctaatgttttgttatttaataaacataaagttacaaaagaatattatgttaatgactatggtaatcaaattattaactttactaaatcagtctattttagaattagagaaattatatttaaagaaccttttccttcagataatgaaaatttatatcctggtgattatttaatagactttgctcaaaatataatcaattcaaataagaaaattgattttaagaattatgaaaatatttcagaagaattaacatcactatcaattaaagaagcattaaaattaattaaaaaaaaccttagtagccttggtattaatcatgataattttattagtgaaaaagatttagttttaaataaagaagttgaaaaagttattgattatcttcaaaaaaatgactttgtgtataaaggtaagatcaaagctcctgccggcgaagatgatgataattggatagaaagagaacaattactttttaaatcaactgatttt

SEQ ID NO: 300508 - DNA, 919 bp, Unknown
  Bacterial polypeptide expressing nucleotide sequence isolated from the Sargasso Sea
ctgattgtaaaaaaaaatgataaaaatattgatcatattagtattgaaaaaccaggttttataaatttaaaatttaaaaaagaattttggaatgcttttatattagatgtgcttaataaaccttcctatggaagtaatttaaacagtaaaaaaaatagttttttagttgagtttgtttcagcaaaccctacaggaccacttcatgtaggtcattcaagaggtgcaatacttggtgacgttatttcaaatctattatcatttaatggtcacaaagttacaaaagaatactatgtaaatgactatggaaatcaaatttctcattttactaaatcggtttattatagaataaaggaaattactaataatgaaacatttccaatagataacaaagatttatatccaggtgcatatcttatcgatatagcaaaaaaaataatttcaaagaataaagatataaattttaatgaatacgacaaaatatctgaaaaattaaagaaactttcgattgaagagtctttaaaattaataaaaacaaatttagaaaatcttggaataaaacatgataattttgctagcgaaacagaggttataaaaaataaagaagttgacgaagtaattaaaaatttaaaagataaaaaatatatttatgagggaaaaattaaagcaccggagggagaaagcaaagagaactgggtagaaagagagcaattactgtttaaatctactgaatttggagatgataaagacagagccttacaaaaagaagataagtcttggacatattttgcaagcgatgttgcatatcataatactaaactaaaaagaaattttgatgtgcttgttaatatattaggagccgatcacgctggttatattaaaagaattacttctgtcgtcgaagctctttcaggagaaaaaa

SEQ ID NO: 300509 - DNA, 601 bp, Unknown
  Bacterial polypeptide expressing nucleotide sequence isolated from the Sargasso Sea
ctgaatgagatcggcctcgagctttctagaaacgccaacaatgatcacggagacttttccagcaacattgctctcaagttggccagcaagcttaagagtcctccaatgaaacttgctgaggaaattattggctctcttgaaacccccgctgaacttgaactggcagagtgtgttaagcctgggtttataaacttctacctttctgctgaaaaaaaacacagcgttctcgaaacaatattgaaacacggcagggattttggctcgtcttgtgctccagaaaaaatgagggttcttctagagtttgtttcggcaaatccaactgggccacttcatgtagggcatggtcgacatgctgcctttggtgattcgctggcgcgccttctaaaaaaagcgggtcatgaggtttttactgagtattatctgaatgatgcgggtaggcagatagatatcctttgcttaagtgttatcttggagatgcttcgtgctgaagggttggaattaaaaaatatcaatggcctttacagaggcacatacatcaaggaaattgctcaaaaagtgatagatgaaggcctcaagataaataaaaaagttcaatcccaaa

SEQ ID NO: 300510 - DNA, 585 bp, Unknown
  Bacterial polypeptide expressing nucleotide sequence isolated from the Sargasso Sea
aatgaatatatttgaggaatacttaaataaaattttaaataaaattaaattagcaagtgaagaaaagctgattttattacctgaaagtttatctggtataaatgtagatatacctcctaaaaaatttaagtgcgatctgtcaactaatgttgcaatggttttatctaaaacaaataatgaaccaccaattaaaattgctgaaaaattaaaagatattatttttaaagacgatactaatattgagaagatagaaatagcaaagcctggatttataaatattattttaaaaaaagagttttggacttcatttctcttaaatataaataatcttagtaattttggtgcagcacttaatggctctaaaaagaaacatcttattgaattcgtctctgcaaatcccactggaccattacatgtcggccattgtagaggtgctattttgggggatgttatctctaatttgttaaaatttaacaatcaagaagttgtaaaagaatattatgtaaatgatcatggtaaccaaattttacattttactagatctgtatatttgagaataaaagaaaaattagataatcaaacgtt

SEQ ID NO: 300511 - DNA, 398 bp, Unknown
  Bacterial polypeptide expressing nucleotide sequence isolated from the Sargasso Sea
attggaccaagttgagtttgagataagtgctgaagaatcaagaggtgactatgcatcaagctgctgtctcaagcttgcaaaacaattcaataaaaaacctctagagctggcagaatctatcgttgctaatttagctgatgaaaaaattgaaaatattaaaattgaaggcccaggatttattaatgtatttattactagtgaaacaaagggttcactgttaaaagatatccttcatcaaggagatgattggggtcttactaaggattattcaggaaaaatattactagagtttgtctcttcgaatccaactgggccattgcatgttggacatggaagaggcgcagttttaggtatggccattgcaaatcttttagagagaataggctatgaagttacaa

SEQ ID NO: 300512 - DNA, 457 bp, Unknown
  Bacterial polypeptide expressing nucleotide sequence isolated from the Sargasso Sea
gtttatagcaaatacttcaagaattattggattaggagctgttaagtatgcagatttaattcaaaataggattaccaattatcaatttagttttgataaaatgctttccctaaatggtaatactgccccttatttgttatatacacttgtaagaattttaggaattaaaagaaaaaataattttgtttatgactctaaagattttcagtacataaattatgaacataaatctgagtggaaacttatcagaaaattacttaagttcgatgaattcataatttctattgaaaaagacttaatgccaaatagattatgcaattatctgttcgagctatttcagacttttaatagattctatgatcaagttccaatcctcaaagaagaaaaaaatataaaaatttctaggcttaatttatgtgacctaactgcaaaaacactaaaattaagtttagagctt

SEQ ID NO: 300513 - DNA, 409 bp, Unknown
  Bacterial polypeptide expressing nucleotide sequence isolated from the Sargasso Sea
tatcaatttagttttgataaaatgctttccctaaatggtaatacggctccttatttgttatatacacttgtaagaattgcaggaattaaaagaaaaaataattttgtttatgaatctaaagattttcagtacgtaaattatgaacataaatctgagtggaaacttatcagaaaattacttaggttcgatgaagtcataatttctattgaaaaagacttaatgccaaatagattatgcaattatctgttcgagctatgtcagacttttaatagattctatgatcaagttccaatcctcaaagaagaaaaaaatataaaaatctctaggcttaatttatgtgacctaactgcaaaaacactaaaattaagcttagagcttttaggaattgaaactttagaaagaatgtaat

SEQ ID NO: 300514 - DNA, 622 bp, Unknown
  Bacterial polypeptide expressing nucleotide sequence isolated from the Sargasso Sea
ttgttaaataatagtctttttgattctatcaaaaatgcatattcattagaaaaggaggactttcaaaagcttgatctaggctttattgcaagcacatcagaggatcatggggactactcatcctcagcatcattaaaactagcaaaaaaattagattcatcgccaagagatatcgcagaaaaaatttcggatggtttgctttctgaattaatagaagagattagtgttgatggcccaggttttataaatatttatttaacaagatctgcgaaggttaatgaattaaaaaacgtaattgagctcaaggagcagtgggctttcaaaaagcataacaggaaaaaagcattagttgagtttgtttcttcaaacccaacaggacccttacatgttgggcatggtagaggtgctgttcttggtattgctatctcaaacttgcttcaaagtcagggctatcaggtagataaggaatactatgtaaacgatgcaggaagacagataaatatattagctttgagcataatcttagaaacaattaaccacagtcttaatagagatggcttatatcaaggcggctacataaatgatttagctaaaaaatttacaaagacaataaatttagaag

SEQ ID NO: 300515 - DNA, 640 bp, Unknown
  Bacterial polypeptide expressing nucleotide sequence isolated from the Sargasso Sea
ggtggagtaatagatgctttttcagatggaaaaatagattttgatgttaaattatgtcagttagttagtttaagtaataagggaaaacctataaaaatgtcaaaaagagcaggtaactttattacaatgaaacatgtaattgaatcagtagggccagatgtattgagatttattatgttgacaagaaaaaatgatgcaactttagattttgatatgaataaagttttagaagaatctaaagaaaatccagtttattatgtacaatatgcatatgctagagtgaactctttattagataagtctaaaagtttaaatttaaataattataaaatagattattcattattaaataataaagaagaagtttttttaatgaaacttatggcaaaatggccaagatttgttgaagctgcagcaaaagctcatgagcctcatagaataactatatttttaaataatttagccggagcattgcattcatattgggcaaaaggaaatgaggatgaaaaacaaagaataattttagaagatgatttattattaactaggagtagattggctttagctgaaactgttcaaaaattaattggtataggtttaaagattataggtgtgcaacctttagataaattgaattaat

SEQ ID NO: 300516 - DNA, 574 bp, Unknown
  Bacterial polypeptide expressing nucleotide sequence isolated from the Sargasso Sea
ggcagagttcgcgacccgtgcccgtcagctcgtggttgaactgcaatcaggcgacgaatactgcaacaaactgtggcgtgaatttaacgacatttccttaagtcactgccacgaagtgtacgagcgtttaggggtgagcttaacccgcgccgacgtgcacggtgaaagcgcctataacgccgacttagaacaagtagtcaaagatttagacgcccaaggtttactgacccaaagcaacggcgccaaagtggtcttccaagaagaattccgtaacaaagaaggcgaggcgctacctgttatcattcaaaaagccgatggtggttacctctatgccactaccgacttagcggctatgcgttaccgttcaagcgtgctaaaagccgaccgcgtactctactttgtcgatttacgccaagcgctgcacttccaacaagtatttagccttgccaagctggccaagtttgtccgtaacgatatgtcactggaacacttaggcttcggtaccatgaatggcgaagatggtcgtccgttcaagactcgtaccggtggcgtggtgaaactggtggatctactg

SEQ ID NO: 300517 - DNA, 878 bp, Unknown
  Bacterial polypeptide expressing nucleotide sequence isolated from the Sargasso Sea
attgctctcaagttggccagcaagcttaagcgtcctccaatgaaacttgctgaggaaattattagctctctggaaacccccgctgaactagagctggcagagtgtgttaagcctggttttataaacttctacctatctgctgaaaaaaaacacagcgttctcgaaacaatattcaaacacggcagggattttgggtcgtcttgtgctccagaaaaaatgagagttcttctagaatttgtctcggcaaacccaactgggccacttcatgtagggcatggtcgacacgctgcctttggtgattcgctggcgcgtcttctaaaaaaagcgggtcatgaggtttttactgagtattatctgaatgatgcgggcaggcagatagatattctttgtttaagtgttattttggagatgcttcgtgctgaagggctcgacttaaagaatatcaatggcctttacaaaggcgcatacatcaaagaaatttctcaagcattaatcaaagaaggtttcgagataaataaaaaagtcttaattccaaagcttgacggatcagctgatgaaattgttgatgcgcttatattagaaatgaaaaatgttataggctccgagctttttcaaaaaatttcagacaaaaccgtatctcgaatgacaaaactgcttaaagacgacctttcggactttagggttaagcaagatggtttttattctgaaaaatctcttttttctaaaggaaaaattgaagaggcttttgagatcataaagaaaaacggaaatgcctatgaaaaagatggtgcactctggcttgagtcatctaaatacggtgatgacaaagaccgtgtggttataagagaagacggaagatctacctactttgcatctga

SEQ ID NO: 300518 - DNA, 783 bp, Unknown
  Bacterial polypeptide expressing nucleotide sequence isolated from the Sargasso Sea
tttgataactggttcttagaatcctctttactaggtgctgactcaaaaattgatgcggctatccaacaactaaatacaaataatctaattgataatcgagatggaaatatctggtttaaatcttctgattttggcgatgataaggatagagttttaataagaacagatggaagacaaacctacttcgcttctgatgttgcttatcataaagataaattagatagaggttttgatgaaattataaatatttggggctccgatcatcatggatacataaagagggtcgaggcatctctggaaggcttaggctatgacaaaaataaactttctgtgaagcttgttcagtttgcaaatctaattaaaggtggttcgccagttaagatgtctacaagaagtggagaattttactctcttgaggacttattaagtgatgttggctctgatgttgctagattttattatctttcaaaacaaactgatcagcatttagatttcgatctagacctggcagtctcaagcaaaaaagaaaatatgtattactacattcaatacgcacacgctagaatatgctctcttgaaaaaaaagctggcttaaaagattttctagcagaagatatttctgaagaccatgtagatatttgctcaaatcttattcatgagatctcaaaatatccaaatgtactagagaaaacctgtaacaacctctcaccacacttattaattttttatttaaaggatttagcttcaatttttcataatttttacaacgataacaaaatatta

SEQ ID NO: 300519 - DNA, 686 bp, Unknown
  Bacterial polypeptide expressing nucleotide sequence isolated from the Sargasso Sea
aatgaatatatttgaggaatacttaaataaaattttaaataaaattaaatttgcaagtgaagaaaagctaattttattacctgaaagtttatctggtataaatgtagatatacctcctaaaaaatttaagtgcgatctgtcaaccaatgttgcaatggttttatctaaaacaaataatgaaccaccaattaaaattgccgaaaaattgaaagatattatctttgaagatgataataatattgagaagatagaaatagcaaatcctggatttataaatattattttaaaaaaagagttttggacttcatttcttttaaatataaataatcttaataattttggtgcatcacttaatggctctaaaaagaaacatttaattgaattcgtgtcagcaaatcccactggaccattacatgttggtcattgtagaggtgctattctaggtgatgttatctctaatttgttaaaatttaacaatcaagaagttgtaaaagaatattacgtaaacgatcatggtaatcaaattttacattttactagatctgtatatttgagaataaaagaaaagttagataatcaaacctttccacaaaatgaggatgatttatatccaggagaatacatcaaggatatagcccaacatattatagataataataaagatttacaatttgatgattatgaaa

SEQ ID NO: 300520 - DNA, 445 bp, Unknown
  Bacterial polypeptide expressing nucleotide sequence isolated from the Sargasso Sea
gatgcagaattagacttcgattttgaaaaggtgaaagaaaaaacaaaagaaaacccagtttattatgtacaatatgcgtatgctagaattaattcgattacaagaactcttaagaagaaattaagtgataaaattttaatagagaataaatcatttaatcccaacgaatatgagaaaaaaatattaagaaaaatatttgagtggccaaaaataatcgagtcagcttcttataaacttgaaccacataaaattcctttttatttatatgaactttcaacgctttttcactcatattggagtaaaggaaatgaagacaaaaattatagatttctagaaaatgataaagtcaaaagattagagactctagcattcatttacttgactgcaatagtaattaaaaatggaatgaatattcttggagtttctcttcctgaaaaaatgtaat

SEQ ID NO: 300521 - DNA, 794 bp, Unknown
  Bacterial polypeptide expressing nucleotide sequence isolated from the Sargasso Sea
agcagcaattgaaatacttaggcaacagggattaatttataatggagttcttgaagccccaaaaggaaaacaaatagatgattgggagccaagagagcagatgctatttaagtcttctaaatttggagacgaggttgatagacctctccagaaatcaaatggtgaatggacttactttgctaatgatatggcatatcattttgataaataccaaagaggatcaaagcatttaattgatatctggggtgcagatcacggaggatatattaaaagaatgaatgctgctatagaggcattaactgaaaaagatgcaaaattctcagtaaaactatgtcaaatggttaaactaatcagtgatggcaaacctttgaaaatgtcaaaaagatcaggagattttgtaactctaaatgagatggttgaacgggtaggaagtgattcaataagatttatgatgctctatagaaaaaatgaagcaccattagaatttgattttcaaaaagtctcagagcagtcaaaagataacccagtgttctatgttcaatatgctcatgcacgaatttcctctgttctaaggagaattgatgaacataaattaaaatttaatttatctgattttagtcaatgtaaattttatttactaaatagtgatcacgaacttgatttaatcaagaaaatattagattggagtagtgtaattattacttctgtaaatttatatgagcctcatagaattgcttattacttatatgaattagcatcttcattccattcacttggaatcaaggaaaaatgac

SEQ ID NO: 300522 - DNA, 880 bp, Unknown
  Bacterial polypeptide expressing nucleotide sequence isolated from the Sargasso Sea
atatgcaatacaattatacaaaatgtcaaaatgaatatttttgaagattatttaataaaaattgaaaataccattaagagagcaaatcaagataatttgttggaattgccagaaaatttatctggtataaatgtggatattcctcctgctaaatttaattgtgacgtatctactaatgttgcgatggttttatcaaaaattaataaaaaacctccaattgaacttgcagaaattatttcaggattattaaaaaaaaatgacaaaaatattgatcatattagtattgaaaaaccaggttttattaatttaaaatttaagaaagaattttggagtgcttttatattagatgtgcttaataaaccttcttatggaagtaatttaaacggtaaaaaaaatagttttttagttgagtttgtttcagcaaacccaacaggaccacttcatgttggacattcaagaggcgcaatacttggtgacgttatttcaaatctattatcatttaatggtcacaatgttaccaaagaatactatgtaaatgattatgggaaccaaatttctcattttactaaatcagtttattttagaataaaggaaattactaataacgaaacatttccaatagaagacaaagatttatatccaggcgcatatcttatcgatatagcaaaaaaaataatttcaaaaaataaagatatagattttaatgactacgacaaaatatctgaaaaattaaagaaactttcgattgaagagtctttaaaattaataaaaaaaaatttagaaaatcttggaataaaacatgataattttgctagcgaaaccgaggttattaaaaataaagaagttgacgaagtaataaaaaatttaaaagcaaagaaat

SEQ ID NO: 300523 - DNA, 587 bp, Unknown
  Bacterial polypeptide expressing nucleotide sequence isolated from the Sargasso Sea
aatgaatatatttgagaagatagaaaatatcgtcgagcaaactcttcaagaaatgccattttggtgtgaaaatgaaagtttgccagctattaggataaaattggagacgcctagagataagacacatggagagctgtcttccaatatagctatgatacttgcaaaaaatattggaaaaacaccgaaggattttgctgctgagatatgttcccatcttgcgggtgttgagtcaattcagtcagccaccgtcgcaggacctggatttattaatctgaaattaagaaccgatgtatggtttgaatgcgtaagatgcatccttcggttgggaaaagattttgggtcgtctaactttgggaaaaacgaattcattaacatagagtatgtttctgccaatcctacgggtcctttgcacgctgctcatgcacgaggcgcagttgttggcgacacgctggctcggctcctaaaaaaagtagggttccgagtttgtaaggagtactacgttaacgatgcgggcacccaagtagatattttagcaaagtctacctatttgcgatatcttgaagccttgggacacgaaattggcccca

SEQ ID NO: 300524 - DNA, 766 bp, Unknown
  Bacterial polypeptide expressing nucleotide sequence isolated from the Sargasso Sea
atgtttttatcaaaattaaataataaacctccattagaattagctaaattattagcaaaaccaataaaagagaatgatgatttaattgaagatgtttcagttgttaagccaggatttataaatattaaatttaagccaattttttggactaattttatccaaagtataattaaagattctgataattttggaattaatagtaatgaaaaaaagaaaagttacttaattgaatttgtttcagctaatccaactggacctttacatgttggtcattgtcgtggagctatattaggtgatgtaattgcaaatattttgttatttaataaacacaaagttaccaaagagtattatgtcaatgattatggtaatcaaattataaattttacaaaatctgtttattttagaataagagaaatcctttttaaagaacctttcccctcagacaatgaagatctctatcctgggaattatctaattacttttgctgagaatattcttaatgcaaataaaaagataaattttgagaattttgatcaaatagctgaaaaactaaccgaacaatcaattgaagaggcactaaaattgattaaaaaaaatcttaatattttaggtattaatcatgacaactttgttagtgaaaaaaaaatagtcacgaaccaagaagttgaaaacgttattgagtatcttcaaaaaactaaatttgtttataaaggaaaaatcaaagcaccagtgggtgaaaacattgataattggaagaaagagagca

SEQ ID NO: 300525 - DNA, 832 bp, Unknown
  Bacterial polypeptide expressing nucleotide sequence isolated from the Sargasso Sea
aaaaaagaattttggaataattttttaaaagaaattattggtaataaaattaagtatggatctgatgaaaaacaaaaaaaaataaaatatctagttgaatttgtttcagctaatcccacgggaccactacatgttggtcattgcagaggtgcaattttaggagatgtcatatcaaacattttgaaatttaataatcatgatgttgttaaagaatattatgtaaatgattatggaagtcagatacaaaattttgttaaatcagtttttttaagaataagagaaatattaaataaagaaaaatttccaacaaataataaagatttgtaccctggcgattatattgtccaaatttcaaataatatcataaatgaaaacaaaaatttagatttcagtaaatttgaaccaatttctgaaaaacttacaaaattatcagtagaacagtcattaaaattggttaaatttaatcttaataatttaggcatcaggcatgataattttgttaaagaaactgatttagtaaaaaataattctgtcgaagtagtagtaaaaaatttaaaaaagaacaattttatttatgaaggtcaaatagaagctcctgaaaatgaaaaaaattctaattgggttaaaagagaacagcttttatttaaatctactctttttggtgatgataaagacagaccactccaaaaatctgataagacatggacttattttgcaagtgacgttgcttatcacaaaaataaattagatagaaaatttgattgtttgattaacatattaggtgccgatcatgctgggtatataaaaaggatatcttcagcagtagaagctt

SEQ ID NO: 300526 - DNA, 492 bp, Unknown
  Bacterial polypeptide expressing nucleotide sequence isolated from the Sargasso Sea
gatggatatactagaaaaatataagaatattttaattacagagcttaataaatcttattcaaaggaggatttatcaaatatatcttttgaatttccaagagatagttcacacggcgatttttcaacaaatgcggcacttattttatcaaaaaaattaaaaatgaacttagataagatattcctggaagttaaaaagttttttgaagatagtggcgatttcaaagatattgtattagcaaaatcaggttttattaatttttttgttaaagattatattttacatgattttattcgagaggttttaaaaaatagagaaaattttggaaaaaaagaacttggaaaaggagaaaagattaacattgagtatgtttcagctaatcccacagggcctttgcatgttggacatacaaggggagcagtttttggtgatacactagctaatatatttgattttgtgggttttgatgtttgtagagaatattatattaatga

SEQ ID NO: 300527 - DNA, 568 bp, Unknown
  Bacterial polypeptide expressing nucleotide sequence isolated from the Sargasso Sea
atgaatatctttgatctgtaccttgataaaataaaaaaaattttattagatctatcaaaaaaaaataaactaattttaccagataatttgaatggaattactactgaaatacctcctgcaaattttaatagtgatatttcaacaaatgttgcaatggtattatcaaaaattaataaaaaatctccgatagatttagctaaaattttaactgacgctattaaaaaaaaagatgacttaatagaagatatatcaatagtaaaacctggttttattaatattacttttaaaccaattttttggacaaactttgttgaaacaattaccagtaactccaaagattttggaagaaatatgaaagcaaaaaaaaaaaattatctagtagaatttgtttcagctaatcctactggccctttacatgtaggtcattgtagaggagcaatattaggtgatgtaatagctaatattttactattcaataaacataatgttgttaaagaatattatgtaaatgattatggtaatcaaattttaaattttacaaaatctgtctatttaagaataagagaaa

SEQ ID NO: 300528 - DNA, 792 bp, Unknown
  Bacterial polypeptide expressing nucleotide sequence isolated from the Sargasso Sea
ataaaaatcggaaaagaaattattacaaaattaaacaaggaaaaattagactcaattaaaaaaataaccttaaccaatcctggatttataaatttcaaaattaaaaattatttttttcaatcaaaaataaacactattattttaaaaggtaaaaattatggctctaattcaattggtaaaggaaaaactgcaaatgttgaatttgtaagcgcaaatccgactgggcctttaacaattggacatggtcgaaatgctattttgggagactctatatcaaacattcttgaatggaatagctataaagtaacaagagaatattattttaataatgctggtcgacagatgagagttttaggtgaatctgtaaaagctagatattttcaaatattaggcatagataaaaaattccctgatgaaggatatcaaggttcatatattaaagaaattgctaaaaagataatttcaaagtatggtgagaaactcaattataaaagcccaaaatttaaagatgaagctgaaaagataattttcaaacaaataaaatcaacattaaaaaaacttgaaattaattttgaccaatttactaacgaaaaaactttttatgaaaacggtgatatagagtctttattatcaaaattaaataaaaagaaattactttaccaaaaagatggagcaacttggtttaaaacaacaactttaggaaaagaaaaagatcgagtatacatcaaaaaaagtggagaaccaacttatcgagttcctgatacggcctatcataaaaataaaattgatcgt

SEQ ID NO: 300529 - DNA, 537 bp, Unknown
  Bacterial polypeptide expressing nucleotide sequence isolated from the Sargasso Sea
ccttgcggcaggttgttgacgaggtggaaaaagacgctgttcgatttatgatgctgacccgaaatagcgacgcccctcttgattttgatcttaaaaaggctttggaacaaagtaaggataaccccctattttatgtccaatatgcccatgccagagtttgttcggtgatacgaaatgcggcagttgcctttccggatctcctgcttgacgattctagtcttgcaaaggctgatatgagcgaggtgaatgatcctggtgaaatcaaaatgattagggaattggccagttggcccgaagtcgttgagcgtgctgcaaggtcacgagaacctcataaaattgttttttatttatcagaacttgccgcttcatttcatgctttttggaacaaaggtaattcagaggagtcgttacgttttattgtcatagataaccctcgaaaaaccatgcaacgtgttgcattggctcgtgcggttggaatcgttattgggtctggcctcgctgttattggtgtcgatcctgtggaagaaatgcggtgat

SEQ ID NO: 300530 - DNA, 850 bp, Unknown
  Bacterial polypeptide expressing nucleotide sequence isolated from the Sargasso Sea
gagataaacgaggttggtctcgaactttctagaaacaaaaataacgagcatggagatttctcgagcaatattgcactgaagttatcgggaaagctgaagcgctctccaatggtcgttgccgaagaaatcatcaactcaattcatgtttccgatgagcttgagagaactgagtttgtaaaaccaggttttattaatttctatctttcggctgaaaaaaaacatgtcgttcttgaagaaatcataagagaaggaaaagcgtttgggtcatcttgtgtttcagaaaaaaagaagattcttttagagtttgtctcagcaaatccaactggtccgctccatgtggggcacggtcgtcatgctgcttttggtgattcattggcgcgcttgctcagaaagtctgggcatgaggtttttacagaatactatctcaatgatgcaggaaggcaaatagacatcctttgtgcgagtgttatgtttgagcttcttttactagaagggcagaagcttggtcaggttgatggtctttataaaggctcatacattaaagagatcgctggagatctccatgaggaaggtttagcgatcaataaaaaaatatcgctcaccaaagcaggcggatcggatgatgaaattgttgatgctctgatattggaatttaaggatgttgctggaaatgagctttttcagatggttttagagaagactgtcctgcagatgacaaaactgcttaaagatgatctttcagactttagggttagacaagatggtttttattcagaaaaatcgctcttttctgaaggcaggattgaagaggcttgcgggatcataaagaaaaatggaaacgcttatgaaa

SEQ ID NO: 300531 - DNA, 882 bp, Unknown
  Bacterial polypeptide expressing nucleotide sequence isolated from the Sargasso Sea
tttaaatcaatatttttggaatgattttttaaaagaaattattaataaccataaagaatttggcatcaacaaaaatgaagttaaaaaaaaatatcttatagaatttgtctccgcaaatccaactggaccattacacgtgggtcattgtagaggtgctatcttaggcgatgttatttctaatattctccaatttaatcagcacaaagtatctaaagaatactacgttaatgattatggaaatcaaattttaagtttcacaaagtctgtatatttaagaataagagaaattcttaatggtgaaaaatttccagttaacgatccagatctttatcctggagattaccttattgaaattgcaaaaaatataatcaaagagaataaaaatattaaatttgataactttgataatgtttctgctaaactaacttctttagctatatttcaatcactaattctgattaaaaccaatttgaaaaatttaggcatttctcatgacaattttcaaagcgaaactgaaattgttaataataatgaagttcaaaatgtaattgataaacttaaaaaaaaaaattttgtttatattggaaaaataaaagctccagttgatgaaaaaaaaaataattgggttgaaagagaacaattattatttagatcaacagattttggagatgataaagatagaccgttacaaaaatctgataagtcttggacgtattttgctagtgatgtcgcttaccataataataaattgaacagaaattttgatgctatgattaatattttaggcgctgaccatgcaggctatattaaaagaattaccgcatgtgtagaagcattatcaggtgaaaaaaataaattaatttgcaaagtgagccaattaag

SEQ ID NO: 300532 - DNA, 962 bp, Unknown
  Bacterial polypeptide expressing nucleotide sequence isolated from the Sargasso Sea
cttagataaaataaagaaaactttatttgatttgtccaaaaatagtaaattaattttgccagaaaatttagatactattacagcagaaatacctccttcaaaatttgatagtgatatctccacaaatgttgcgatgattttatcaaaagtaaataaaaaagctcctattgaattagcaaatatgttagctgaagcaattaaaaaaaatgataaattaattgaaaatatatcagtagttaaaccaggttttattaacattaaatttaaagtaatcttttggacaaattttgtagaggaaataattaaaaattccaaatcctttggtattaatacaaaagaaaaaaagaataattatttaatagaatttgtttcagctaatcccactggtcctttacatgtaggccattgccgaggtgcaattttaggtgatgtaattgctaatgttttattgtttaataaacataaagttattaaagagtattatgtaaacgactatggtaatcaaattatcaattttaccaaatctgtatattttagaataagagaaattatttttaacgaaaaatttccttcaaataatgaagatttataccctggagattatttaatagatttcgctaacaatataataaattcaaacaagaaaattgattttaaaaactttgataaaatttcagaaaaattaacagaattatcaattgaagaagcattaaaattgatcaaaaaaaatcttaaaagtctcggcattaatcatgacaactttgtaagtgagaaaaagatagttttaaatcaagaagttgaaaaggttattgattttcttcaaaaaagtaaatttgtatataaaggaaaaattaaagctccagaaggagaaaataaagataaatggattgagcgtgaacaattactttttaaatctacagattttggtgatgataaagatagagctttacaaaaatctgatg

SEQ ID NO: 300533 - DNA, 700 bp, Unknown
  Bacterial polypeptide expressing nucleotide sequence isolated from the Sargasso Sea
ggtattaccgtcgaattgccaccacagaaagaaaattcagctatatcttgtaacgctgcattgttattatctaaacataataatatttcatctatagaattagcacaaatattaaaaaaacatcttttaaaagcttttaaagaattcaaaacaattgatgttgcgggtcctggttttttaaatattaacttcgaaacttatttttggttggaaaatttattaacgatcattaaactaaataaaaattatggctcaagtaaatcgagaaaaaaaaaatataatatagaatttgtttccgcaaatccaacaggaccattacatgtaggacattgtaggggtgctgttctaggtgatactttatctaaaatgctttcttttaatggcaacagagttaccaaagaatattacgtaaatgattatgggggacaaataagaaattttgttacctcagtttattacagaatattagagattgaagaaaataaattatttccagaagatgataatttatatccaggagaatatataaaagatattgcaaaaagaattattaaaaaaaaaataattaaaaattttggtaattttgaaaaaatatataatgtattagagaaagagtcgattgattgttcaatgaaattaataaaaatgaatttaagtttattaggtgttgaacataataattttattaatgagtcaaaaa

SEQ ID NO: 300534 - DNA, 931 bp, Unknown
  Bacterial polypeptide expressing nucleotide sequence isolated from the Sargasso Sea
aactacaaaataaaactacaagaaagtaaagataaagagcacggagattatgcaagtaatatagccatgattctagctaagacactttccagaaaccctaaagatctagctgaacaaatttctaaggaattccctttggatgaacaaatactaaaagtagaggtagcgggaccaggatttataaatttctttgtttctgaagaaactcattcaaagattctaatgacgataaatttagaaaaagaaaaatatggacatagtcaaaagaaagatagcaaagtactcatcgaatatgtgtcaagtaatcctaccggaccattacatgtaggtcatggaagaggagcggtgtttgggtctgttttagcaaaacttttaagtgcagcagggcatgaagtagatgaagaatactatgtgaatgattatggaagacagatgagcatactgaccgtaagtgtttggataaggtatatgcaaaattcaagagacgatgtaactatgagcgctttgggttatcaaggtgattatataaagctaattgcagatgatctggctaaagaaaataaagagaaatatcttctttcagacaaagatcatgagcgaatactttcctttcttaaaattcaggaagatgaaaaagacatcgacgccttaatcacatttatgcaagaaacattagcagagggatttacagaaatcagatctttcgcattagacagtatgctaaagatcatcgagaaggatttaatgagatttggggtaaatcataatctgtggttttttgaatcttccctatatagtaaagagcaagatgaagactgtaaggctaataaagctatatcagaattaagctcaaacaactatgtgtatgaggaagatggcgcactctggtttaaatcatctgactttaaagacgataaagatcgagttctac

SEQ ID NO: 300535 - DNA, 541 bp, Unknown
  Bacterial polypeptide expressing nucleotide sequence isolated from the Sargasso Sea
agccactagcagagcgactcgcactgttttagagaagaacccagaaatatcagaaaagaaggctcgagaaatcggagaaataatcggtatagcggcaatcaagtacgcggatctatctaaaaacagaactaatgattatatttttgattgggaccaaatgctgtcgctcgaaggaaatacagcgccctatcttctttacgcttatacacgaatacaaagtttgattaacaggagtggtagaagcgagcgagatcttgtcaagatggttgctccagaagatgagtcagaaagattattgtgtgttgagttgatcaaactcgatgacgtagtggaacaagtggcgaaggacggataccctcatcttttatgcaaccatttatattctgtggcaaccacttttaaccaattttacgaacaatctgcaatacttaaccaacccgaagagacaatactgcgcagactttcattaactcacgccaccggcagaacacttcaaaaaggtttgtctctcttggggatcgatgtcgtcgacaagatgtag

SEQ ID NO: 300536 - DNA, 796 bp, Unknown
  Bacterial polypeptide expressing nucleotide sequence isolated from the Sargasso Sea
aaatgcattgaattaccttgagcaattaggacttggtaaagagcccaaagattcattacttgatttttcaactcccagtcgcatagaaatcagaagaaatagtgagtggcttgaaaatcttaatttgtctgaggttatagaacttttatcaaattcaacagttggtcaaatgctggctaaggaagactttagtaatcgatataaatctggaactcctatatctcttcatgaatttctctatccgcttcttcaaggatatgattctgttgcgatcaattctgatgttgaacttggtggtacagatcaaaaatttaatattgctatggggcgagatctgcaaagagcttttggacagaaaccccaatttggaatgctattacctattttagttggattagatgggacacgaaaaatgagtaaaagcttagacaatattgtaggaataaatgaagatccattatctatgtattcaaaattagaaaaggttccagatgatttggttcttacatatttaaatttactcactaatgaaaacttaaaagaactaagttcaaatccaagagaggttcaaaaatttatggctttaaaaataacatctaattttaaaggaattgaggcagcaaaaaatgctcaatttaattctgaaaaattagttttaggtactaaagattctcttgaggaaataccagaagcatcagtttctaatgtgaattttccagctaaagcattttatttatttagtaagatggaaatgtgttcaagtagcagtgaagcaagaagacaaattctggaggag

SEQ ID NO: 300537 - DNA, 511 bp, Unknown
  Bacterial polypeptide expressing nucleotide sequence isolated from the Sargasso Sea
atgaatatttttgaccaatatctagaaaaaattaagataattattaagaatctttccgataagggcgaactaattctgccagatactttagaaggtataaatgcagaactacctcccaaaaaatttaactctgatatttcaacaaatgttgcaatggtattatcaaaaattaataagaagtcacctatggatttggctgaagatcttgctaaattatttaagaaacgcgatggatttattgaagaagcaaatattgtaaaccctggttttattaatttaaaatttaaaccaattttttggactaatttcatcaaagaaattattaaaaactctaaaacttatggaattaataaaaaagacaaaaagaaaaattatcttatagaatttgtttctgctaatcctacaggacccttacacgtgggtcattgtagaggagcaatcataggcgacgtaatcgctaatgttctgtcgtttaataatcataaagttacaagagaatattatgtaaatg

SEQ ID NO: 300538 - DNA, 696 bp, Unknown
  Bacterial polypeptide expressing nucleotide sequence isolated from the Sargasso Sea
aatgaatatttacaaattttactttaaccatttgattgaagcggttgagaagtttaaatcagattttaaatattctttcatagttgaagacattcttaaaaaattaactctagaacctcctaaaagttcaattaatggagatatgtctacaaatttagcaatgattttaagtaaagatttaaaactaagccctaaaataatagcagaaaattttatggtctatatttcaaattttccaggtgttgacaatgttaatgtagctgggccagggtttattaatattacatttaaacaaaatgtatggttagatttcttgagcaacatgcttcagaactcagggaattgggataaattagaaataggaaaaggaaaaaacataaacatcgaatatatttctgctaatcctactggacctctacatgctggtcatgcaagaggtgctgtgtttggtgacgcacttgcgtctcttttgactgaggttggctacacagttactagagagtactatatcaatgatgcaggaaatcagattgaaaaattaatagactcttcattgttaaggtataatgaactagtaacaaataagtcaattgatatcccaaagggtctttatcctggagaatacctaaaagaagtaggtaaaaatcttattgaaaagtatggatataaaatagaaacggaccctaaagaaaaagt

SEQ ID NO: 300539 - DNA, 945 bp, Unknown
  Bacterial polypeptide expressing nucleotide sequence isolated from the Sargasso Sea
tattaatttttttgttaaagattatatcttacatgattttattcgagaggttttaaagaatagagaaaattttggaaaaaaagaacttggaaaaggagaaaagattaatattgagtatgtttcagctaatcctacaggacctttacatgttgggcatacaaggggagcagtttttggtgatacgctagctaatatatttgattttgtgggttttgatgtttgtagagaatattatattaatgattcaggcgaacaaataagaaatttagcaaaatctgtttatttaagatatttacaaaatttttcagataaagaaattgtgataccagataacctttatcctggagagtatttaattcctatagcaaaaaaaattagtgacgagcatggagaaaaattcctagataaagatgagagtgaatggctagatttttttaagagagaatcgatatctaatgtaatggatattattaaaagcgaccttaagtctcttgaaataaatcatgatgtattcatctctgaaaaagctttattggaagaaggtcatgtaaataaagcatataaatacctagagaataaaaaactactttataagggcaatacaaacccacctaaaggtagcaaaaaagatgaatggagtgaaaagaaacatattctttttaaatcaaaaaattttggagatgatgaggatagagttgtaaaaaaacatgatggtcaatggacctattttatgccagatattgcctatcatttaaataaatatgaaagaggatatattcggatgataaatatctttggagctgatcattcaggatatatagctagaatgaaggctgctgttaaagctgtaactaatgaaaaggcaaatctcgaaatcaaaacttgtcaattggttcgattatcaagaggtggaaagcctgttaagatgtcaaaaagatcaggaag

SEQ ID NO: 300540 - DNA, 610 bp, Unknown
  Bacterial polypeptide expressing nucleotide sequence isolated from the Sargasso Sea
atgaatatatttcaaatttaccagaaaaaaattaaagacctaattttagatattaataaaaatggaaaaattgaaattccagaaaatctagactctattggtgtagatataccgcccaatcagtttaagtcacacatatcaacaaatgttgcaatgatcctatctaaaataaataaaaccaaccccatggatcttgcaaaaaaaattgaaaccgaattagcaaaggtagatcaaagtattgaaaaaatcgatattgtaaagcctggatttataaacatcacttttaaaaatattttttggaaccaatttatccaagaggtaataagtgagaaatatgaatatggttctagctcatcaaataataaaaaaagttatttcttagaatttgtttctgccaatcctactggaccccttcatgttggtcactgtagaggtgctgtatctggtgatgtattggctaatattttaaaatttaataaacacaaggttcataaagaatattatgtaaatgattatggaaatcaaataatcaattttactaagtcagtttatttgcgcattaaagagcaaattgataataagccttatcctaaagatcaagaggatttat

SEQ ID NO: 300541 - DNA, 859 bp, Unknown
  Bacterial polypeptide expressing nucleotide sequence isolated from the Sargasso Sea
tatgaatatctacaacgattttaaaaatcaaatttttgatatttttttgaagattattgaagaaaataattctaatttagataatattcataatttaaaagaaaaatttgctgttgagcttcctcgtgaggaaaatcatggagatatatcaactaatattagtctagttttatcaaagttaattggatacaagccaaaagaattagcaatattaataaaatctaacttagaaaaattggagagcgttaaaagtgtttcaattgaaggccccggatttattaacataaacttatataattctttttggcatgaacaaatttttaaaatcttgaaacttaaatctcaatttggagaatcccaaatttttttaaataaaaatattaacgtagagtttgtttctgccaatccaacaggtccacttcacgttggtcatgtaagaggagctgtaattggtgatgtattatccaatattttaaaaatggttggatatgaagtaactaaagaatactatgttaatgatgcaggaaatcaaattgatattctagccaattcagtatttattaggtatgaagaaataattctcaaaaaaaaagcggtaatacctgatggttattatcctggagagtatttaattccattagcaagatcattgtatgatatacataatgatagtttgctaaattgcgataaattcagagcattagaaataataaagaaattttcaatcgattttattctaaatgaaataaaaattgatcttggaagattgaacataaaaatggatcaatattcctcagaaaagaaattggttcaagatttgtctgtaaataagactattcaagaactgaaaaaaaaggat

SEQ ID NO: 300542 - DNA, 609 bp, Unknown
  Bacterial polypeptide expressing nucleotide sequence isolated from the Sargasso Sea
attttggtgtaacttttgataattggttcttagagtcctctttacttggcgctgattcaaaaattgatgcagctgttcaacaactggatacaaataatctaatagataatcgggatggcaatatctggtttaagtcttcagattttggcgatgataaggatagagttttaataagagcagatggaagacaaacctactttgcctctgatgttgcttatcataaagataaattagatagaggttttgatgaaattataaatatttggggctccgatcatcatggatacataaagagggttgaagcatctctagaaggcctaggctataacaaaaataaactttctgtgaagcttgttcaatttgccaatctaattaaaagtggttcgccagttaagatgtctacaagaagtggagaattttactctctcgaggacttgttaagtgatgttggttctgatgttgctagattttattatctttcaaaacaaactgatcagcatttagatttcgacctagacttagcagtctcaagtaagaaagaaaatatgtattactacattcaatacgcacacgctagaatatgctctctgaaaaaaaagctggtctaaa

SEQ ID NO: 300543 - DNA, 902 bp, Unknown
  Bacterial polypeptide expressing nucleotide sequence isolated from the Sargasso Sea
catgatcaatattgatgatattgaagttgaaactctatttgatcaaagaggtgattttacaactaatactgctcttaaattttcaaaaatatacaactcaaatccaaaacaattagcaaatttaataatagaaaatctcaatatagatgtttttgaaaaagtagaaatagcaggtccaggttttattaattttactcttaaagatggaacttttaattctcaattaattaataacaaaattgaatttaaaaatactgacaaagtaaatattgaatttgtctctgcaaatcctacaggaccattacacttagcacacggtagaggtgctgttgttggagatattttatcaaatttatttgaatattttggacataaagttacccgtgaatactatgttaataatacaggtaaccagataaatgaatttttatcatcaattctttattcaatatcaaataaaaataatttaagtctcgatgaaaatcaattttacaaaggtgattacataaacgatattgctaataactgttacgaaaattttaaatccttatttagtaaagagctaagtcctagtgatagaataaatattgttaattttgccattgaaaatcttgtcaatcaaactattaaaacgcttagtagtgcaggtattaattttgatgaaatttcatatgagacaaacattatggaaaaagaatatctaccattaatcatagaaaaactaaataaaagtgagctcacttataaaggacaattaaatgcacctaaagattataccggtactcaaaaagataatgatttaacaatattcaaatcaacactctttaatgacgatgaggatagggcattaactaagaatgatggatctccaacatatttttgcaatgatatagcttatcatg

SEQ ID NO: 300544 - DNA, 264 bp, Unknown
  Bacterial polypeptide expressing nucleotide sequence isolated from the Sargasso Sea
agcaggaactgccgctcgccgccaagctcgcccagttcggcgaagtgctgaacagcgtcggcgagaaaggcgaaccgcacttgctgtgcgcttacctgtacgatctggccgggctgttctccagtttctacgagcactgcccgatcctcagcgccgaacagccagagcagaagcagagtcgactgcgcctcgctgccctgaccggcaagaccctcaagcagggcctggaacttctcggcctggaaactctggagcgcatgtaag

SEQ ID NO: 300545 - DNA, 541 bp, Unknown
  Bacterial polypeptide expressing nucleotide sequence isolated from the Sargasso Sea
aatgtctaaaaggaaaggtgattatatcactatcgaggatcttatttatgaagtgggtaaggatgcaacaaggtttattatgttaagcagaagtagtgatgctgaaatcgattttgattttgataaagtaaaagaaaaatctaaagaaaaccctatttattatgttcagtatgcatatgctagaatttcatctgtgtttagaaatacccaaaatgatataaacagcaatcttgagataaagaattcagattttaattttggcaaagaagaaattaagctattcaaaaaaattagtgaatggcctaaatgtgttgaagtttcatcagaaaaattagaaccacatagaatttcagtttatctatatgatttagcttctgagtttcattcttattggaatatgggtaaggatgatgcttctaaaagatttatcgatcaagataatacaattcaaatagaaaaactagttttcctaaaatctatagccaatactttgaaaacaggtatgaatattttgggtgtagacaccccagaaaaaatgtaa

SEQ ID NO: 300546 - DNA, 684 bp, Unknown
  Bacterial polypeptide expressing nucleotide sequence isolated from the Sargasso Sea
aatgaatatatttgaaaattatttattaaagatagaaaaaattatttggtctgcccataaagataatttgttagagttgccagataatttatcaggtatcaatgtagatattccacctgcaaaatttactggagatatttccacaaatgttgcaatggttttatccaaaattaataaaaaatctccactagaacttgctaaacagatagctgacttaataaaagatagtgataacaatattgatgaaattatcattgaaaaaccaggttttattaatctaaaatttaaaaatgaattttggaatgactttatactagatgtcttgaataattcatcatatggaagtagcacgagtggaaaaaaaaatagttatttagtagaatttgtatctgcaaatccgactggacctttacatgtaggccattcaagaggtgccatacttggagatgtaatatctaatcttttatcctttaacggtcataaagttactaaagaatattatgttaatgattatggaaatcaaatctctcattttacaaaatcagtttatttaagaataaaagaaatactttatgatgaaacttttccgatagacgataaggaattatatcctggagattatcttatagatatagcaaaaaaaataatttcaaaaaataaagatttagatttcaaaaactttga

SEQ ID NO: 300547 - DNA, 559 bp, Unknown
  Bacterial polypeptide expressing nucleotide sequence isolated from the Sargasso Sea
gcgtggcggactcgaggtcaagttgtccaaacgcgcgggcaacatcgtcaccctggaggagttggtcgaggaagtgggtgtcgacgccgcccgctacacgctcatccgctacccggcagattccccgttaaccctcgatctggaaacgatcacccgacagaccaacgacaacccggtcttctacgttcagtacgcacatgcgcggatttcctctgtcttgagaaatgcccgagaactgggcatcgaatggcgtgaagcggaattcgaccctggatgcctaacgcatgaacgggagatcgaactcctcggccgtttggcggaatacccgcggatcgtggccagcgctgctgaattgcgcgaaccccaccgggtggcgcgctatctggaggagatggccaccgactatcaccggttctacgacgtgtgctgggtgctgccccggggagaggaagacgtccagccgcttcacatatctcgattgtggttgtgtgcggcggctcgtcaagtgctggccaacgggctggatctgctcggagtcagcgcccccgagcgcatgtag

SEQ ID NO: 300548 - DNA, 763 bp, Unknown
  Bacterial polypeptide expressing nucleotide sequence isolated from the Sargasso Sea
aatgtttttatcaaaagtgaataaaaaaccatctgatgttattgctaataaattaattgagttaataaaaaaagaagatgataaaattgaaaatatatctgtagcaaaacctggctttataaatattaaatttaaaagtgttttttggaatgaatttttacaagatgtaatcaaaaataatattaactttggcaaaaatgaaaaatctaaaaaaagaaattttcttatagaatttgtctcagcaaatccaaccggaccattacacgtaggacattgtcgtggcgctattttaggcgatgtcttatcaaacattcttttatttaataataacaaagttacaaaagaatattatgtaaatgattatggtaatcaaattttacactttattaaatctgtttatttaagaatcagagaaattgtttttaaagagccctttccaaaagataaacctgatttatatccaggcgactatataatagatattgctaaaaatattattgccaacaacaatgatttaaaatttgataattttgataaaatatcatctttgttaacaaaattatcagtagatgagtctttaaaattagttaaacttaatttaaaaaatatcggtgtatttcatgataatttttatagagaaacagacattgtaaataacaatgaagttgagagtgtagtaaaaaaactaaaagataaaaattttgtttacgaaggtaaaattaaggcaccagagggtgaagacctttcaaagtgggttgaaaga

SEQ ID NO: 300549 - DNA, 371 bp, Unknown
  Bacterial polypeptide expressing nucleotide sequence isolated from the Sargasso Sea
actgaatgagatcggcctcgagctttctagaaacgccaacaatgatcacggagacttttccagcaacattgctctcaagttggccagcaagcttaagagtcctccaatgaaacttgctgaggaaattattggctctcttgaaacccccgctgaacttgaactggcagagtgtgttaagcctgggtttataaacttctacctttctgctgagaaaaaacacagcgttctcgaaacaatattgaaacacggcagggattttggctcgtcttgtgctccagaaaaaatgagggttcttctagagtttgtttcggcaaatccaactgggccacttcatgtagggcatggtcgacatgctgcctttggtgattcgc

SEQ ID NO: 300550 - DNA, 510 bp, Unknown
  Bacterial polypeptide expressing nucleotide sequence isolated from the Sargasso Sea
attggaattagataatacaaatgcattaaaaagtgtaaatttagagataccccctgaaaaatttgactacgacctttcatgtaatgttgcaatggttatggctaaagccaataaaaaaaaaccagaacatttagcaaaaaacattcaagctttacttatagaaaatttaaaaaatttttcaaaagttgatattgcaggacctggttttttaaacataaattttaaaaatgaagctttaactgagataataaataaaattattaaaaagaaaagtaattatggctctaatcttaaaaagaataaatataatttagaatttgtttcagcaaatccaactggtccattacatgttggccattgtagaggtgcaatatttggtgatgttttatcaaatttattatcttttaatggaaacaaagttactaaggagtattacgttaatgatcatggtaaccaaataaaaaattttgttaagtctgtttttcttagattaagagaaattaaatttaa

SEQ ID NO: 300551 - DNA, 748 bp, Unknown
  Bacterial polypeptide expressing nucleotide sequence isolated from the Sargasso Sea
gaaaaattatctaattgaatttgtttccgcaaatcctacaggacctttacacgttggtcattgtaggggagctattttaggtgatgtaattgcaaatgtattactgtttaacaaacataaagtaaccaaagaatattatgtgaacgattatggtaatcagataattaactttacaaaatctgtttattttagaataagagaaatttcttatagtgaaccatttccaaataatgatgaaaatttataccctggagattatttaatagattttgctaaaaatattttagaatccaataaagatattgattttaaaaattttgataatatttcagaaaaattgacaatattatctattgatgaagcattaaaattgattaaaaaaaatcttgatagccttggcattaatcacgataattttgtaagtgagaaaaaattagttgcaaatcaagaagttgaaaaagtaattgatattcttcaaaagaataaatttgtttataaaggaaaaattaaagctccagctggagaagaaaataataactgggttgagcgtgaacaattactttttagatctacagattttggagacgacaaagatagagctttacaaaaatctgatggtgcatggacctattttgcaagtgatgttgcttatcataaaaataaattagatagaaattttgattatctcattaatattttaggtgctgatcatgctggatatatcaaaagaatatcatcatcagtagag

SEQ ID NO: 300552 - DNA, 754 bp, Unknown
  Bacterial polypeptide expressing nucleotide sequence isolated from the Sargasso Sea
aatgaatatttttcaaacatataatgataaaattataaaattactaaaaactgctaaagaaaataatttattagaacttccagaaaatttatctggtattaacgtagaaataccgccagcaaaatttaattgtgatatgtctaccaatgtagcaatggtcctttcaaaaacgaataataaatcaccattggaactagcaaagataatagctgatattattaaaaaaaatgatgaaaatttagatgatattaaaattgaaaaaccaggttttataaatctaaaatttaaaaaaattttttggaataattttcttaaaactattattaatcaaagtaattatggatcaaatacatcaaatgtttctaaaaaatatcttgtagaatttgtttcagctaatccaactggacctcttcatgttggtcattgtagaggagctatcttaggtgatgttatatctaacttactaatatttaataatcacaaagttacaaaagaatattatgttaatgattacggaaatcaaattatacattttactaaatcagtttattttagaattcgtgagatcttatttaaagaaaagtttccaattgataataaagatctttatccaggagattacttaatagatatagcaaaaaacataattgataaaaatactggtatcaaatttgataattttgaaaacatctctaatgatttaacaaaattatcagtgcaagagtcgcttaagctaattaaatttaacttaaat

SEQ ID NO: 300553 - DNA, 839 bp, Unknown
  Bacterial polypeptide expressing nucleotide sequence isolated from the Sargasso Sea
attaaatgaggaaaaagatattgaaaatattttaatagaaaaaccaggatttattaatattaagtttaaaaaatctttttggtcaaattttttagttcaagttataaataacggtaatacgtatggtaaatatattaaaaaaaataataaaaaatatttattagagtttgtatcagctaatccaacaggtcctcttcatgtaggtcattgcagaggtgccatacttggtgatgtattgtcaaatttattattatttaataataatgaggttacaaaagaatattacgttaatgatgatgggggacaaattaacctttttgcaaaatccgtttatttaagaattagagaaattttatttaaagatgactttccaaaagataatgaagaattgtatccaggtgattatttaatagatatagctaaaaacattattcaaaataataagaatcttaaatatgataattttgaaaatattgaagacgaaattactaaactttccgtatctgagtcattaaaattaattaaattaaatttaaaaaatttaggtattgaacatgatagttttgctagtgaaaagagaataattatcaataatgaggttgataaagccattgaaaaattgaaaaaaaaagactttgtttatcacggaaaaattaaagctccagagggtgataaaaaatcaaaatgggttgaaagggaacaattgctctttaaatcgacagaatttggtgatgataaagatagagctttacaaaaagaagataattcatggacatattttgctggagatgttgcttatcatgaaaacaaactaaatagaaattttgatattttaataa

SEQ ID NO: 300554 - DNA, 940 bp, Unknown
  Bacterial polypeptide expressing nucleotide sequence isolated from the Sargasso Sea
aaaaaaattcaagtcgaatttgtctcagcaatccaaactggcccacttcatgtcggtcacggaagaggagctatatatggcgatgtaatttcaaaactacttgaaaaaaaaggccacaaagttcaaaaggagtactatgtcaatgatgcgggaaggcaaatagatattcttacggctagtgtatatttaagagccattggtatagaagataatatttttcctgaaagtgcttacaaaggaaaatatataaaggaaatcgcaaagaatactaacttacaggatgctgtaaatattgatgatctttttaaaagtcttcccaaggatgatgaagagaaaatagataaaattatctcgcatctcaaatctgccagtaagaaagactggaaatcaattaaaaaagtgtcactagagaatgttctttcagcaattgaaaaagacctaaaagattttggtgtaacttttgataattggttcttagaatcctccttactcggtgctgaatcaaaaattgatgcagctgttcaacaactaaataccaataatctaacagataaccgagatggaaatatctggtttaagtcttctgattttggagacgataaggatagagttttgataagagcggatggaagacaaacctactttgcttctgatgttgcttatcacaaagataaattagatagaggttttgatgaaattataaatatttggggctctgaccatcatggatacataaagagggttaaagcgtctatggaaggcctgggctatgacaaaaataaactttctgtgaagcttgtccagtttgcaaatctaattaaaagcggttcgccagttaagatgtctacaagaagcggagaattctactctctcaaggacttgttaagagatgttagttctgatgttgctagattttattatctttcaaaacaaactgatc

SEQ ID NO: 300555 - DNA, 590 bp, Unknown
  Bacterial polypeptide expressing nucleotide sequence isolated from the Sargasso Sea
catgaaagaaaaaattaagaagagcttgcgaagcataattatagatttgtatgggagttcagaatccattcatgatgaatttgaaataagcatccaagacaataaagagaagcaatatggtgatctcgctagcaatatagctttagtgctagccaaacccctaaaaagaaatcctaaagagattgctgaagaaatcaaaggcaagtttataactgacaaggaaatagtaaaagttgatgttgcaggccctggttttatcaactttttcttatctaaagagtcgcatggcgcaattttgagagatatctcaattcaaaaagataagtttggaaaatttgaatccaataataaaaaggttcttatcgaatatgtctcaagcaatccaacaggtcctttacatgttgggcacggaagaggtgcagtttttggatctgtattatcgagacttttgaaggaagcaggatttcaagtagatgaagaatattatgtaaatgattttgggagacaaatgaatattctttctgtgagcttatggattagatatgcacagatattcgataagaatataaaaatgttaaataatggttatc

SEQ ID NO: 300556 - DNA, 685 bp, Unknown
  Bacterial polypeptide expressing nucleotide sequence isolated from the Sargasso Sea
aatgaatatatttgaggaatacttaaataaaattttagataaaattaaattagcaagtgaagaaaagctaattttattacctgaaagtttatctggtataaatgtagatatacctcctaaaaaatttaaatgcgatctgtcaactaatgttgcaatggttttatctaaaacaaataatgaaccaccaattaaaatcgctgaaaaattaaaagatattatttttaaagacgataataatattgagaagatagaaatagcaaagcctggatttataaatattattttaaaaaaagagttttggacttcatttcttttaaatataaataatcttaataattttggcgcagcacttaagggctctaaaaagaaacatttaattgaattcgtgtctgcaaatcccactggaccattacacgttggtcattgtagaggtgctattctaggtgatgttatctctaatttgctaaaatttaacaatcaagaagttgtaaaagaatattatgtaaatgatcatggtaatcaaattttacattttactagatctgtatatttgagaataaaagaaaaattagataatcaaacttttccactaaatgaggatgatttatatccaggagaatacatcaaggatatagcccaacatattatagataataataaagatttacaatttgatgaatatgaa

SEQ ID NO: 300557 - DNA, 670 bp, Unknown
  Bacterial polypeptide expressing nucleotide sequence isolated from the Sargasso Sea
ctgaatgagatcggcctcgagctttctagaaacgccaacaatgatcacggagacttttccagcaacattgctctcaagttggccagcaagctgaagagtcctccaatgaaacttgctgaggaaattattggatctcttgaaacccccgctgagctagagctggcagagtgtgttaagcctgggtttataaacttctacctttctgctgaaaaaaaacacggcgttctcgaaacaatattcaatcacggcagggactttgggtcgtcttgtgctccaaaaaaaatgagggttcttctagaatttgtctcagcaaacccaactgggccacttcatgtagggcatggtcgacatgctgcctttggtgattcgctggcgcgtcttctaaaaaaagccggtcatgaggtttttactgagtattatctgaatgatgcgggcagacagatagatattctttgtttaagtgttattttggagatgcttcgtgctgaagggctcgatttaaagaatatcaatggcctttacaaaggcgcatacatcaaagaaatttctcaagaattaatcaaagaaggtttcgagataaataaaaaagtcttaattccaaagcttggcggatcagctgatgaaattgttgatgcgcttatattagaaatgaaaaatgttataggctccg

SEQ ID NO: 300558 - DNA, 736 bp, Unknown
  Bacterial polypeptide expressing nucleotide sequence isolated from the Sargasso Sea
atgaatatttttgaactatatttagataaaattaaattaattattgttgagcttagtaaaaaaaatcaactcatcattccagaaagtttcaatggaattaatgcggaaataccacctccaaaatttgattgtgatatttcaactaatgttgcaatggttttatctaaactaaacaaaacctctccaatagaattagcagaaaaacttgcacctgaaataaaaaaaagtgatgatcaaattgacaatatatccattgctaaacctggtttcataaatattaaatttaagccatcattttggtcaaattttattaaagagataattgataatgctgaaaaatttggaattaatgagaaagagaaaaaaaataattacttagttgaattcgtatcagctaatcccacaggacccttgcatgtcggtcactgcagaggagctattttaggcgatgtcatttctaatgtgttaatatttaataagcacaaggttacaaaagagtattatgttaatgattatggtaatcaaattataaattttacaaaatcagtatattttagaattagagaaataaagtttaacgaaacttttcctcaagataaccctgatttatatccaggagattaccttattgattttgcaaaaaatatagtttcggataattcagatctaaattttgataattatgatcaaataagcgataagttaacaattatatctatagaacaagctctacttt

SEQ ID NO: 300559 - DNA, 625 bp, Unknown
  Bacterial polypeptide expressing nucleotide sequence isolated from the Sargasso Sea
ctgcagaaaattccaccttcaaaatttgatagtgatatttctactaacgtagccatggtcctttctaagattaataataaatcttcattagatctggcgtcaatcttggcagaaaaaatcaaaaaaaaggataagtttattgaggatatatcagtagttaaacctggttttatcaatattaaatttaaacctattttttggacaaactttattaaagaagtaattaaaaattctaattcttttggaacaaataaaaatattaaaagaaattacctaatagaatttgtatctgccaatccaacaggtcctttacatgttggtcattgtagaggagcaatattaggcgatgtgatggctaatcttttattatttaataataataaagttacaaaagagtattatataaacgactacggtaatcagattataaattttacaaagtcagtttattatagaataagagagatttcttttaatgaaccttttccagttgataatgaaaatttatatccaggagactatttaattggttttgctcaaaacattttaaactcaaataaaaatattgattttaaaagttttgacaaaatatctcaagaattgacttctttagctattaatgagg

SEQ ID NO: 300560 - DNA, 805 bp, Unknown
  Bacterial polypeptide expressing nucleotide sequence isolated from the Sargasso Sea
aattacggaaaaaatgaattaggatgtaataaaaacattctattagagtttgtttctgcaaatccaacagggccgttacatgttgggcatggtaggggtgcagtatttggagattgcttgtcaaatctcttaggtttctctggttataatgttacaaaagaatactatgtgaacgacgccgggaaacaaataatgatcttaaccctttccgttttatatagataccatgaattaataaatgagagttttaaaaagtttttcaaagacttttatcaaggggattatatatgggatattagtgctcatttacacagagaatatggtgatattttttttattgaaaatttagaaaatataaagttagacgaacttgatcaaacaatattagaagtaaaaaataatcttaaagataagtttgaaatcttaagagaagagagcgtaaattacataatacaagatatcaataaaacactcaaaaatattgatgtaaactttgataattggtatttagaaagtgatctgttaaaaagtgacatgctaagaaaaacattagataaactagaatctaaaaatatgattgaaaaaaaagaaggagctttatggtttaaatccaaagataattctgacgatacagatagagtgcttgttaaatctaatggagatcacacttatttcttaagtgatattgcatatcatcaagctaaatctaataggaattatgatgtattattaaatgtttggggagcagaccaccatggatatgtaccaagaattaaaagtgcttttcatgaaattaaaagaaata

SEQ ID NO: 300561 - DNA, 697 bp, Unknown
  Bacterial polypeptide expressing nucleotide sequence isolated from the Sargasso Sea
cattccgggactctgaaaataattaaagatatccttaataaaaatactattagagaggaagcagattcaaaaaaaattcaagttgaatttgtctcagcaaatccaactggtccacttcatgttggtcatggaagaggagctatttatggcgatgtaatttcaaaactactcgaaaaaaaaggccacgaagttcaaaaggagtactatgtcaatgatgcaggaaggcaaatagatattcttacggctagtgtatatttaagagccattaatatagaagataatatttttcctgagagtgcttacagaggaaaatatataaatgaaatcgcaaagaatgctaatttacaggaagctgtaaatattgatgatcttttcaaaggtcttcccgaggatgatgaagaaaaaatagataaaattatcttgcatctcaaatctgctagcgagaaagactggcaatcaattaaaaaagtatcactagagaatgttctttcaacaatagaaaaagaccttgaagattttggcgtaacttttgataattggttcttagaatcctctttactcggtgctgattcaaaaattgatgcagctgttcaacaactagatacaaataatctaatagataatcgagatggaaatatctggtttaagtcttcagattttggcgatgataaggatagagttttaataagagcagatg

SEQ ID NO: 300562 - DNA, 733 bp, Unknown
  Bacterial polypeptide expressing nucleotide sequence isolated from the Sargasso Sea
aattgaaatagcaggttcaggatttttaaatataaacttatcagacagttttcttatgaattttgttaacttagttttaaaagatcaagacaaatatggttctaacaaacttaaaaaaaaatataacattgaatttgtttcagcaaatcccacaggaccacttcacgtaggtcactgtagaggagcaatttacggagacgttttagctaatttaatcaaatttaatggaggtaatgtagtaaaagaatattatataaatgattacggatcacaaatttttaattttacaaaatctgtatatttaagacttcgagaaattaaatttaatgaaacgtttataaacaatcaaaacctttatccaggtgaatatattaaagacatagctagtgaaattttaaaagaaaattcagacatggatgtcgatgattttgaaaagtcttttgaaaatttaaaaaagttatcactggatggctcaatgaaattaattaaaagagatttaaaaaatttaggaattattcacgataattttatttcagaaaatgatcttgtaaaaaaaaaattaataacaaaagtgataaagaaacttgaaaaagctaagtatgttaaattaggttatttacaacccccaaagggtgaagaaaaaaaagattggaaaaaaattaaaagattaatttttaaatcttcaatttttggtgatgatagtgatcgtgcattacaaaaaaatgatggttct

SEQ ID NO: 300563 - DNA, 431 bp, Unknown
  Bacterial polypeptide expressing nucleotide sequence isolated from the Sargasso Sea
catgaaagaaaaaattaaggaaagcctgtacagcataattatagatttgtatggaagttcagaatttattcacgatgaatttgaaataagcatacaagataataaagaaaaggaatacggtgatctcgcaagtaatgtagctttggtgctagccaaacctctaaaaagaaatcctcgagagattgcagaagaaatcaaaatcaaatttataactgacaaggaaatagtaaaagttgatgttgcaggacctggttttattaactttttcttatctaaagagtcacatggtgcaattttaaaagatatctctattcaaaaaaataattttggaaagattgaatcgaataatcaaaaagttcttattgaatatgtctcaagcaatcccacgggccctttacatgtaggacatggaagaggtgcagtttttggga

SEQ ID NO: 300564 - DNA, 802 bp, Unknown
  Bacterial polypeptide expressing nucleotide sequence isolated from the Sargasso Sea
aatgaatatttttgataaatatctagaaattatttataaattaataaaagatgaaagtgataaaggtaaacttattttaccacataaactcaattctataacagttgaaatacctcctgaaaaatttgattgtgatttgtcaacaaatgtagcaatggtattgggtaaaattaataaaaaaccacccttaatccttgctgaacaaatcaaaaaaagactaagtgaagttttagatattaatgaaattaaaatagtaaaacctggttttataaacattaaattaaaaaatgattattggggtttattcacaaaagatattttatcgaactcaaaagattttggtgtaaatttaaaagaaaaaaaaattagttatttaattgagtttgtgtctgcaaatcccactggacctttacatgttggtcattgtaggggtgcaatacttggtgatgttctttctaatttattaatctttaacaaacataatgttacaaaagaatattatgttaatgattatggtaatcaaattttattctttacaaagtctgtttttttaagaataagagaaatattatttaaggaaccttttccttttgataatccagatttatatccaggtgactatttaatagaaatatctaacaatatcatcaacaacaattctaaacttaaatttgacaattttgaaactgtctcagagaaacttactgaaatttcagtaaatgagtctctgaaaatcattaagaataatttaaataatttgggtattaaacatgataattttgtaagtgagaaatctatagta

SEQ ID NO: 300565 - DNA, 768 bp, Unknown
  Bacterial polypeptide expressing nucleotide sequence isolated from the Sargasso Sea
acaaacatcgagttcttataagagaggatggaagagcaacttattttgcatcagatgttgcttatcataaaaataaagttgatagaggttttgataaattaataaatatttggggtgcagaccatcatggttatataaaaagaattgaggcatctattgaagcattaggatcaagcaaagaaaaactaattgttaaacttgtccaatttgcaaatctttttaaagaaggcaaaaaagtaaaaatgtcgacaagatcaggtgatttttttactctaaaaaatctaattgatgatatcggtactgatgcagcaagattttactacttatcaaaacaagcagaccaacatttagattttgatatagatctagcaaaatcagacagtaaagagaatattttttattatattcaatatgctcatgccagaattgcttctttagaagagaaagcttcaaaaaagaattctaaaattaaaacaaatatcaataacattcaaaataataactataaagaatgcgataagctgattcatgaaacatcaaaatatccaaatgttgttaacaaggccgcaaacacacttcagcctcatttagtaatctattatttgagagacctagctcaattatttcatagctattacaacgacaatcatgttctttcagaaactgaccaaaatattgaatcaattcttgcgtgtttactatctgtcagacaagtaatttcaaatggtctagaccttcttggaatatctcctattgaaaaaatgtgat

SEQ ID NO: 300566 - DNA, 730 bp, Unknown
  Bacterial polypeptide expressing nucleotide sequence isolated from the Sargasso Sea
ttgcatactggcataaaaaaattaccaaaaataagtaaagcgcatgattccagcttcttctctgagacagttgagagaacaagggattcaagtcatggtgattttactagtaatattgcgctcaggcttgccaaatctttaaaaaaaaatcctagggaactggccaatgaaattattaaatatattccaagaaataattcaataaagaaaatcgaagttgcagggccaggatttatgaatttctatcttgatgattcagcttatcatattgaaatagagaaaattttatcgaataaagatctaatagaaaaaaataaagactttaaaaagcataagttacttcttgagtttgtttcagctaatccaacaggtccattacatgtcggtcatggaaggcatgcagcatttggagcatccctaagaaatatccttgaagcggtcggttatgatgtaaaaagtgaatattatgtgaatgattctggaagacaaatggatattctttgcattagtgtgattattcatttattacagagagaaaatcaaaaaatttctatgccgttagccggttatcaaggtcagtatattaaaacaatatcactagccattgatcaaaaatttaatgaagatgagattaagttaaaagagctcatacccaaaatagacgatagaaacaatcaagatcaatacatggattgtttaattgaaaacacaaaaaaacttatagcacaaa

SEQ ID NO: 300567 - DNA, 676 bp, Unknown
  Bacterial polypeptide expressing nucleotide sequence isolated from the Sargasso Sea
atgaatatctttgatctgtaccttgataaaataaaaaaaattttattagatctatcaaaaaaaaataaactaattttaccagataatttgaatggaattactactgaaatacctcctgcaaattttaatagtgatatttcaacaaatgttgcaatggtattatcaaaaattaataaaaaatctccaacggatttagctcaaattttagctgatggtattaaagaaaatgatgacttaatagacgatatatcagtagttaaacctggatttatcaatattacttttaaacgaattttttggacaaactttgttgaaaaaattactagtaaccccaaagattttggaagaaacataaaagaaaaaaagaaaaattatctagtagaatttgtttcagctaatcctactggccctttacatgtaggtcattgtagaggagcaatattaggtgatgtaatagctaatattttactattcaataaacataatgttattaaagaatattatgtaaatgattatggtaatcaaattttaaattttacaaaatctgtctatttaagaataagagaaattatttttaacgagacttttccaacagataatgaggatttataccctggtatttatttaatagattttgctaaaaatatcattaataaaaaaaaagataaaagactta

SEQ ID NO: 300568 - DNA, 757 bp, Unknown
  Bacterial polypeptide expressing nucleotide sequence isolated from the Sargasso Sea
aatgctcataatgatcctaattattttctgaattcttcaaatacctccaaagaaaaaatacagatagagtttgtttcagcaaatccaactggtccattgcacgtgggtcacggccgaggtgctgcttatggagacgctattggacgaatattagagcgactgggccatgaagtatctagagaatactatgttaatgatgcaggcaggcagattgacattctagcctgtagtatttttttaagaaagtttgaatgttttaacaaaaatgaatttcctgaatcagcatataagggatcgtacattttagaaattgctgatgcaatagaacttgatattggtataactaaatctgaaaaagaatccctaatagataatcttccaaatgataatgaagaaagaatagacgctctgattgagcgtataaaaataaattatccagagacctggtcgaaaataagggactttggccttagctatgttattgaatctatcagaggggatttaacaaaatttaaagtgatatttaataattggttttttgaatcatcacttggagagctttcagataaaaaatcggaaatttcaaaagcactggctaaagtacaaaaagatcatgcgtatgaaaaaaatggagctatttggttagagtcctcaaaatttggtgatgataaagatcgagtaattattcgtgaagatggcagaggaacgtatctatctgctgatttggcgtatcacagaaataagttagataggggct

SEQ ID NO: 300569 - DNA, 790 bp, Unknown
  Bacterial polypeptide expressing nucleotide sequence isolated from the Sargasso Sea
atggatatactagaaaaatataagaatatattaattactgagcttaataaatcttattcaaaggaagatttatcgaatatatcttttgaatttccaagagatacttctcacggtgatttttctacgaatgctgcacttattttatcaaaaaaattaaaaatgaacttagatcagatatttttagaagttaaaaagttttttgaagatagtggcgattttaaagatatcgtattagcaaaatcaggttttattaattttttcgttaaagataatattttacatgattttattcgagaggttttaaaaaatagagaaaattttggaaaaaaagaacttggaaaaggagagaagattaatattgagtatgtttcagctaaccctacaggacctttacatgttgggcatacaaggggagcagtttttggtgatacgctagctaatatatttgattttgtgggttttgatgtttgtagagaatattatattaatgactcaggtgagcaaataaaaaatttagcaaaatctgtttatttaagatatttacaaaatttttcagataatgaaattttgataccggataacctttatcctggagagtatttaattcctatagcaaaaaaaatcagtgacgagcatggagaaaaattcctagataaagatgagagtgaatggttagatttttttaagaaagaatcgatatctagtataatggatattattaaaagcgaccttaagtctcttgaaataagtcatgatgtatttatctcagaaaaaagctttatggaagaag

SEQ ID NO: 300570 - DNA, 754 bp, Unknown
  Bacterial polypeptide expressing nucleotide sequence isolated from the Sargasso Sea
tctgggactctgaaaataattaaagatatccttaataaaaatactatcagagaggaagcggactcaaaaaaaattcaagtcgaatttgtttcagcaaatccaactggtccacttcatgttggtcatggaagaggagctatttatggtgatgtaatttcaaaactacttgaaaaaaaaggtcacgaagttcaaaaggaatactatgtcaatgatgcaggaagacaaatagatattcttacggctagtgtatatttaagagctattgaaatagaagataatatttttcctgaaagtgcttacagaggagaatatataaaggaaatcgcaaagaatgctaacttacaggatgctataaatattgatgatctttttaaaagtcttcccgaggacgacgaagagaaaatagataaaattatctcgcatctcaaatctgctagtgagaaagactggcaatcgattaaaaaagtgtcactagagagtgttctttcaacaatagaaaaagaccttgaagattttggtgtaacttttgataactggttcttagaatcctctttactaggtgctgattcaaaaattgatgcagctgtccaacaactaaatacaaataatctaatagataatcgagatggaaatatctggtttaaatcttctgattttggtgatgataaggatagagttttgataagagctgatggaagacaaacttacttcgcttctgatgttgcttatcataaagataaattagatagaggct

SEQ ID NO: 300571 - DNA, 643 bp, Unknown
  Bacterial polypeptide expressing nucleotide sequence isolated from the Sargasso Sea
aatgaatatatttgaggaatacttaaataaaattttaaataaaattaaattagcaagtgaaaaaaaactaattttattacctgaaagtttatctggtataaatgtagatatacctcctaaaaaatttaagtgcgatctgtcaactaatgttgcaatggttttatctaaaacaaataatgaaccaccaattaaaattgccgaaaaattgaaagatattatttttaaagacgataataatattgagaagatagaaatagcaaatcctggatttataaatattattttaaaaaaagagttttggacttcatttcttttaaatataaataatcttaataattttggtgcatcacttaatggctctaaaaagaaacatttaattgaattcgtgtcagcaaatcccactggaccattacatgttggtcattgtagaggtgctattctaggtgatgttatctctaatttgttaaaatttaacaatcaagaagttgtaaaagaatattacgtaaatgatcatggtaatcaaattttacattttactagatctgtatatttgagaataaaagaaaaattagataatcaaacctttccactaaatgaggatgatttatatccaggagaatacatcaaggatatagcccaacat

SEQ ID NO: 300572 - DNA, 526 bp, Unknown
  Bacterial polypeptide expressing nucleotide sequence isolated from the Sargasso Sea
aatgaatatatttgagaagatagaaaatatcgtcgagcaaacgcttcaacaaatgccattctggtgtgaaaatgaaaatttgccacctattaatataaaattggaggcgccacgagataagacacatggagagctttcttccaatatagctatgatacttgcaaaaactattggaaaaacaccaagggattttgctgctgagatatgttcccatcttgcggatgttgagttaatttgctcagccaccgtcgcgggacctggatttattaacctgaaattaaaaaccgatgtatggtttgaatgcgttagatgcatccttcggttgggaaaagattttggatcttccaactttggaaaaaacgaattcataaatatagagtatgtttctgccaatcctacgggcccccttcacgctgctcatgcacgaggcgcagttgttggcgacacgctggctcggctcctaaaaaaagtagggtttcgagtttgtaaagaatactatgttaatgatgctggcaccaaagtagat

SEQ ID NO: 300573 - DNA, 729 bp, Unknown
  Bacterial polypeptide expressing nucleotide sequence isolated from the Sargasso Sea
tttgtataatcaaattttaacttcgctgaatgattttattgataatgatctgtcttttgatcccgatcaaaagaaaacgttattggataagcacaagctaacccttgccaattctctgcgaaagggtcactggactacaaacctttgtttaattgcatccaatcttgcaaagaaaaatcctcgagatatagcttcagctctaataccaaagctagaaaatcaacctgaaatcgcaaaggttgaattagcaggccccggtttcgtcaatatatttttaaccagggaagcattttttaaccaattggatgatgtcgacaaaaatccaatttcttttgtaaagtcttccaatgcagtcaaagaaaaaatacagatagagtttgtatcagccaacccaacaggtccattgcatgtgggacacggacgcggtgctgcctatggagatgccattggtcgaatcttgcagcaactaggtcatgaagtatctagagaatattatgtaaatgatgctggtaggcaaattgacattttggcatgcagtatttttttaagaaaatttgaatgccttgatgagaaggcttttccaaactctgcatacaaagggtcctatatattagagattgctaaaggcgcagagatagatcaagcattaaccgaatcagataaagaaaaattaataaccaatcttccagaggatgacgaagataaaatagatgaattaattgaacgaat

SEQ ID NO: 300574 - DNA, 725 bp, Unknown
  Bacterial polypeptide expressing nucleotide sequence isolated from the Sargasso Sea
aatgaatatttttgaattatatttagataaaattaaatcaattatttttgaacttagtaaaaaaaatcaacttatcattccagaaagtttcaatggtattaatgcagaaataccacctccaaaatttgattgtgatatttcaactaatgttgcaatggttttatcgaaactaaataaaacctctccaatagaattggcagaaaaacttgcacctgaaataaaaaaaagtgacgatcaaatagaaaacatatcaattgctaaacctggtttcataaatattaaatttaagccatcattttggtcaaactttattaaagaaataattgataacgctgaaaaatttggaattaatgagaatgagaaaaaaaataattatttagttgaatttgtatcagctaatcctacaggacctttgcatgttggtcattgtagaggagctattctaggtgatgtcatatctaatgtgttaatatttaataaacacaatgttacaaaagagtattatgtaaatgattatggtaaccagattataaattttacaaaatctgtatattttagaattagagaaataaaatttaacgaaccattccctcaagataaccctgatttatatccaggagattaccttgttgattttgcaaaaaatatagttttggataattcagatttgaattttgatgattatgagaaaataaacgataagttaacagctttatctatagaac

SEQ ID NO: 300575 - DNA, 975 bp, Unknown
  Bacterial polypeptide expressing nucleotide sequence isolated from the Sargasso Sea
aatattgcactgcaagtttcccgagaattaaatcaaaatcctgaagaaatagcgaaaataattataaaaaatctagaacttcctgattttataaaaaatgtatctttcaaaaaacctggatttataaatttctttttgtcagatcagtggttacaagaaaatttaaaatctatcttaaataaagaaaataattattctaaaaaagagaatttcaataaaaaaattcaagttgaatttgttagtgtaaatcctacaggaaatttacacattggacatgcaagaggtgcagtaattggaagtactttatctaatttattagagacacaaggctttcaagtaaacagagaatattacattaatgatgctggaaatcaaatagaccttttcactgaatctttatatgtaagatatatgaacttatttaataataatttacctatacctgaaaacggatatgaaggaaaagaattagaggaaatagcagaacaaataaaatcagaaaactatgaaaaattcaccaaaatctctaaaaaagaggctctaatacatctcaaagaaataggcatcaaacaaatattaaataatatcaaggatgatctaatcaaactaggagttgagtacaattcatggtttagtgaaaaatctctaattaaaaatggtgaatttacagaaacaattaatattttaaaaaagaaaaatttagtttttgaagaagatggagctacatggcttgattcaaaaaaacttggagataataaaaataatgttctaattaaaagtgaaggaggtgcacctacatattttgctactgatattgcttatcacaaaaataaattccttacgagaaatttcgacatggtaatagatatttggggtgctgatcaccatggacatataaaaagattatcagatgcattaaaagcactgggtgtagaaagaaatagatttgtagtaattttaaaccaaatttgtttc

SEQ ID NO: 300576 - DNA, 792 bp, Unknown
  Bacterial polypeptide expressing nucleotide sequence isolated from the Sargasso Sea
tgttagtgattcttcatcagaaatatcaaattcaataaataaattaaaaaacgacggtaatgcttacgaaaaagatggtgcgatatggcttaatacagatataagcggcgacgacaaacatcgagttctaataagagaggatggaagatcaacttattttgcatcagatgttgcatatcataagaataaagttgatagaggttttgataaattaataaatatttggggtgcagaccatcatggttatataaaaagaattgaggcatctattgaagtattaggatcaagcaaagaaaaacttattgttaaacttgtccaatttgcaaacctttttaaggaaggcaaaaaagtaaaaatgtcgacaagatcaggtgatttttttactctaaaaaatctaattgatgatatcggtactgatgcagcaagattttactacttatcaaaacaagcagaccaacatttagattttgacatagatctagcaaaatcagacagtaaagagaatattttttattatattcaatatgctcatgccagaattatttctttagaagaaaaggcttcaaaaaagaattctaagataaaaacaaatattaataacattgaaaataatagctataaagaatgcgataagctgatacatgaaatatcaaaatatccagatgttgttaacaaggccgcaaatgcacttcaacctcatttggtaatctattatttgagagacctagctcaattatttcatagctattacaacgacaatcatgttctttcagaaactgacgaaaatattga

SEQ ID NO: 300577 - DNA, 902 bp, Unknown
  Bacterial polypeptide expressing nucleotide sequence isolated from the Sargasso Sea
ttaggccatgagcatatcaagccagaaagcgcgtataacgctatgctgcagcctatagtggatagcttaaagcagcagggtttagcggttgaaagtgagggcgctttagtagtgtttttacaggaactggctgataaagaaggtaatccttcgccttttatcgtgcaaaaaactggtgggggcttcctgtacgccactacagatttagcggcctgccaataccgtagctttgatttagctgccgatcgaattgtgatttttaccgatgcccgtcaggcgctgcactttaaacaagtggaattagtggcccgaaaagctggtttgttaaaagaccatgtggcttatgatcactgtccttttggtaccatgatgggtgaagacggtaagccgtttaaaacccgtaccggtggcactgtcaaactggctgaattgttagaagaagccgtagtgcgtgcaaaggccgtggttgagcaaaagtcctctgatttaagcgctgaagaaatggcggaagtggcacgcaaagttggtataggtgcagtgaagtttgctgacttatcgaaaaaccgcaccagtgattacgtctttagctgggatgcgatgttaagttttgaaggtgctacagctccttacctgcaatatgcctatacccgggtcagcggcattctgcgcaaagccggtatcgacgagagctttgtagctccgctgcaactgctggaagagcaggaaaagcagttagcagtcaaactgttacgcttagaagaaactttacaggccgtgatgaaagatgctgtgcctaacctgttgtgtaactatttatacgagttatccagccagtttatgagtttctacgaagcttgccctatttttaaagaaagcattgaaccagatataaaaaacagccc

SEQ ID NO: 300578 - DNA, 698 bp, Unknown
  Bacterial polypeptide expressing nucleotide sequence isolated from the Sargasso Sea
attgcatactggcataaaaaaattaccaaaaataagtaaagcgcatgattccagcttcttctctgagacagttgagagaacaagggattcaagtcatggtgattttactagtaatattgcgctcaggcttgccaaatctttaaaaaaaaatcctagggaactggccaatgaaattattaaatatattccaagaaataattcaataaagaaaatcgaagttgcagggccaggatttatgaatttctatcttgatgattcagcttatcatattgaaatagagaaaattttatcgaataaagatctaatagaaaaaaataaagactttaaaaagcataagttacttcttgagtttgtttcagctaatccaacaggtccattacatgtcggtcatggaaggcatgcagcatttggagcatccctaagaaatatccttgaagcggtcggttatgatgtaaaaagtgaatattatgtgaatgattctggaagacaaatggatattctttgcattagtgtgattattcatttattacagagagaaaatcaaaaaatttctatgccgttagccggttatcaaggtcagtatattaaaacaatatcactagccattgatcaaaaatttaatgaagatgagattaagttaaaagagctcatacccaaaatagacgatagaaacaatcaagatcaatacatggattgtt

SEQ ID NO: 300579 - DNA, 946 bp, Unknown
  Bacterial polypeptide expressing nucleotide sequence isolated from the Sargasso Sea
cccgctgaactagagctggcagagtgtgttaggcctggttttataaacttctatctttctgctgaaaagaaacacagcgttctcgaaaccatattgaaacaaggcagggattttggctcgtcttgtgctccagaaaaaatgagggttcttctagaatttgtctcagcaaatccaactgggccacttcatgtaggacatggtcgacatgctgcctttggtgattcgctagcgcgccttctaaaaaaagcgggtcatgatgtttttactgaatattatctgaatgatgcgggcaggcagatagatatcctttgcttaagtgttatcttggagatgcttcgtgctgaagggctgggtttaaagaatatcaatggcctttacaaaggcatatacatcaaagaaatttctcaagcattaatcaaagaaggttttgagataaataaaaaagtcttgattccaaagctcggcggatcagctgatgaaattgttgatgcgcttatattagaaataaaaaatgttataggatccgagctttttcaaaaaatttcagacaaaaccgtatctcgaatgacaaaattgcttaaagacgacctttcagactttagagttaggcaagatggtttttattctgaaaaatctcttttttctaaaggaaaaattgaagcggcatgtgagatcataaagaaaaacggaaatgcctacgaaaaagatggcgcgctctggcttgagtcgtctaaatacggtgatgacaaagaccgtgtagttataagagaagacggaagatctacctactttgcttctgatattgcataccatcacgacaagaaaatgagaggttttgaccttttaatcaatgtattgggctctgatcatcatggttatgtttcgaggcttgaggcaggtctcgcttcaactgggaacaaagcttctgacttagatgtgattttga

SEQ ID NO: 300580 - DNA, 805 bp, Unknown
  Bacterial polypeptide expressing nucleotide sequence isolated from the Sargasso Sea
aatgaacttctttaatatatatttggacaaaataaaaaaaactgtaattaaaaataaaaaaaaattagatatagcagataatctagctttaagtaaaattacagttgaagtgccacctgaaaaatttaattgtgatttttcaacaaatctttgcttaattttaggcaaaaatataaatcaaaatccaagaattcttgctgataagataaaagatattcttattgatgaaataaatcatttttcttcaattgaaattgccggtcctggttttttaaatattaaactttcaacagatgcatggttatatattataaataatattgaaaaaaataagaaaacttttggatcaaacaaaaacaacaataaatataatatagaatttgtttcggccaaccccactggacccttacatataggtcattgcagaggagcaatttttggtgatgttttatctaatctattaaaatttaatggcaataaagtaataaaagagttttatgttaatgattatggtaaacaaatagaagatttttctaaatcaatatatttcagattaaaagagattaagtccaaaacgaattttcctaacgatgaaaatctttatccaggtgaatacattaaagaaatttcaaagaaaattttaaaaaggcagccaaatattaatcttcaagattttgaaaaaattaaacaaaacttaaaaaaacaaggactcaaatactcaatggatttaattaaatctgatttaaaggatttaggaatctcacatgatattttcttttctgaaactaatttagtaaaagaaaaa

SEQ ID NO: 300581 - DNA, 469 bp, Unknown
  Bacterial polypeptide expressing nucleotide sequence isolated from the Sargasso Sea
gatgaatgttttcagtgctttcacggaaattgttgaatcggcgattgggtctctcgtgtccgacggcacgctgcccgaaggcacggatggagtgcggatcagcgttgatccgccgcgcgatcccgagcatggcgatctgacaaccaacgcggccatggtgctggcaaatcctgctggcctgaagccacgtgagctcgcagagtccttagccgaacggctgcgtgcgcaggacgggatcgccacagtggacgttgccgggcccggcttcatcaacctgcgactgcatgacgactattggcgagatttgctgcgggacatcctcgcggccggcgaggcctacgggcagagcgccctggggcagggacgtgcggtgaatatcgagtatgtgtctgccaatccaactgggcccctgcatgtacgccatgcccggcgtgcggtcgtcggcgacgtgctagcagcgctcttggcc

SEQ ID NO: 300582 - DNA, 1267 bp, Unknown
  Bacterial polypeptide expressing nucleotide sequence isolated from the Sargasso Sea
atgcttcataatttaaaaaaaaatctctttgagatactagttaaaattgacaaaaatattataatcaatattgatgatatagaagttgaaactctatttgataaaagaggtgattttacaactaatactgctcttaaattttcaaaaatatacaactcaaatccaaaacaattagcaaatttaattacagaaagccttaatataaatgattttgaaaaagtagaaatagcaggtccgggttttattaatttcactcttaaagatggaacttttaattctcaattaattaataacaaaatagagtttaaaaatactgataaagtaaatattgaatttgtctctgcaaaccctacaggaccattacacttagcacacggtagaggtgctgttgtcggtgatatcttatcaaatttatttgaatattttggacataaagttacccgtgagtactatgttaataatacaggtaatcagataaatgaatttttatcatcaattctttattcaatatcaaataaaaataatttaagtctcaatgaaaatcaattttataaaggtgattacataaatgatattgctaactactgttacgaaaactttaaatccttatttaataaagagctaagtcctagtgacaaaacaaatattgttaactttgccattgaaaatcttgtcaatcaaactattcaaacgcttagcagtgcaggtattaattttgatgaaatctcatatgaaacaaacattatggaaaaagaatatctaccattaattttagaaaaacttaatcaaagtgaactcatttataaaggacaattaaatgcaccaaaagattatactggcactcaaaaagataatgatttaacaatattcaaatcaacactctttaatgacgatgaagatagggcattaactaagaatgatggatccccaacatattttgcaaatgatatagcttatcatgaagataaataccaaagaggctataataaattaataaatatatggggggcagatcatttaggttatcttaaaagattatcatctgcgataacttccctacatcctgaaatagatttttcagttgttttttgccaaattgtaaatctaaaacgcaataataaaatacaaaaactatcaaaaagagaaggtaatatttttgaattaaaaaatttgataaacgaaattggagttgataactttagatattttatgtcgtacagaaaaaatgatacccatatggatttagacatagatttaataaaaagga

SEQ ID NO: 300583 - DNA, 1735 bp, Unknown
  Bacterial polypeptide expressing nucleotide sequence isolated from the Sargasso Sea
atgaacatatttgaaatatatttagaaaaaataataaaacttttaaaaaaattacaaaaagaaggtttaattgaaattccagatacacttgatggtattaacgtagatatacccccagttaaatttaacgcagatatatcatcaaatgttgcaatggtcctttcaaaaattaataaaaagtcccctatagatattgcaaatcaattactgcctataataaaaaaaaatgatgacaacatagattcaattacaattgaaaaacctggctttataaatattaaattcaaagtgttattttggaataattttttacaagaattaataaaaagttcagataagtttggttttaataaaaacaacaaaaataaaaaatatttaattgaatttgtatcagctaatcctacaggtccactgcatgtgggtcattgtcgaggtgcaattatcggggatgttattgcaaaccttctaagttttaataacaataaagtagtaaaagaatattatgttaatgattatggtaatcaaattctaagttttaccaaatcagtctattttagaataagagaagttttgtataaggaaaaatttccttcagaaaacatcgaactatatcctggtgattatatcgttgatattgcaaataatattatttctgaaaacaaaaacttaaaatttgaagattttgataaagtctcaaaagaactaacaaaactttctattaacgagtcccttaaattaattaaaaaaaatctgaaaaatttaggtattactcatgataattttgttagcgaaacagaaattgttaataataaagaagttgataaagctgttaataatttaaaaaaaaataagtttatttatttgggaaaaatcaaagccccagaagatgaggataaaagcaaatgggtagaaagagaacaattgttatttaaatcaactgaatttggagacgacaaagacaggccacttcaaaagtctgataaatcctggacatattttgctggtgatgttgcttatcatcaaaataaaattaatagaaattttgatgtattaattaatatactcggagctgatcatgcaggatacataaaaagaatttcatccgttgttgaagctctttcaggagataaaaataaattagtctgcaaagtaagccaacttgtaaaattaattaaggatggcaaaccatttaaaatgtcaaaaagaaaaggtgactatataacaatcgaagatttagttaatgaagttggaagggatgctgtacgttttattatgttaagtagaggtagtgacgttgagttggattttgatttttctaaagttaaagaaaaatctaaagaaaaccatctttactatgtacaatattgttatgctagaatttcatctgtttttagaaatttagataaaaatttagagaatccaattaacgttaacaaatatgattttgcttatacggctgatgagataaaaatttttaaaaaattatctgaatggcccgtatgtattaaagtcgcttcaaacaaattagaaccacatagattaccggtatacttatatgaactagcatcagaatttcattcttattggaacttgggtaaggacaatgaaagcaagagatttatagataaaaataataaaatttcagatgaaaaattggtaattttaaaatcggtttctaacgtcattaaaattggcttggatataattggggtgaatagtcctaaaaaaatgtaat

SEQ ID NO: 300584 - DNA, 994 bp, Unknown
  Bacterial polypeptide expressing nucleotide sequence isolated from the Sargasso Sea
atggaatattgctaaaaacttttctttaaaggagatagtcagttctataaaagatgatctcaaaaactttaaagtttactttgataactggtttaatgagtcatctatgggtgacatagctgattcctcatctgaaatttctaaatctataaataagttaaaagatgctggtcatgcttatgagaaagatggtgctatctggttaaatactgatttaagtggtgatgataaacatagagttctaattagagaggatggaagagcaacttattttgcatcagatgttgcgtatcataaaaataaaattgatagaggttttaataaattaattaatatttggggtgctgaccatcacggatacataaaaagaattgaagcgtccattgatgctcttggatccagtaaggataaattggttgttaagcttgtccaatttgctaatctatttaagaatgggaaaaaagttaaaatgtctacaaggtctggagaattttttaccttaaaaaatctgatggacgatattggtcctgatgcagcaagattttactatttatcaaagcaagctgatcaacatctagattttgatatagatttagcaaaaaaagatagtaaagataatgttttttattacatacaatatgcttatgcaagaattgtttctttagaaaaaaaggttttagaaaataattttagtgatgatattaatcttaacagtatagaaagtaacacttatgataaatgtgattttttaattcatgagatttcaaaatatcctgatattatttataaggcctcaaacagcttacaaccgcacataattatttattatctaagggatttagcgcaactacttcatagttactacaatgataatcatgttttatcagaatcaaaggaaaatattcagtccatcattctttgcttatcttctgtgaaacaagttctatcaaatggattaaatatcctagggatatctcctataaataaaatgtaa

SEQ ID NO: 300585 - DNA, 1018 bp, Unknown
  Bacterial polypeptide expressing nucleotide sequence isolated from the Sargasso Sea
atgaggatagaggacaaaataaaagagctaattgttactgcgttgaccaagagtcagggcatgaacaatgatgagataaacgaggttggtctcgagctttctagaaacaaaaataacgagcatggagatttctcaagcaatattgcactgaagttatcgggaaagctaaagcgctctccaatggtcgttgccgaagaaatcatcaactcaattcacgtttccgatgagcttgaacgaacagagtttgtaaaaccaggttttattaacttctatctttcagctgaaaaaaaacatggtgttcttgaagaaatcacaaacaaaggaaaagcatttggatcatcttgtgtttcagaaaaaaagaagattcttttagagtttgtctcagcaaatccaactggtccgctccatgtagggcatggtcgtcatgctgcttttggtgactcattggcgcgtttgctcagaaagtctgggcatgaggtttttacagaatactatctcaatgatgcaggaaggcaaatagacatcctttgtgcgagcgttatgtttgagcttcttttactagaagggcagaagcttggtcaggttgatggtctttataaaggctcatacattaaagagatcgctgtaggtctccgagaggaaggtgtagcgatcaataaaaaaatatctctcaccaaagcaagcggatcggatgatgaaattgttgatgctctcatattggaatttaaggatgttgctggagatgagctttttcagatggttttagagaagactgtcctgcagatgacaaaactgcttaaagatgatctttcagactttagggttagacaagatggtttttattcagaaaaatcgctcttttctgaaggcaggattgaagaggcttgcgggatcattaagaaaaatggaaacgcttatgaaagagatggtgcgctgtggctcgaatctacaaaatatggggacgataaggatcgcgtggtcatcagagaggatggaaggtctacttactttgcatctg

SEQ ID NO: 300586 - DNA, 1267 bp, Unknown
  Bacterial polypeptide expressing nucleotide sequence isolated from the Sargasso Sea
atgaatatatttgattattatcacagctatttactaaaaggtcttaaagattttgaaaaaaaaggagcaattaaaaccccagaaaaaactaatagtattagtgtggaggttccacctgataagtttgatgctgatatttcaacaaacgtttgtatggttttgtcaggtattaataaaagtaaaccaaaagatatatatgaaaattatgtatcaaaacttttaagtaaagacgataatttaaaaaactttgaaattgtaaatcctggttttgtaaatttaaaatttaaaaagaaattttggaactcctttttagaaaaaattgtccaattaaaagaatatggatcaaataagaatgaaaaaactagaaaatatttagttgaattcgtttcagctaatccaaccggaccattacatgtaggccactgtagaggagccgtattcggtgatgtcctttcaaatttactaaaatttaataatcataatgttacaaaagaatattacataaatgatcacggaaatcagataacaaactttactcactcggtcttttacagaattttagaattaaaacacaaaaaaaaatttcctgatgatgaaaatctttatcctggtgaatacataaaagaaattgcacaaaatattatatcaaattctaaaattgataagtttgatgagttggaaccaatatttgaagaattacagaaactttgtattgaaaattctcttttaatcataaagtctaatttaaagaagataggtattgttcatgataattttgtaagtgaaaaaagtataattggaaataaagaagttgaaaaggctttaaaaaaactaaaagagcaaaatttagtttttgaaggaaaaattgaggcacctcaaggagagaagaaaaaaatttctgaaactagaaatcaattattatttagatcaacagaatttggtgatgataaagatagagctttaaaaaaaggtgatgatagttggacatacttcgctggagatcttgcataccataataataagataagtagaaattttgatatactcatcaatattcttggagccgatcatgctggttacatcaaaagaataagttctgttgtagatgccttatcaaaaaataagcaaaaaattgaatgtaaagtaactcaattagtaaaacttattaaagataataaaccatttaaaatgtcaaagaggaaaggtgattatatcactcttgaagatttaataaatgaagtgggaaaagatgcggccaagatttatt

SEQ ID NO: 300587 - DNA, 958 bp, Unknown
  Bacterial polypeptide expressing nucleotide sequence isolated from the Sargasso Sea
atgaatatatttgattattatcacagctctttattaaaaggtcttaaagaatttgaaaaaaaaggagcaatcaaaatcccagaaaaaactaatagtattagtgtggaggttccacctgataagtttgatgctgatatttcaacaaacgtttgtatggttttgtcaggtattaataaaagtaagccaaaagatatatatgaaaattatgtatcaaaacttttaagtaaagacgataatttagaaaactttgaaattgtaaatcctggttttgtaaatttaaaatttaaaaagaaattttggaactcttttttagaaaaaattgtccaattaaaagaatatggatcaaataagaatgaaaaaactaaaaaatatttggttgaattcgtatcagctaacccaaccggaccattacatgtaggccactgtagaggagccgtattcggtgatgttctttcaaatctactaaaatttaataatcataatgttacaaaagaatattacataaatgatcacggtaatcagataacaaactttactcattcggtcttttacagaattttagaattaaaacacaaaaaaaaatttcctgatgatgaaaatctttatcctggtgaatacataaaagaaattgcacaaaatattatatcaaattctaaaattgataagtttgatgagttggaaccaatttttgatgaattacaaaaactttgtattgaaaattcacttttaatcataaagtctaatttaaagaagataggtattgttcatgataattttgtaagtgaaaaaagcataatcggaaataaagaagttgagaaagctttaaaaaagctaaaagagcaagatttagtttttgaaggaaaaattgaggcacctcaaggagagaagaaaaaaatttctgaaactagaaatcaaatattgtttagatcaacagagtttggtgatgataaagatagac

SEQ ID NO: 300588 - DNA, 1172 bp, Unknown
  Bacterial polypeptide expressing nucleotide sequence isolated from the Sargasso Sea
atttttctgctcaaatacatataaaggaaaatatatagaagaaattggtattgcctttagtaaagaaaaagttgttacttataaagaacctaaattaataattaacaatcttcctggggatgcagaagaagaaattgaccaactaatatctaatctaaaagagatggataaaaaaatttggaatgaagtgaaggatttctcactaaaaaatattctatatctaattaaacaagatctagaaaactttaatgtaaattttgatagctggtttcaagaatcttctcttggcgatttagaagacccaaattcacaaatttctactttaataaataaactaaaagaagatgataaggcatacgagaaagatggagccctttggctaaatactgatgtaagtggtgacgataagcatagagtattgattagagatgatggaagagccacctattttgcatctgatgtcgcatatcataaaaataaagtagatagaaagtttgatacattaattaatatctggggtgccgatcaccatggttacataaaaagaattgaagcctcgatagaggcattgggatcaaggaaagaaaagctagttgttaaattggtgcagtttgcaaatctatttaaaaacggtaaaaaggtaaaaatgtctacaaggtcgggcgaattttttacattaaaagatctaatcaaagatattggagctgatgcagctagattctattatttatcaaaacaggctgatcagcatttggattttgatatagatctagcaaaatcagacagcaaagaaaacatcttttattatattcagtatgcgcatgcaagaatcttttcattagagaaaaaatttaatgagaacaatcaaggtaaaaatattagctctataactgcagaaagtatttcatacgataaatacgataaattaattcatgaaatatcaaaatatccaaatatcgttaagaagtctgcgcaaactcttcaaccgcacttaattattttttatctaagagatttgtctcaactatttcatagctactataacgacaatcatgtgctctccgaatcagaaaaaaatatggaatcaattattttttgcttatccgccgttagacaaactattgcaaatgggctcactctattaggcattagcccaatgcaaaaaatgtaat

SEQ ID NO: 300589 - DNA, 1247 bp, Unknown
  Bacterial polypeptide expressing nucleotide sequence isolated from the Sargasso Sea
gttgcaagaaaacaaagacaaggagcatggagattacgcaagcaatatagcgatgatacttgctaaggacctatctctaaactctaaggatttagccgatcaaatatctaatgaatttcctttggacaatcaaatcttaaaagttgaggtagctggacctgggttcataaatttcttcgtttctaaggaaacacatgctcaggttttaaatactatagatttagaaaaggaaaaatatgggcatagtaaaaagaaacttggcaaagttctaattgagtatgtttctagtaaccccactggccctctgcatgttggccatgggagaggagcggtatttggatctgtattggcaaaacttctaagggcagcaggacatgaagtagacgaagaatactatgtaaatgactacggaagacaaatgagcatacttacggtaagcgtttggttgaggtacctacaaaactcaaacaaagaaataataatgagtgacttgggttatcaaggtgactacataaagctaattgcagaaggtttagttaaagaaaataagaaaaaatatctgctttctagcgaagaacatgaaagcataatgcccctacttaaagttcagaaagatgaaagtgacatagactctttaatctcttttatgcaaaaaacattagcagatggatttttagaaatcaggtctttcgctttagataatatgctaaatctcataaaggtggacctcgacaaatttggggtaaatcacaatctatggttttttgaatcttctctttacagtgaagataggggtaatgagtccaaagcaaacgaagctatatcaaagttaacttcaaataacttcgtttatgaagaagatggtgcactttggtttaaatcatctgagtttaaagacgacaaagatcgtgtattacaaagaagcaacggcgaatatacttatttttcatccgacgtagcctaccatctagataaatacaatagagcatacgacagaataattaatatctggggctctgatcaccatggctatttaccaagagtcagggcagcaatggaagcatcaggtaaggacactgaaaaacttgaagtagtatttatgcagtttgcaaaccttattaggaacggggaaaaaatttctatgtctacccgaagcggagaatttatttcgctaaaagaacttctggaagaagtgacgtcagatgcggcacgattcttttatattaataggaaggccgatcaacatt

SEQ ID NO: 300590 - DNA, 1732 bp, Unknown
  Bacterial polypeptide expressing nucleotide sequence isolated from the Sargasso Sea
atgaatatatttgaaaattatttattaaagatagaaaaaattattaagtctgcccaaaaagataatttgttagagttgccagataatttatcaggcataaatgttgatataccacctgcaaaatttaatggagatatttccacaaatgttgcaatggttttatccaaaattaataaaaaacctccactagaacttgctaaacagatagctgacctaataaaaaatagtgataacaatattgatgaaattagtattgaaaaaccaggttttatcaatctaaaatttaaaactaatttttggaatgtcttcatattagatgttttaaataattcatcatatggatgtagcacgagtgggaaaaaaaatagttttttagtagaatttgtatctgcaaatccaactggacctttacacgtaggccattcaagaggtgccatacttggagatgtgatatctaatcttttatcctttaacggtcataaagttaccaaagaatattatgtaaatgattatggaaatcaaatctctcattttacaaaatctgtttatttaagaataaaagaaattctttacgatgaaacttttccgatagacgataaggaattatatcctggagactatcttatagatatagcaaaaaaaataatttcaaaaaacaaagatttagattttaaaaattttgattcagtttcagaaaaactaaaaaaactttcaatacaagaatctttaaaattaataaaaactaatttggaaaatcttggcataaagcatgataattttgcaagtgaaacagatgtaataaataataatgaagttgatgaagtaattcaaaatttaaaagaaaaaaaatatatttatgagggaaaaattaaagcaccggaaggagaaagcaaagagaactgggtagaaagagagcaattattgtttaaatcgacagattttggtgatgataaagatagagcactacaaaaagaagataagtcttggacatattttgcaagtgatgttgcttatcataatacaaaattaaaaagaaattttaatattcttataaatattcttggtgctgatcacgctggttatattaaaagaataacttctgtagttgaagctttgtcaggtgaaaaaaataagttaatttgcaaagtaagtcagttagtaaaactgattaaggacaaaaaaccttttaaaatgtctaaaagaaaaggtgattatattactattgaggatcttattaatgaagtaggtaaggatgcaacaaggtttattatgttaagcagaagtagtgatgcggaaattgattttgattttgacaaagtaaaagaaaaatcgaaagaaaaccctatttactatgttcagtatgcatatgctagaatttcgtcagtttttagaaatacccaaaatgatattaatagcaatcttgagattaaaaattcagattttaattttgcgaatgaagaaataaagttattcaaaaaaattagtgaatggcctaaatgtgttgaagtttcctcagaaaaattagaaccacatagaatttcagtttatctttatgaattagcttctgaatttcactcttattggaatatgggcaaggaagatgtttctaaaagatttatcgaggaagacaatacaattaaaatggaaaaactagttttccttaaatctatagccaatactttgaaaacaggtatgaatattttgggtgtagacacacctgaaaaaatgtaat

SEQ ID NO: 300591 - DNA, 901 bp, Unknown
  Bacterial polypeptide expressing nucleotide sequence isolated from the Sargasso Sea
tgataattggttttttgaatcttcactcggagaacttgcagacaaaaaatcagaaatttttcaagcgctcgatcaagttaaaaaagagcacgcctatgaaaagaacggtgctgtgtggctagagtccactaaatttggtgatgataaagatcgtgtcattattcgagaagatggaaggggtacttatctatcagcggatttggcttatcacagaaacaaattagacagaggatttgataccattataaatgtatggggttcagatcatcatggttatattaaaagaattgaagcaaccattgaggccatgggttacagcaaaaaacagatgcaggttcagcttgttcaatttgctaatctctttgaaaatggctctaaagttaaaatgtctactcgaagtggaaatttttatacactaaaacagttaattgatgatattgggcctgatgcatcaagattctattatttatccaaacaagcagatcaacacctagattttgatattggagttgctagaactaattctaaagataatctttattattatgtccaatatgcacatgccagaatttgttctgtagagaaaaaatatcttgaactaggtatggccttaccaagcaaattcgatgattctgatttcgatggttgcgatgagctattgcagatggctttaaatgctcaatttgttattaaaagttcaggagaaaatcttcagccacatcttattgtttattatctaagagacatctcgcaaagctttcatcaattttataacaacgtaaatattcttaatgcaaaggaatcggagcagaataatattatgcgagctttaataattgttaaatctgtcatagcttcatctttggaattgttgggcattgaacctttagatagtatgtaa

SEQ ID NO: 300592 - DNA, 835 bp, Unknown
  Bacterial polypeptide expressing nucleotide sequence isolated from the Sargasso Sea
ttgttaatacttcctgacaatttgaatagtgttaatgttgattcaacaccacccaaaattgattttgatatatcaacaaatgtttctatggttcttgcaaaacctaataataaatcgccaaatgatttagcactaattttaattgatctcttaagaaaggaagataaaagcattgaagaaatatcttttgctaaaccggggtttattaatattaaatttaacaaagattactggaataattttactaacaaactaattaactcaccacataactatggttcagcgaataaagagaagaaaaaatacttagttgaatttgtttcggctaatccaaccggtcctttacatgttggtcactgcagaggtgctattttaggtgatgttatttcaagtattttagaatttaaccaaaacatcgttaaacgtgaatattatgttaatgattatggtaatcaaatttctcattttaacaattccgtttatttaagaattagagaaaaactttacgatgaaaaatttccattagataatcctgatctttatccaggtgattatttaaaagatatagctatcagtattatcaaaaataataaggatataaactttgaaaattttaaggacatagaagatcatttaaaaaagctctcaattaatgaatctttaaatttaattaaaaaaaacttaaatgacctaggtataaaacatgataattttataagtgagacaaccttggttaatgataatgaagttgaaaaagtaattgaaaaactcaaaaaatctaagcatgtttataagggtaaaattaaggctccagaaggtgaggaccaaagtaatt

SEQ ID NO: 300593 - DNA, 1732 bp, Unknown
  Bacterial polypeptide expressing nucleotide sequence isolated from the Sargasso Sea
atgaatatatttgaggaatacttaaataaaattttagataaaattaaattagcaagtgaagaaaagctaattttattacctgaaagtttatctggtataaacgtagacatacctcctaaaaaatttaagtgcgatctgtcaactaatgttgcaatggttttatctaaaacaaataatgaaccaccaattaaaattgctgaaaaattgaaagatattatttttaaagacgataataatattgagaagatagaaatagcaaagcctggatttataaatattattttaaaaaaagagttttggacctcatttcttttaaatataaataatcttaataattttggcgcggcatttaatggctctaaaaagaaacatttaattgaattcgtgtctgcaaatcctactggaccattacacgttggtcattgtagaggtgctattttaggtgatgttatctctaacttgttaaaatttaacaatcaagaagttgtaaaagaatattatgtaaatgatcatggtaatcaaattttacattttactagatctgtatatttgagaataaaagaaaaattagataatcaaacgtttccagtaaatgaggatgatttatatccaggagaatacatcaaggatatagcccaacatattatagataataataaagatttacaatttgatgattatgaaaaaataaagttaacacttactaaattagcaattacagagtcacttaaactcattaagactaatttaaataatttgggaattattcatgataattttgcgagtgagactgaaatagttgaaaataaagaggttgataaggttattgagaaacttaaaaaagataaatttgtatatatcggaaaaatcaaagcacccgaaggagaagacacaactaattgggtagaaagagatcaattactttttagatcaacagattttggggatgataaagatagggcattacaaaaatctgacaacacatggacttattttgctggagatgttgcgtatcataatacaaaactaaatagaaactttgataaattaataaatattttaggagcggatcatgcgggttatataaaaagaattacatctgttgttgaagcattatctggagaaaaaaataaattaatttgtaaagtaagccaacttgttaagctaataaaagatggcaaaccttttaaaatgtctaaaagaaaaggtgattacattaccgttgaagatttaatttctgaagttggaaaagatgcaacaagatttattatgctaagtagaagcaatgatgctgaattagattttgattttacaaaagtaaaagaaaaatctaaagacaatccgctttattatgttcaatattgttatgctagaatttcatcggtttttagaaatataaataaaaatattgatgacaagattgataatgaaaataataatatgcaatttaataatgaagaaattgaaatttttaaaaaaatatctgaatggcctaaatgtgtagaaatttccactaaaaaactagaacctcataggatccctgtatatttatatgagttatcatcacagtttcattcctattggaatatgggaaaagatgatgttgaaaaaagatttatcaatgatgataaaacaataaatatagaaaaactaatatttttaaaatctattgcaaaaacaattaaaactggaatggatattataggtgttgatacacctgaaaaaatgtaat

SEQ ID NO: 300594 - DNA, 1732 bp, Unknown
  Bacterial polypeptide expressing nucleotide sequence isolated from the Sargasso Sea
atgaatatttttgaaatatatcttgataaaattttaaatttaataaaaagcgctaaagaaaataatttattagaactaccagaaaatttatctggtattaacgtagaaataccgcctgcaaaatttaattgtgatatgtctaccaatgtagcaatggtcctttcaaaatcgaataataaatcaccattggaactagcaaaagtaattgctgatattattaaagaaaatgatgaaaatttagatgatattaaaattgaaaaaccaggatttataaatttaaaatttaaaaaaattttttggaataattttcttaaaactattattaatcaaagtaattatggatcaaatacatcagatgtttctaaaaaatatcttgtagaatttgtttcagctaatccaacaggacctcttcatgttggtcattgtagaggagctatcttaggcgatgttatatctaacttattaatatttaataatcacaaagttaccaaagaatattatgttaatgattatggaaatcaaattatacattttactaaatcggtttattttagaattcgcgaaatcttatttaaagaaaaatttccaattgataataaagatctttatccaggagattacttagttgatatagcaaaaaacataattgatcaaaatactggtattaaatttgataattttgaaaacatctctaatgatttaacaaaattatcagttcaagagtcacttaagctaattaaatttaacttaaataacctaggtatttcacatgataatttcgctagcgaaacagatgttgtcttaaacaatgaagttgatcaagttgtcgataaattacagaaagataattttgtatatttaggaaaaattaaagcaccagaaggagaagattctaaaaactggactgagagagagcagttgctttttaaatctacagattttggtgatgataaggatagagcattacaaaaaagtgataaatcatggacatattttgcaagtgatgttgcttaccacaatactaaattgaaaagaaattttgatgtattgataaatatacttggagctgatcatgccggttatattaaaagaattacttcagttgtagaggctctctcaggagaaaaaaataaattaatttgcaaagtaagccaactagttaaactaattaaggatggtcaaccatttaaaatgtccaaaagaaaaggtgactatataactgtagaagatttaattagtgaagttggtaaagatgcaacaagatttataatgctaaacagaagtaatgatgcggaattagattttgattttacaaaagttaaggaaaaatcaaaagataatcctctatattatgttcaatattgctacgctcgtatttcatcagttttcagaaatttaaataaaaatattaacgatgaagtaaatattaataattttgatttaaattatacagatgatgaaattaaaatattcaaaaaaatatctcaatggccaaaatgtatagaagtcgctacatcgaaactagagcctcatagaatacctgtttacttatatgaattatcatcagaatttcattcatactggaatatgggaaaagaagacgagactaaaaggtttatagaaaaagacaattctattaaagacgaaaaaattatttttttaaaaattgtctccaatataattaaaagtggtatgaatattataggcgttgatacacctgaaaaaatgtaat

SEQ ID NO: 300595 - DNA, 865 bp, Unknown
  Bacterial polypeptide expressing nucleotide sequence isolated from the Sargasso Sea
aatgaatatatttgaaaattataaaaacaaaattatttcaattttaaatgaagcagctagcgaaggtcatattgtgctacctgataatttaaatggtattaatgttgatagcactcctaaatcaatcgactttgatatttctacaaacgtatcaatggtactagctaaattaaattctaaatctccagaagaattatcaaaagttataattgaattaataaaaaaaaaagatactaaaattgatttaatagagtttgctaaacctggttttattaatattaaatttaccaaacatttctggagtgagttttctcaaagtgttattgaaaatgaaatatcatatggttcgagtaaacttaaaggcagaaaaatacttgtagaatatgtatccgctaatcctactggcccacttcatgttggacattgtagaggtgctatattaggtgatgttatctcaaatcttttaatttttaacaataatgatgtatcaaaagaatattacgtaaatgatcatggtaatcaaatttatcattttacttattctatatatctaagaattcgagaaaaattatttaatgaaatattcccgattgataatgaagatttatatcctggaaattatttaatagatattgcaagcaatataataacaaaaaaaaagatctcagatttttctgattatgagaatattaaagatgaattaaaaacagcatcagttgaggaatctttagctttaatcaagaaaaatttaaacgaccttggaattaatcacgataattttatcagcgagactaaaattgttaatgataatgaagtagataaagtcgtaaagaaactacaagatagcaattatattatacggaaa

SEQ ID NO: 300596 - DNA, 682 bp, Unknown
  Bacterial polypeptide expressing nucleotide sequence isolated from the Sargasso Sea
atggatatactagaaaaatataagaatattttaatcactgagcttaataaatcttattcaaaggaagatttatcgaatatatcttttgaatttccaagagatacttctcacggcgatttttctacgaatgctgcacttattttatcaaaaaaattaaaaatgaacttagatcagatatttttagaagttaaaaagttttttgaagatagtggcgattttaaagatatcgtattagcaaaatcaggttttattaattttttcgttaaagatagtattttacatgattttattcgagaggttttaaaaaatagagaaaattttggaaaaaaagaacttggaaaaggagagaagattaatattgagtatgtttcagctaaccctacaggacctttacatgttgggcatacaagaggagcagtttttggtgatacgctagctaatatatttgattttgtgggttttgatgtttgtagagaatattatattaatgactcaggtgagcaaataaaaaatttagcaaaatctgtttatttaagatatttacaaaatttttcagataatgaaattgttataccggataacctttatcctggagagtatttaattcctatagcaaaaaaaatcagtgacaagcatggagaaaaattcctagataaagatgagagtgattggttagattttt

SEQ ID NO: 300597 - DNA, 1732 bp, Unknown
  Bacterial polypeptide expressing nucleotide sequence isolated from the Sargasso Sea
aatgaatatttttgaaacatatttagataaaattatagatttaataaaaaaggcaaatcaagataatttaataacattaccagaaaacttatctggaattaatgtagatatacctccgtcaaaatttaattgtgacatgtcaacaaatgttgctatggtcttgtctaaacctaataataaatcaccgattgaagtagcagaaattattacaaatattattaaagaaaatgatgaaaatattgatgatataaaaatagaaaaacctggatttataaaccttaagtttaaaaaaattttttggaataactttcttaaaactattattaatcaaaaaaactacggttcaaatactttaaaagattcaaaaaaatatcttgtcgaatttgtttcagctaatcctactggaccacttcatgtaggtcattgtagaggcgctatattaggagacgttatatccaatttgttaacatttaataatcacatagtcacaaaggaatactatgtaaacgattacggcaatcagattatacattttacaaaatctgtttatttcaggatacgtgaaattttatttaaagaaaaatttccaattgataataaagatctttatccgggagattatttggttgatatagcaaaaaacataattgatcagaataaaggaattaactttgataactttgatagtatttctaaagaattaacaaaattatcagtacaagagtcgataaaattgattaaatttaatttaaataacttaggtatttcccatgataattttgcaagtgaaactgatattgtattaaataatgaagtcgatcaagtagttgataagttaaaaaaagatcaatttgtatatttaggaaaaattaaagctccagaaggagaagattcaaagaattgggtagaaagagagcagttgctttttaaatctacagattttggtgatgataaagatagggcgttacaaaaaactgataaatcctggacttactttgcaagtgatgttgcttatcataatactaaactaaaaagaaattttgatgtgctgataaatattttaggcgctgatcatgctggttatattaaaagaattacgtctgtagttgaggctctatctggagataagaataaattaatttgcaaggttagtcagttagttaagcttattaaagatgggcagccttttaaaatgtctaaaagaaaaggtgactacataaccgtagaagatttaataagtgaagttgggaaagatgctacaagatttataatgttaagcagaagtaatgatgtagaattagattttgattttacaaaagttaaagaaaaatcaaaagacaatcccttatattatgttcaatattgttatgcacgtatttcttccgtttttagaaatctaaataaaagtataaacgataaaattgaagttattaattatgattttaaatatacagatgatgaaattaaaatttttaaaaaaatatctcagtggcccaaatgtgttgatgtcgcttcaacgagatttgagcctcacagaatacccgtttatctttatgaacttgcatcagaatttcattcttattggaatatgggtagagatgacgttactaaaagatttattgaaaaagataatactatcaaagatgaaaaaattatttttctaaaagttgtttcaaatataattaaaagtggaatgaatattattggtgttgatacgccagaaaaaatgtaa

SEQ ID NO: 300598 - DNA, 1732 bp, Unknown
  Bacterial polypeptide expressing nucleotide sequence isolated from the Sargasso Sea
atgaatatttttgaagattatttaataaaaattgaaaatactattaagacagcaaataaagataatttgttggaattgccggaaaatctatctggaataaatgtggatattcctcctgctaaatttaatggtgatgtatctacaaatgttgcaatggttttatcaaaaattaataaaaaatcaccaatagagcttgcagagcttatttctggattgttaaaaaaaaatgacaaaaatattgatcatattagtattgaaaaaccaggttttattaatctaaagtttaaaaaagaattttggagtgcttttatattagatgtgctcaaaaaaccttcttatggaagtaatttgggcggtaaaaaaaatagttttttagttgagtttgtttcagcaaatccgacaggaccacttcatgttggacattcaagaggcgcaatactaggtgatgttatttcaaatctattatcatttaatggtcacaaagttaccaaagaatactatgtaaatgactatggaaaccaaatttctcattttactaaatcagtttattttagaataaaggaaattactaataacgaaacatttccaatagaagacaaagatttatatccaggtgcatatcttatcgatatagcaaaaaaaataatttcaaaaaataaagatatagattttaatgactacgacaaaatatctgaaaaattaaagaaactttcgattgaagagtctttaaaattaataaaaacaaatttagaaaacctaggaataaaacatgataattttgctagtgaaacagaggttataaaaaataaagaagttgacgaagtaataaaaaatttaaaagaaaagaaatttatttatgagggaaaaattaaagcacctgaaggtgaaaataacgaaaattgggtagaaagagagcaattactatttaaatctactgaatttggagatgataaagacagggccttacaaaaagaagataagtcttggacatattttgcaagtgatgttgcatatcataatacgaaactgaaaagaaattttgatgtgcttgttaatatattaggagcagatcacgctggttatattaaaagaattacttctgtcgtcgaagctctttcaggaaaaaaaaataagttaatttgtaaagttagccagttagttaaattaataaaagataagaaaccttttaaaatgtctaagagaaaaggtgattatataacaattgaagatttaattaatgaagttgggaaagatgcaacaagatttataatgttaagcagaagtagtgatgctgaaattgattttgattttgataaagtaaaagaaaaatcaaaagaaaatcctatttattatgttcaatatgcatatgctagaatttcatctgtattcagaaatactcaacatgaaattaaaagtgatattaaaataacaaattctgaatataaatttggtgaccaagaaatcaaattattcaagaagataagtgaatggccaaaatgtgttgaagtatctacagaaaaattagaaccacatagaatatctgtttacttatatgaattagcttcagagtttcattcgtattggaatatgggtaaagatgacatttcaaagagatttattgaagaggataactcgataaaagaagaaaagttagtcttcttaaagtctatagccaacactattaaatcaggaatggatattttaggcgttgatacacctgaaaaaatgtaat

SEQ ID NO: 300599 - DNA, 1018 bp, Unknown
  Bacterial polypeptide expressing nucleotide sequence isolated from the Sargasso Sea
atgaatatatttgatttataccaaacaaaaataacaaagttagtaaaatctgctaaccagaataaattaattgaaaatattgataatattgaaaaaactaatgtagatctacctcctaaacattttgattgtgatatttctacgaatgtagcaatgattttagcaaaaaataacaacacatcacccattaaaattagtgaaattttaattacacttttcaaaaaagattttagtgaaattcaagatatatcttttgctaaacctggatttataaacattaagtttaaattatctttttggaataattttttaagagaattaattaatgacaaaaattttggaaaaaataataatattataaacaaaagttatttattggaatttgtttcagctaatcccacaggtcctcttcatgtcgggcattgtagaggtgccattttaggagatgttttagcaaaccttctattattcaataaccatactgttaacaaagaatactatgtaaatgattatggtaatcaaattttatattttacaaaatctgtatattatagaataagagaaaaactttataacgaaccatttcctaaagataataaagatttatacccaggtgattatttaattaatattgcaagcaatataataaacaaaaacaataacttaaatttcgataattttaatgaaatttccactgagcttacaaaattatctgttcaagagtcacttaatttaattaaattaaatttaaataacctaggaatatcacacgataagttcataagtgaaactgatctagttaaaaatcaagaagttgagaaagtcattgaaaaattaaaaaaaaaagattttgtttataatggaaaaataaaagctccagaaaatgaaaaaaattcaaactgggttgaaagggatcaattattatttaagtcgacttattttggtgatgataaagatagggcacttcaaaaagaggataaaagttggacatattttgcaagtgatacagcatatcata

SEQ ID NO: 300600 - DNA, 1423 bp, Unknown
  Bacterial polypeptide expressing nucleotide sequence isolated from the Sargasso Sea
aatgaacatttttgaattatatctagataaaattaaatctattattgttgagcttagtaaaaaaaatcaactcatcgttccagaaaatttcaatggtattaatgcggaaataccacctcctaaattcgattgtgatatttccactaacgttgcaatggttttatctaaactaaataaaacctcaccaattgaattggcagaaaaacttgcacctgaaataaaaaataatgatgatcaaatagacaacatatccgttgctaaacctggtttcataaatattaaatttaagccatctttttggtcaaactttattaaagaaataattgataacgctgaaaaatttggaattaatgaaaaagagaaaaaatataattatttagttgaatttgtatcagctaatcccacaggacccttgcatgtcggtcattgtagaggagctattttaggcgatgtaatatctaatgtattaatatttaataaacacaaggttacaaaagagtattatgtaaatgattatggtaaccagattataaattttacaaaatctgtatattttagaattagggaggtaaaatttaatgaaacattccctcaagataaccctgatttatatccaggagattaccttgtcgattttgcaaaaaatatagtttcagttaattctgatttgagttttgatgattatgagaaaataagcgataagttaacagctttatctatagaacaggcgctacttttaattaaaaagaaccttaagagtttaggaattaaccacgataattttgttagtgaaaaaagtattgtttcaaataacgaggtagagagtgtaataaaatttttagaaaagaataaatttgtatacaaaggaaaaattaaagctccagctggtgaagatgataaaaactgggtagaaagagaacagttactttttaaatctactgattttggtgatgataaagatagagcattacaaaagtcagatgaaacatggacctattttgcaagtgatgttgcatatcataaaaataaagtagatcgtaaatttgattatttaataaatattcttggagcagatcatgccggttacatcaaaagaatttcatcctctgttgaagctttatcaggaaaaaaagataaattgatttgtaaaattagtcagcttgtaaaattaattaaagataacaaaccatttaagatgtctaaaagaaaaggtgactacattacggttgatgatttaattgaagaagttggaaaagatgctactagatttattatgctaaacagaagtagtgatgtggaattagattttgattttgatgctgtaaaagaaaaatctaaagataatccgttatattatgttcaatattgttatgctagaatttcatctgtctttagacatattgataaagatttaaattcaaaa

SEQ ID NO: 300601 - DNA, 1256 bp, Unknown
  Bacterial polypeptide expressing nucleotide sequence isolated from the Sargasso Sea
aatgaatatattttctgattatcaaaaaaaaataatttttactcttaaaaaattagaaaaaaaaaagataataaagattcctgagctaaccaatggcattattgttgaattaccacctaaaaatcaagaagctgatatttcgtgcaatgcagcattaattatatctaaaattaacaataaaccaccgtacgaagttgcggaaataataaaaaaaaatctattatcgaattttaaagaatttaaaagtgttgatattgctggacctggttttttaaacattcaatttaaggtttccttttggaaacgtattttattgaatataataaagtttaattcaaagtttgggtctcttaacaaagagaaaaaaaaatataatatagaatttgtttcagctaatcctaccgggcctttacatgtaggtcactgtagaggtgcaatcattggagatgccttatccaatttgttaatttttaacggaaataaagttacaaaagaatattatgttaatgaccacggaggtcaaattcaaaaatttgtactgtcggtattttatagaatattagaaattaaagaaaaaaaaaattttcctttagataaagatttatatccaggtagctatattatagatatagctaaaaaagttattgaaagtaaaaaaataaaaaattttaaaaattatgaaaagatttataataatttaaaaaatcaatcattaaatttttctatgcaattaataaaagataatttaaaaatgcttggagttaagcatgataattatatttttgaatctaaattaattaataataaaatggtttcaaaagttattaaaaagttagaaaagaatgattttatttacaaaggtaaattagaaccgccgaagggtgaaaccatatccaattggaaagcaagacagcagttattatttaaatccaccaagtttggtgatgatgttgatcgaccattacaaaaggaggatggtgaatggacttattttgcggcagacatggcgtatcattcaaacaaggttgaaagaaaatttaattatttaattaatatacttggagctgaccatgctggttatatcaaaagaatcattgccgctacaaaagcaatttctaataataagatcaatttaatatgtaaagtttcccaattagtaaaactttttaaaaatggacagccatttaaaatgtcaaaaagaaaaggagaatatatcactgttgaagatttagtaaaagaagttggaaaagattcag

SEQ ID NO: 300602 - DNA, 1618 bp, Unknown
  Bacterial polypeptide expressing nucleotide sequence isolated from the Sargasso Sea
gatgatagataaaattatacaggctttaatcgatacgcttaaaaaattagattaccctcaaaaagaaattaaagtttcctcatcaagtaatcccgattatggtgatctatcatctagcttgcctttaatgctagcaaaagaccttgaaaaaaacccaattgatattgcaaaaataattatggataatattagtatttctaaagacctaattaaggaaataaccataagcaaacccggtttcattaattttaaaatttcaaataagtattactacagtgtcctggaacaaatcctatcaaataataaatttgggcaatcaagttcctttaatggcaaaaaagctaatgtagagtttgtgagcgcaaaccctaccggtcctttaactgttggccatggtagaaatgccgtgcttggtgatgtagtttgtaatatccttgagtggaatggatacagcgttacacgggaatattacttcaatgacgctggaagacaaatgagaatattaagtaagtctgttgcgtcgagatatcttgaagaacttggaaaatcatctgattttccagaaggtggctacgaagggagctatatttatgatattgcaaaagatattattaacgagcatggtgatcaattagataaagatgatattttatttaaggaagttcctgagaaaaatatatttaaacagataaaaaatacccttaatgacctagggataaagtttgatgttttttcaaatgaaaaaactttttatgaaaatggtgatattgataagcttcttgatgaattaagatcaaaaaatcttatttatgaaaaagatggagcaacttggtttaagtcaagctcgcttggtaaggatcaagaccgtgtatttatcaaaagctcaggtgagccaacatatcgtgtacccgatacagcctatcacagaaataaggttgaacgtaattatgatcttattgtagatatttttggcgctgaccatatggatacctatccagatgtattggttgcacttgacgcattgggaatcaaaacaaatcatattaaagttttattatatcaatttgtgacactgcttagaggtggagaaaaaattaaaatgtctacacgcaaagctgattttgtcaccttagatgaattaatagatgaggtaggcgccgatgtggttagatacttttttattatgagaggaataaatactcatttaaactttgatttagatttagcagctgatcaatcagacaagaacccggtttattatttacaatatgcccacgcaagaatatgtaatattattaaaagaaatgatgatactaatcccacagatatgaattacaattcggcgctacttaaaaatgaattagaaattgatttattaaaaaaattggaacaattcccaatgattgtaagttcggcattagattcacttgaaccgcaaactatagcaaattatctacaagaaactgcaggaaaatttcataaatactatgcaaactgtcgcataattgtagaggataaagaattaacgcaatctcgtattgccttaattaaggccacaaaaaatgtaatttataatggccttaagctccttggcataaccgctccggataaaatgtaa

SEQ ID NO: 300603 - DNA, 1232 bp, Unknown
  Bacterial polypeptide expressing nucleotide sequence isolated from the Sargasso Sea
taattttgtaaataaattaattggtaactcgaacaattatggttcatttaataaagaaaaagaaaaatacctcgtagaatttgtttcagccaacccaacagggcctcttcatgttggacactgcagaggagctattttaggtgatgttatctcgaatttattgaagtttaataataatattgttgaaaaagaatattatgtaaatgactatggaaatcaaattttacattttaaccactctgtatatttaagaataagagaaaaattatataatgaagaatttcctagcggaaatcccgatgtttatccgggtgattatttaatagatatagccaataacattataaaaaataataaagatattaattttgaaaattttaaggacatagaagagcgcttaaaaaaagtatccatagatgaatcgttaaatttgattaagcaaaatttaaatgaactgggaattaatcatgataattttgttagtgaaactaaaattgttaatgatagagaggttgaaaaagtcattgaaaaactaaaaaaaaataatcatgtttatacgggcaaaattaaagcacctgaaggtgaggataaaagtaaatggactgaaagagatcagttattatttaaatcaacagaatttggtgatgataaagatagagctttacaaaagagtgatttagcatggacttattttgcaagtgatgttgcttatcataatacaaaaatcttaagaaattttgataaacttataaacatattaggagctgatcatgctggttatataaaaagaattacctctgttgtagaagctctttcaggcgaaaaaaataaattgtcatgcaaagtcagtcaattagttaaattaattaaagatggtaaaccgtttaaaatgtcaaagagaaaaggtgattatataactgtcgatgatttaattaaagaagtgggtagagacgctacaagatttataatgttaagtagaagtaatgatgtcgaactagattttgatttttctaaagtaaaagaaaagtctaaagacaatccactttattatgttcaatattgttttgctagagtctgttcagtattcagaaatattaatttaaatattaatgatgatttaaaaattaaaaaccaaaattataattattcaccagatgagataaaaattttaaaaaaagtttctgaatggccaagatgcttagaaatatcttcaaaaaaattagaacctcata

SEQ ID NO: 300604 - DNA, 1120 bp, Unknown
  Bacterial polypeptide expressing nucleotide sequence isolated from the Sargasso Sea
aaataaaaaggcaccatcagtcttagctgaacaattaatcgaactaattaaaaaagatgataaagaaattgaaaatatatctgttgcaaatcctggttttataaacattaagttcaaaaactctttttggaacaattttttaaaaaatattatttctaataataaaagctttggaaaaaacaaaaaaacaaataaaaaaaagtatttattagaatttgtatctgcaaacccaacaggcccattacacgttggccattgcagaggagcaattttaggtgatgttctatcaaatcttttatcttttaataaccattccgtaacaaaggaatattatgttaatgatgacggtaatcaaattttgcatttttccaaatctgtttatttaagaataagagaaattctaaaaaaagaaccttttccaaaagataatcctgatttatatccaggagactatcttataaatatagcaaaaaatattattaagaataacaagaattcaaaatttgataattttgaaaaagtttctgataatctaacaaagcaatctgttgaggagtcacttaagttaatcaaatttaaccttaaaaacttaggtataattcatgataattttgtaagtgaagaggaaattgtaaaaaaaaaagaagttgaaaaggttatcaataaattaaaaaaaaataattttgtttatgagggcaaattaaatgctccaaaaaatgaaaaaagtacagactggactgaaagaaaccaattattgtttaaatcaactgattttggagacgataaagacagacctttacaaaaagcagataaatcttggacttacttcgcaagtgatgttgcctatcataataataaattggagagaaattatgatgttttaataaatatattgggagcagatcatgctggttacattaaaagaattacttctgttgttgaggcattatcaggaaaaaaaaataaacttatttgtaaagtcagtcaattagtcaaacttattaaagatggcaaaccttttaaaatgtcaaaaagaaaaggcgattatataacagtcgaggatttgatcaacgaagttggcaaagatgcaactcgatttataatgttaaatagaagtagt

SEQ ID NO: 300605 - DNA, 445 bp, Unknown
  Bacterial polypeptide expressing nucleotide sequence isolated from the Sargasso Sea
aatgaatatttttgaattatacctagataaaattaaatctattgttgttaagctaggtaaaaaaaatcaacttgttgttccagaaagtttcaatggtattaatgcggaaataccacctcccaaatttgattgtgatatttcaactaatgttgcaatggttttatctaagctaaataaaacctctccaatagaattggcagaaaaacttgtagttgaaattaaaaatagtgatgatcaaattgagtcaatatctgtcgctaagcctggtttcataaatattaaatttaaaccatctttttggtctaactttatcaaagaaattattgataactctgaaaaatttggaattaatgaaaaagagaaaaaaaataattatttagttgaattcgtatcagctaatcccacaggacccttgcatgtaggtcactgtagaggagctatttag

SEQ ID NO: 300606 - DNA, 1195 bp, Unknown
  Bacterial polypeptide expressing nucleotide sequence isolated from the Sargasso Sea
aatgaatatttttgaaatttatttaaaaaaaattaaagatctaattataggacttagtaaagaagagttaattcaaattccaaaagatcttaattctataaatgttgacattccaccagagcaatttgattcagacatttcaacaaatgttgcaatggttttatctaaactaaacaaaaccaacccattagaattagctaaaataattgaaagtaatttaaaaaaaaatgataccaatatagataaaattgaaatcgttaaacctggttttattaacattaaatttaaatcaatattttggaatgattttttaaaagaaattattaataaccataaagaatttggcatcaacaaaaatgaagttaaaaaaaaatatcttatagaatttgtctccgcaaatccaactggaccattacacgtgggtcattgtagaggtgctatcttaggcgatgttatttctaatattctccaatttaatcagcacaaagtatctaaagaatactacgttaatgattatggaaatcaaattttaagtttcacaaagtctgtatatttaagaataagagaaattcttaatggtgaaaaatttccagttaacgatccagatctttatcctggagattaccttattgaaattgcaaaaaatataatcaaagagaataaaaatattaaatttgataactttgataatgtttctgctaaactaacttctttagctatatttcaatcactaattctgattaaaaccaatttgaaaaatttaggcatttctcatgacaattttcaaagcgaaactgaaattgttaataataatgaagttcaaaatgtaattgataaacttaaaaaaaaaaactttgtttacattggaaaaataaaagctccagttgatgaaaaaaaaaataattgggtcgaaagagaacaattattatttagatcaacagattttggagatgataaagatagaccattacaaaaatctgataagtcttggacatattttgccagtgatgtcgcttaccataataataaattaaatagaaattttgatactatgattaatattcttggtgctgaccatgcaggttatattaaaaggattaccgcatgtgtagaagcattgtcaggtgaaaaaaataaattaatttgcaaagtaagccaattagttaagttaattaaagatggtaagcctttttaa

SEQ ID NO: 300607 - DNA, 980 bp, Unknown
  Bacterial polypeptide expressing nucleotide sequence isolated from the Sargasso Sea
aatgaacatttttgaattatatctggataaaattaaatctattattgttgagcttagtaaaaaaaatcaactcatcgttccagaaagtttcaatggtattaatgcggaaataccacctcctaaatttgattgtgatatttcaactaatgttgcaatggttttatctaaactaaataaaatctcaccaatagaattggcagaaaaacttgcatctgaaataaaaaataatgatgatcaaatagacaacatatccgttgctaaacctggtttcataaacattaaatttaagccatcattttggtcaaactttattaaagaaattattgataacgctgaaaaatttggaatcaatgagaaagagaaaaaaaataattatctagttgaattcgtatcagccaacccaacaggacctttgcatgttggtcactgtagaggagctattttaggtgatgttatatctaatgtattaatatttaataaacacaaggttacaaaagagtattatgtaaatgattatggtaatcaaattataaattttacaaaatctgtatactgcagaattagagaattaaagtttaacgaaacttttccacaagataatcctgatttgtatccaggagattatttaatcgattttgcaaaaaatatagtttcagataattcagatctaaattttgataattatgatcaaataagtgataagttaactgctttatctatagaacaagctctacttttaattaaaaaaaacctcaagagcttaggaattaaccatgacaattttgttagtgaaaaaagcatagttttaaacaaagaagtagaaagtgtaataaaatttttagaaaaaaataaatttgtatataaaggaaaaattaaagctccagttggagaagacgataaaaattgggtagaacgagaacagttactttttaaatctactgattttggtgacgataaagatagagcgttgcaaaaatcag

SEQ ID NO: 300608 - DNA, 878 bp, Unknown
  Bacterial polypeptide expressing nucleotide sequence isolated from the Sargasso Sea
aatgaatatatttgaagaatacaaaaataaaatattaacaattataaaaaaggcagaaaaagacaaactattagttcttcctgaaaatttgaacggtgtgaatgttgattcaactccacctaatattgattttgatctttcaacaaatgtttcaatggttttatcaaaatctaacaataaatcaccaaacgttatagctgaaacgataatagatttattaaagaaagaagataccttcatagaagaaatttcatttgcaaaacctggcttcattaatattagatttaataaagattattggaataattttgctaataaattaattaatatttctaataaatatggatcatctaacaaagataaaaaaaaatatttaatagagtttgtatctgcaaatccaactggtcccctacatgttgggcattgtagaggtgctatattaggtgacgtaatttccaatatattaaaatttaataataatattgtagaaaaagaatattatgtaaatgactatggtaatcagatttctcatttcaattattctgtttatttaagaattagagaaaaactttataatgaagaatttccattagataatcctgatctttatccaggtgattatttaattgatatagctactaatattataaaaaacaataaaaatgttaattttgaaaattttaaagatatagaagattatttaaagaaactttcaattaatgaatcaataaaactaattaaacaaaacttaaatgatctcggtattaatcatgacaattttgtaagtgagacaaacattgttaatgacaaagaggttgataaagttattgaaaaactaaaaaaatctaaccatgtttatactggcaaaattaatgctc

SEQ ID NO: 300609 - DNA, 401 bp, Unknown
  Bacterial polypeptide expressing nucleotide sequence isolated from the Sargasso Sea
tatgctacataatttaaaaaaatctctttttgaaatattaattaaaattgataaaaacgttagtattaattttgaagatgttgaagttgaaacactttttgacaaaaaaggtgattttacaactaatgctgcactaaaattttcaaaaatatttggaaaaaatccaaatcaattagcagatattattttaaagagtattaacttaaataattttgaaaaagtagaaattgctggacctggttttataaatttttttctcaaggatgaaagttttaatcctcaattattcaataataaaaaagaatttactgaaaatgaaaaggtaaatatcgaattcgtatctgcaaatccaacaggcccgttacatctagcacatggaagaggtgcagttgttggtgata

SEQ ID NO: 300610 - DNA, 1738 bp, Unknown
  Bacterial polypeptide expressing nucleotide sequence isolated from the Sargasso Sea
catgacaatggaagaaaaaataaaatgcctaatcatcaatgcattagctgaaagtcaagaaattgatgaggatgagttgaatgatgttggtcttgagctttcaagaaacagtaacaatgagcatggagacttttccagcaacattgctcttaaactaggggctaaactaaagacacctccaatgacgattgctgaggaaattgtcagctctctggaggcttcagatgagctagaacgagtggagtttgtaaagcctggctttataaacttttatctctcagctgaaaaaaaacatggtgttcttgaaactatactaaatcatggtagagaattcggttcgtcttgtgcttcggaaaaaaagaagatacttctagagtttgtctcagcaaacccaactgggccactccatgttggccatggtcgtcatgctgcttttggtgattcactggcgcgccttctaagaaaagcaggtcacgaggtttttactgagtactatcttaatgatgctggaaggcagatagatatcctttgcttaagcgtgatcattgagatgcttagagctgaaggattgaagttaaaggatatccctggagtttacaaaggtgcatacatcaaagaaattgctcaaggactgatcgaagaaggcttcaaaataaataaaaatgtcgtgcctccagatgtcggcggatcatctgatgagattgttgactcgtttatactagaaatgaaagatgttgcgggatctgagctttttcaaagaatttctgacataactgtattgcagatgacgcaattacttaaaaaagacctttcagattttagagttgaacaagacggtttttattctgaaaaatctctattttcaactggaaagattgagcaggcttgcgagattataaagaaaaacggaaacgcttatgaaaaagatggtgcgctttggctcgagtcatcaaaatacggtgacgacaaagatcgtgtggttatcagagaagatgggcggtctacctactttgcatctgatattgcttatcatcatgataaaaaaatgaggggctttgatcttttgatcaatgttttaggctctgatcatcatggttatgtttccaggcttgaggctggccttgcctcgactggtaacaaagcttctgacttagatgtgattttgatgcagtttgtgactctttatagggggaagaaaaagattcaaatgtctacccgatcaggtaattttgttccaatgagagacctttactcagatgttggtgttgatgccgcacgatttttttatgtcagtagatcacatgatcaacacttggatttcgatctagatcttgcaaccaaacaaaacaacaataatcctgtttactacatccagtatgcaaatgcgcgaataaaaagcgtgttaaaggagaataaaaaaagaggctatatttttgacgaagctatagggaaatcaaatcttgtgaagctggatctgcccatagaagaggagatcattgctcttttggggaaataccctgaaatcatattaaaaagctctgaagccagagctgtaaacaaaatcgcaaattacctaaaatctttagctcaactgtttcactcatattacggatcaacaaaatttgtttccgaagacgaacaaaccaggaatgccagagtgctcttattaatctgcgtttctataattattgagaatggtcttgatatcttaggtgtttcgtcgcccgctaagatgtag

SEQ ID NO: 300611 - DNA, 1219 bp, Unknown
  Bacterial polypeptide expressing nucleotide sequence isolated from the Sargasso Sea
aatggttttatcaaaatctaacaacaaatctccaaacattatagctgaaaccataatagatttattaaaaaaacaagatacccaaatagaagaaattacatttgcaaagcctggttttattaatattagatttaataaagactattggaatagttttgctaataaattaattagtatttctcataaatacggctcatctaataaaaacaaaaaaaaatatttagtagaatttgtttccgcaaatccgactggccctttacatgttggacattgcagaggtgcaatattgggtgatgtaatttcaaatatattaaaatttaataataatactgttgagaaggaatattacgtaaatgattatggtaatcagatttcccatttcaactattctgtttatctaagaattagagaaaaattatacaatgagaactttccatcagataatcccgatctatatccaggtgattatttaatagacatagcaagcaatattataaaaaataataaaaatgttaattttgaaagttttaaagatattgaagatcatttaaaaaaactttcaattaatgaatcattaaaactaattaaaaaaaacctaatcgacctcggtattaatcatgataactttgtaagtgagacaaatattgttaatgataaagaggttgaaaaagtagttgaaaaactaaaaaaatctaatcatgtatacattggtaaaattaatgctcccgaaggtgaagataaaaaaaactggacagaaagagatcaattattatttagatcaacagattttggtgatgataaagatagagcactacaaaaaagtgatttaacttggacttacttcgctagcgatgttgcatatcacaatacaaaaattaatagaaattttgataaattaattaatattttaggtgccgatcacgctggatatattaaaagaatttcctcagttgttgaagctatttcgggtgaaaaaaataaattatcatgcaaggtaagtcagctagttaaattaattaaagatggaaaaccatttaaaatgtcaaaaagaaaaggtgactatataactgttgaggatctagtaaaacaagtagggaaggatgcaactcgttttattatgctgagcagaagtaatgaagttgaattggattttgacttttcaaaggtaaaagaaaagtccaaagacaatccattaattatgtacatattgttatactag

SEQ ID NO: 300612 - DNA, 955 bp, Unknown
  Bacterial polypeptide expressing nucleotide sequence isolated from the Sargasso Sea
atgaatttaataaaagatgatttaaaaaagctaggtatatcccatgataactttttgtccgaaacagatatagtaaataaaaacatggtcgataaagcgataaataatttaaaagagaaaaattatgttgaagaaggatatcttgatccaccaaagggcgaaaacataaaagattggaaaaaagttaaaagattaatttttaaatctaccttatttggcgatgatacagacagagctcttcagaaaaatgatggatcttggacttattttgcaaatgatattgcttatcatatggataaagttgatagaaaatatgataatcttattaatatattaggcgctgaccatactggttacataaaaagaattaagtcagctgtatcagctttatcagataataaaactttgtttgattgtaaagtttgtcaattggtcaaactttataaaaatggtcaaccatttaaaatgtctaaaagagcaggagaatttatttcagctcaagatcttctcgatgaagttgagaaggatccaattaggtttatgatgctaaacagaagtaatgatgtagaactagattttgattttgataaagttaaagaaaaaaacaaagataatcctgttttttatgttcaatatgcttatgcaagaataaattcaattttaaggtcattaaaaattaaatttactaataaagtagaattaaatgataaggattttcaattaaatgaaattgagcaaaaaatactgagaaaagttttcgaatggccaaaaataattgagtctgcttccaataaatttgatctacataaaatacctgtttacttatatgatttagcaactttatttcattcttattggagcaaaggcaatgaagacgaaaaatataaatttataaagaatgaaaaaataaaaagaaatgaaatttttgcaataatgaaccttattgctattgtgc

SEQ ID NO: 300613 - DNA, 542 bp, Unknown
  Bacterial polypeptide expressing nucleotide sequence isolated from the Sargasso Sea
aatcaaactttcgaaaagaaccgggaccatggtcgaagttagtgagctcattgaagccgttggtccagacgtcgctcgctttgcatacttgctccaatccattgacactcgacagaccatcgatattgatgtcctctcaagtgaggcaaacgaaaatcccgtctattacgtgcaatatgcccacgctcgaatagcggcagtaagccgcgaggcaacaaatagaggaatttctcgttgccccgtcgatgcgatggatgtcaccgtccttcagcatgagcgagaactagaaattctacggtgcctttccacccttccggagatagtcgaatttgctgcgcgcgatagagctcctcatcgcgtagcaacatggatccgagaactcgctgcagcattccacggcttctaccacgactgcccggtcctcagatctgacgtcgctgccgaaatccaacaagcccgactttggttagtcgagactgcccgtatcggcttcgccataggactcgaccttctcggtatcactgcgcccgaagaaatgtgaa

SEQ ID NO: 300614 - DNA, 874 bp, Unknown
  Bacterial polypeptide expressing nucleotide sequence isolated from the Sargasso Sea
aatgaatatttttgaagactatttaataaaaatcgaaaatactattaagaaagcaaatcaagataatttgttggaattgccagaaaatttatctggtataaatgtggatattcctcctgctaaatttaatggtgacgtatctactaatgttgcgatggttttatcaaaaattaataaaaaacctccaattgaacttgcagaaattatttcaggattattaaaaaaaaatgacaaaaatatagatcatattagtgttgaaaaaccaggttttattaatttaaaatttaagaaagaattttggagtgcttttatattagatgttcttaataaaccttcttatggaagtaatttaaacggtaaaaaaaatagttttttagttgagtttgtttcagcaaacccgacaggaccacttcatgttggtcattcaagaggtgcaatactcggtgacgttatttcaaatctattatcattcaatggtcacaaagttacaaaagaatattatgtaaatgactatggaaaccaaatttctcattttactaaatcagtttattttagaataaaggaaattactaataacgaaacatttccaatagaagacaaagatttatatccaggtgcatatcttatcgatatagcaaaaaaaataatttcaaaaaataaagatatggattttaatgactacgacaaaatatctgaaaaattaaagaaactttcgattgaagagtctttaaaattaataaaaacaaatttagaaaaccttggaataaaacatgataattttgctagtgaaacagaggttataaaaaataaagaagttgacgaagtaataaaaaatttaaaagaaaagaaatttatttatgagggaaaaattaaa

SEQ ID NO: 300615 - DNA, 1306 bp, Unknown
  Bacterial polypeptide expressing nucleotide sequence isolated from the Sargasso Sea
atgaatatttttgaagaatatagaaccaaaataataaatattttaaaagaagaagagaaatcaaatgccattcatttgccagagaatttaaatataataaatgttgattctacacctacgaatatcgattttgatatttcaactaatctttcaatggttctagcaaaacttaataacaaaactcctgaagatttatcatcaaaacttattaaattaataaaacaagaagatgataacattgatgaaattgtttttgcaaaacctggttttattaatattcgttttaataataatttttggaatcaatttgcagaaaatttgataaataattcaaataattatggttctgctaaaaaaaatggaaaaaaatatttagttgaatatgtttcagcaaatccaacaggcccattacatgttggtcattgtagaggtgctatacttggagatgttatttcaaacatattaaaatttaacaataacgaagtggttaaagaatactatgtaaatgatcatggaagccagataagtcattttacatattcggtatatcttagaattattgaaatcttagaaaaaaaaccttttccaatagataatcctgatttgtatcctggtgattatataattgatattgcacaaaaaattttaaaagataataaggaaattaattttaaagactttaaagaggttgaaaataaattaaaattactatccgtaaatgaatctttaaaattaattaaaaaaaatctacaagaattaggaataaaacatgataattttgcgagtgaaactcaaattgttgagaataaagaagtagaaaatgtagtagaaaaactcaaatccgctgatcaagtatacattggtaaaatcaaagcaccagaaggagaagataatacgaagtgggttgaaagaaaacaattactctttagatcaactaattttggtgatgataaagatagagcacttcaaaaaagtgataatacttggacttattttgccagtgatgttgcctaccataatacgaaaattaaaagaggatttgataaattaataaatattcttggagcagatcacgctggatatataaaaagaattacatcagttgctgaagctatctctggagaaaaaaataagttggtgtgcaaggtaagccagttagtaaaattaatcaaagatggaaaaccttttaaaatgtctaaaagaaaaggtaattatataacagttgaagatttaatagagcaagtaggtaaagatgctacaagatttattatgctaagcagaagtagtgatgtagaattagattttg

SEQ ID NO: 300616 - DNA, 1540 bp, Unknown
  Bacterial polypeptide expressing nucleotide sequence isolated from the Sargasso Sea
tattgaaaaagaattaaataacagaattaaatcaattggatttattgatcattttgtggtttcaaaaaatggttttataaatttttttctaaaagatgaatttgtattaagaagtttaaaagaaatttatagtaaaaattttttaaattatattaattatggtgcagataaaaaaataaatgtcgaatttgtttcagctaatccaactggaccattgcatatagctcatataagaggtgctgtatttggagatgtattaagcaccctttatactaaaacaggttttgatgttactagagagtattacgtaaatgatgcaggttctcaaattgacaaattatctaactcccttctgaaaagatatttacaattatttgataaaaaaattgagttagatgaagatgagtatcctggtgaatatctaatagatattgccaaaaaaattaaaaatgaagatggtgataagtggttaaattttcagcaagaagaaactattcaatattttaaaaattttgcattaaaaaatatacttttaagcataaaatcagatttagaattaattaatataagatttgataaatttactcatgaaactgaaatagaaaaaagtaaaattattgatgaacttttttcaatcttagatgaaaaaaaattattatatgaaggtattttagaaaagccaaaaggtgatgactctgattgggagccaagagagcaattattatttagatcgtctaacttattagataatgaagaccgggcattaaaaaaatcaaatggtgaatggacatattttgctaatgatgcagcatatcatttagataaatgtaaaagaaattttgatagattagtcaatatctgggggtctgatcatattggctatattccaagaatgaactcgttaattaaagccattaaagatgatgaaacttatttaaatattttaacttgtcaaattgtaagtttaattcaaaataaacaaaaaattaaaatgtcaaaaagatctggaaactttgttacattaaaaaatgttcactctaaagttggcaaagatccaataagatattacatgatttctactaaaaatgagacagcaattgactttgatctagatgctgttgttgaaaaaaataaagataataaagttttttactgtcaatacgcacacgctagagcttcgtctgtaattaataaagcaaacgaattaggtataaaaattaaaaatgattataaccttactgcaatacaaaatttatctaatgaggaggtaaaattaatcaaaaagttaatttcttatccttatttgctatatcaatcatcatactataatgaaccacatagactaatcaattacctagaagaaatatcgtctgattttcattcaatttggaataaaggtaaagataatgaatcgcttcgttttatagataaaaaaaataaagaaaaaacaatttcaaaaatattttggttagagtcatttagagttgttttaaaagatatattttcaataattgatataagtgcacctgaaacaatgtaa

SEQ ID NO: 300617 - DNA, 1129 bp, Unknown
  Bacterial polypeptide expressing nucleotide sequence isolated from the Sargasso Sea
aatgaatatttttgaacagtatttagataaaataaaagaaatcctttcaacactatcttcaaatggagatttaattttaccagattcactaaacgggataactgctgaaattccaccttcaaaatttgatagtgatatttctaccaatgtagccatggtcctttctaagattaataataaatctccatcagatctggcgtcaattttggcagaaaaaattaaaaaagaggataagtttattgaagaaatatcagttgttaaaccaggttttatcaatattaaatttaaaccaattttttggacaaattttattaaagaagtaattaaaaattctaattcttttggaacaaataaaaatattaaaagaaattatcttatagaatttgtgtctgctaatccaacaggtccattacacgttggtcattgtagaggagctattttaggcgatgtgatggccaatcttttattatttaataataataaagttacaaaagagtattatataaacgactatggtaatcagattataaattttacaaagtcagtttattatagaataagagagatttcttttaatgaaccttttccagttgataatgaagacttatatcctggagactatttaattgaatttgctcaaaatattttaaacacaaataagaatattgactttaagaattttgacaaaatatctcaagaattaaccactttagctattaacgaagcattaaagttaatcaaaagtaatcttaaatgtcttggtattaatcatgataactttgttagtgaaaagaaattagttgaaaatcaagaagtggaaaaagttgtagaatttcttcaaaaaaataaatttgtttataaaggaaaaataaaggcacctgctggtgaagatgacagtaattgggttgaacgcgagcagttgctttttcgatcaactgattttggagatgacaaagatagagcattacaaaaatctgatggtgcttggacttattttgcaagtgatgttgcataccacaaaaataaattagacagaaaatttgataggctaattaatattttaggtgcagatcatgctggttatataaaaagaatttcatcatctgtcgaagctcttatcaaactctaa

SEQ ID NO: 300618 - DNA, 1636 bp, Unknown
  Bacterial polypeptide expressing nucleotide sequence isolated from the Sargasso Sea
gatgaaaaaatttaagttatatcttaaaaaaaatattaaatctactctcaaatcattatcgcttccagatttagagtttagcctttcagaaccaaagaacataaactttggtgatttgtcttctaatttaccattattaataggaagtaaacaaaaaataaaccctatagaaattggagaatcaattgcacaaaacctgaaagaaaagtgtctagaagacataatagaaattaatgtaacgccaccaggattcattaatttcaaaatttcagaaaaattttttcaaaacaaaattgatcttattattgaaaataataaaaattatggtagagggaatattggttctggaaaaattgctaacgtagaatttgtcagtgcaaatcctacagggccattaaccgttggacacggtcgcaatgctgtgttaggagatactatttcaaagattttggaatggcaaagttttgacgtaactcgcgaatattattacaatgatgctggcaaacaaatgaggatattaagaaaatctgttgaagcaagatattatgaattattagagaaatcttacgattttcctagagatggataccaaggaaaatatatttatgatatagcaaaatttgttttagaaaaaaaaggggaaactcttaaatctggagatgaatcttttggaaaaattgccgaagaaattatttttaatgacattaaaaactctttaaaggagctgggtgtaaaatttgatcattttactaatgaaaaaacattttatgaaaatggcgacattgacaaacttctcaaggacctagctgacaaaaatctaatatataaaaaagataatgccacatggtttagaacatctgctttaggtaaagatcaggatagagtttacataaaaagttcaggggaaccaacataccgagtaccagacacagcctatcacctagataaaataaagcgaaaatatgatctaatcgtggatatatttggtgctgatcatgctgatacctatccagatgtaatcacagcacttagagcattaggtctaaaaactaaccatattaaagtgctgctataccaatttgtaacactaattcgaaatggtgaaaaaattaaaatgtctactagaaaagctaattttataaccctagaccaattaattaaagaactcagccctgatgttgttcgttatttctttattatgagaagtatgaatacccatttggactttgatttagatgtagcaaaagatcaatcagaaaaaaatccagtattctatttgcaatatgcatatgctagaatatgtaatataattaaacgagcagatgaagtagaacaaaatcaaaaacattctaataacaattcacttcttgttcataaggatgaaatgaatatgcttaagcatatggtaagatttcctgaggttattgatattgcttatgaaaatttagagcctcaacatattgctaattacttacaacaattggcttcatactttcacaaattttatagtcaatgcaaagtaataaatgacaacaaagatttaacatacgctagaatcaggttaattaaatcagtaaaaattattttaaataatggattcaatatccttgggattcattctcctgagcgaatgtaa

SEQ ID NO: 300619 - DNA, 748 bp, Unknown
  Bacterial polypeptide expressing nucleotide sequence isolated from the Sargasso Sea
atgaacatatttgaaaattatttattaaagatagaaaaagttattaagtctgcccacaaagataatttgttagagttgcctgataatctatcaggcataaatgttgatataccacctgcaaaatttactggagatatttctacaaatgttgcaatggtattatctaagattaataaaaaacctccatttgaacttgctaaacagatagctgacttattaaaagatagtgatagtaatattgatgaaattagcattgaaaaaccaggttttatcaatctaaaatttaaaaatgaattttggaatggctttatactagatgtcttgaataattcatcatatggaagtagctcgagtgggaaaaaaaatagttttttagtagaatttgtttctgctaacccaactggacctttacacgtaggccattcaagaggcgctatacttggagacgtaatatctaatcttttatcctttagtggtcacaaagttaccaaagaatattatgttaatgattatggaaatcaaatctctcattttacaaaatcagtttatttacgaataaaagaaattctttacgatgaaacttttccaataaaggataaggaattatatcctggagaatatcttatagatatagcaaaaaatataatttcaaaaaataaagatttagatttcaaaaattttgaatcagtttcagaaaaactaaaaaaaaatttcaatagaagaatctttaaagttaataaaaattaat

SEQ ID NO: 300620 - DNA, 1375 bp, Unknown
  Bacterial polypeptide expressing nucleotide sequence isolated from the Sargasso Sea
aatgttgaatttgtttcagcaaccccaacagggccgcttcatgttggacacactcgtggagccgtttttggagatgctctgtcagaattattaagttttgccggatataaagtcacacgtgagtattatataaatgatggtgggtctcaggtggatacattagctaggtctgtatatcttcgctacctcgaggctcacggtcaagatgttgctttcgaagatggaacatatccgggtagttatcttatcccagttgggcaggcgcttaaagaaaaagttggttctgattatatggataaaccggagcgttattggttggaccatgttcgcgaattttcgacagatgctatgatgaaactgataaaagatgacctcgccgcattaggggtgaagatggatgcctttttttcagaaaaatctttatacggtggtggcaaaattgaggaagcaattgaaagtcttaaaagcaaaaatttgatatatgaaggaattttggactctcccaagggtaagaaagtagaggattgggagcctagggttcaaactttatttaaatctacttctcatggtgatgacgtagatcgccccattaaaaagtctgatggggcgtggacatattttgccccggacattgcttatcactttgataaagtagagcgcaattttgatcaattaattgatatttttggtgctgatcatggtggatacgttaagcgaatgaaggccgctgtttctgcgctttcagacgacaaagtcaaattcgacataaaattaacccagctagtgaagttgttcaaacgaggagagccatttaaaatgtcaaaaagggcagggacatttgtaactttgcgggacttagtggatcaagttggttctgacgtaactcgttttgttatgctgacacgaaaaaacgatgccccattagactttgactttgaaaaggttcttgagcaaagcaaagataatcctgtttattacgttcagtatgccagtgccagaattcatagtgttttccgaaaagctaaggaagccggaatccattttgatgaggagcagttaaaatatgaaactttttgcaaaattacacatgaagcagaaattaaaattgcaaaaaagttagctgagtggcctcgaattgttgaaatctctgccaaaactcatgagccccatcggatagctttttacctctatgaactagcaagtgattttcatagtttatggaataaaggcaatgaaaatgatgagctgagatttatccaagaaaatgaccacaaagcaacttatacaaaaatggccatgatttcggctgttttagttgttatttcctcaggtcttggtattctaggcgtagagccagcaactcatatgaattaaa

SEQ ID NO: 300621 - DNA, 818 bp, Unknown
  Bacterial polypeptide expressing nucleotide sequence isolated from the Sargasso Sea
aatgaacatttttgaattatatctagataaaattaaatctattattgttgagcttagtaaaaaaaatcaactcatcgttccagaaactttcaatggtattaatgcagaaataccgcctccaaaatttgattgtgatatttcaactaatgttgcaatggttttatccaaactaaataaaacctcaccaatagaattagcagaaaaacttgcagctgaaatcaaaaatagcgatgatcaaatagacaatatatctattgttaaacctggtttcataaatattaaatttaagccatctttttggtcaaactttattaaagaaataatagataatgctgaaaaatttggaattaatgagaaagagaaaaaaaataattacttagttgaatttgtatctgctaatcctacaggacctttgcatgttggtcactgtagaggagctattttaggtgatgtcatatctaatgtgttaatatataataagcataaggttacaaaagagtattatgtaaatgattatggtaatcaaattataaattttacaaaatctgtatattttagaattagagaagtaaaatttaacgaaacttttccacaagataatccagatttgtatccaggagattatttaatcgattttgcgaaaaatatagtttcagataattcagatctaaattttgataattatgatcaagtaaccgataagttaacagctctatctatagaacaagctctgcttttaattaaaaaaaatcttaaaagcttaggaattagacacgataattttgttagtgaaaaaagcattgttttaaataaagaag

SEQ ID NO: 300622 - DNA, 773 bp, Unknown
  Bacterial polypeptide expressing nucleotide sequence isolated from the Sargasso Sea
aatgaatatttttacaatatataaaaataaaatctttaatattttaaaagatttaaacagaaaaaataagattattttgccagaaaatttaaattccattaacgtagatattcctccaaaaaattttgatgccgatatatccaccaatgtatgcatgatattagcgaaaaaaaataataaaaaaccagaagaaatatcaaatctaattattgatgatttaagcaaacaagacaagaatatattaagttcagagtttgttaatccaggttttataaatattaaatttaaccgaaaattttggaattattttcttaaagagatttcaaaaactattaaaacttttggttctaataagactaaagacaaaaacaaatatcttatagaatttgtttctgctaatcctacaggtccgttacacgttggtcactgcaggggtgccattttaggtgatgtaatttccaatttgcttatttttaacggcaaatcggttaaaaaagaatattatattaatgaccatggaaatcaaataattgattttacaaaatcagtatattttagaattatagaaataaaaaaaaagaaagcctttcctaatgatgagaatttatatccaggtgattatatcaaagatattgcaaaaaagattctaaagaagaaaaaatttaattatgaaaattttgataaaatttatcataaactatctaaagaatgcattaaagagtctatgaattttattaaagatgatttaaaaaaacttggcataaaacatgata

SEQ ID NO: 300623 - DNA, 790 bp, Unknown
  Bacterial polypeptide expressing nucleotide sequence isolated from the Sargasso Sea
cttgattgatgaaattaataaggaaatagaaaaattcctatcttcaattgtaaataataaaaaaaatatcaattctattattaaaaaatgctctacttctatatcagatgatctaaaaaaaggtcatataacttcaaatgtatgtatggtcgcagcaagcatactaaagcttaatccaaaaaatttagctgaagatcttaaaacaagattagaaaaaattgatagatttgataacgttgaaatagcaggacctggatttgtaaacatctcattgaatagagaagattttgtatcaacaattcagtttattaataaaaacaaagattcatttggtagttctgccataggtaaaaaaaataaggtgcaaatagaatttgtgtctgccaatccaactggtccacttcatgttggtcatgggagaggagctgcctatggtgacgcaattggtagaattcttgaatcaacaggctcaattgttgaaaaagaatactatgttaacgatgctggaagacaaatcgatattctgactgcaagcgttatattaagattaataaaaaatgatataagtaattactttccagccaacggatataaaggtgagtacattgatgaaattggaaaaaaattagacaaaaaagtaaaaatacatgacttcaagtcactttcaatcaaaaccagtgaggacccagaagaagaaatagataatatcattcatgaattagaaaaattaaataataattcatggaatctcataaaaaaattctcattaaaagaaattgtaaatcaatga

SEQ ID NO: 300624 - DNA, 1711 bp, Unknown
  Bacterial polypeptide expressing nucleotide sequence isolated from the Sargasso Sea
atgattttagatacattaaacaaacaattaatcgaagttgttcaaaatgtagcagcacaaaaaagcgtaaaaatagataaagagctattagatcaaataaatttcgagattagtgatgaagaaagccatggagactattcaacaagttgcgctttaaaactagctaaagcatttaacatgaagcctagagaaatatcagagttattaactaaagatctaagcttgccatttattgaatctatgtcgattgaaggtgctggctttattaatgtttttctaacgagcgctgagaaaacccttgcattgaaagaagtgataaaactggattcaaaatggggtaaaaatagtaaaagacagggcaatgtattagttgaatttgtttcatctaaccctactgggcctcttcatgtagggcatggaagaggggctgtgctgggtatggccttatctaatctattagaaaattcaggctataaagttacgaaagaatattatgtaaatgatgctggaagacagatatctatactcactagcagcatacttttaaaagcttatgcaggaaactttgatgttgaaggcatgtatgaaggagactacatacatgaaattgcacaagagtttctaaaagataatgagaaaattgatattaatcttgatttaaaaggtctttctgatgataaagaaaaaaagttagaccaaatatctgaatatttccaaaaaaatcataaagaagcctggaaagaagcaaatgatttttctattacaaaaattcttaatgtaataaaagaagagttacatagtttcaatatcattcatgataactggtttcatgagagttctcttggatctattcaagactcaagttctgatttatcaaaatcattatctgttattgaaaaggctggacatacattttctgaagatggcgctatctggtttaaaactacagacttcaaagacgataaggatagggttttgttgagagaaaatggtgaaccaacatattacttaactgatgttggataccataaaaataaaatagatagaaaatatgacttatgtataaatgtttttggagctgatcatcacggatatattccaagattaactgctgcatttaatgtaatgaaaagcaagcaacaagaaatagaatttatgctctatcagctggttaatctatatgaagacggcagtaaaaaaacaatgtctacaagaaagggagacttctattcattaaaagagttaagagatgaacttggtccagatgtaattaaattcttctttctggaaaaaaaatcagaccacacaatggattttgatattaatcttgccaaagatgagagcaaaaataatccttacttctattctcaatatgctcatgttagatgctgctctatattaactaaaaagagttttgaccctaatggagaggttgaagagaaagaaataatgaagaattttgatatcgtaaataaaatattgaacttcccgcacttggtagaaaattatgcagaagaaagatctcctcattccttagtccactatgtaaaagacttgtcagcttcttttcatgctttttatgagcaaagtcctgttataaataaagatgagaaaatagagaatgcgagacttttgctgacaatggcaacaaaaattgtacttgcgaatagttttaggatcctaaatgttgagccactagagaagatgtaag

SEQ ID NO: 300625 - DNA, 487 bp, Unknown
  Bacterial polypeptide expressing nucleotide sequence isolated from the Sargasso Sea
aatgtacgcgataaaagaatcgctctctaaatccattgattctgagagtggactcattgcatttaaaaatcaaatcttagcaaagtcaaaagtttcaatatcagataatttgtctaatggtcacttgtcatctaatgtttgtatgattgcagcatcattcttaaataaaaaaccaattgaaatctctcatgcttttgaagaaggtttgcaaaaattaagttttgtcaaagatgttaaaactgtaggccctggttttttaaatatctttcttgagcagtcttgttttttagataattttttgaatataaaagatatcacttcattagttcaaaaagatgataaaaaatcaattcaaatagaatatgtttctgctaatccaacagggccactgcatgtgggacatggtcgaggtgcagcgtatggtgatgcacttgcaagaattttaaaattttatgggcatgatgtaagcacagaatattatgtaaat

SEQ ID NO: 300626 - DNA, 1591 bp, Unknown
  Bacterial polypeptide expressing nucleotide sequence isolated from the Sargasso Sea
attgagatcattatctttcccagaaaaagaattttctcttgcccctccaaagatcagtgaatttggggacctttcttcaaatattgccttattactagcacgtgatctaaataaaccacccatggatatttgtaaatctattgctggtgaattagagaatagtttgcctgaccatgttcataacatatctataacaaaacctggatttctgaattttcaaatttcaaaagattttttccaatctcagatcacagagatactaaaagatagaaaagattttggtaaaggggatgctggatatggaaaaacagctaatgtggaatttgttagcgctaatcctacaggaccgttgactgtaggacacggacgaaatgcaattttaggagatactgtatcaaatttacttcaatggcagggatttgaagtaacaagagaatattattttaatgatgcaggaaggcagatgaggttattaggacagtctgtagaagcaagatattttgagatacttggtaaagaaatagattttcctagtgaaggataccaggggaattatattaaagagatcgctcaaaccatttttgatgaaaaaggaagtgacttggaatctggcgaccctattttcaaagaaagagcagaggagttgatcttctctgatatcaaaagctctttgataaaactgggaattacctttgatcaattcaccaatgaaaaaacattttatgaaaatggagatattgatagctttctaaaaaagctaaaagataaagaattgatatatgaaaaagataatgcgacatggttcaaaacttcttctttggggaaagatcaagataaagtatatataaaaagttctggtgaaccaacatatagggtaccagacacagcgtatcatcaagataagatcaatagagattttgatctgatcgttgatgtatttggggcggatcatgctgatacttatccagatgtaattctagctcttcaagctctaggtcacaaaaccgatcatattaaagttcttatttatcaatttgtaactctgctgcgtagtggtgagaaaataaaaatgtctacaagaaaagctaattttgtgacactagatgagctggtggatgaactgggaatagatgtagttcgttatttcttcattatgcgtgggatgaatgctcatttggattttgatctcgatctagcagcagaccaatcagataaaaatccagttttttatcttcaatatgcgcatgcaagaatatgcaatattatttcaagggcaaatgataaaggaatcatcttgaatgaatcttttgatcattcactgcttgaccatgaagatgagatcaaccttttgaagtatttatcaaatttcccagatttcgtagaacttggatatgaaaatcttgaacctcaaactatagctaattacctccaagaactatccggatactttcacaaattctatagcaagtgtagagtgattacagatgataatgaacttacgatgtctagaatagcattgatctatgcgactagaactgtgttaactaatggcttcagaatacttggaatttcagctccggaacgtatgtaa

SEQ ID NO: 300627 - DNA, 1111 bp, Unknown
  Bacterial polypeptide expressing nucleotide sequence isolated from the Sargasso Sea
tcggttaaaaaaacctttggcgacaaatacgttgttaagggagattcttcagtactaagttctgacgtgattccagaaatactcaagcaagtaaaagaagaatttccagatttcgacgagctaactgtttttattctctctcttcaaatagatgacattaaaagagttctctcaaagtttagagcgtttcatgagaattggataagtgaaaaaaaactttatgagaaatcaaaaggaaagagtatgttcgatgaggttattcataccttagaaaagaataattcaacatatgtatctgatgatgcgctttggtttaaatcaaaagaaagaggagacgaaaaagatagggttttgataagagataacaaagatccgacctactttgcttctgatgttgcttaccacaaatttaaatttgatagaaaatttgatcgcttagtaaatatttggggtgcagatcatcatggttatatccccagaattaaaggagccttagatgctttgggtttgaaaggagatttgcttgaaacaattattatacaattcgtttcactcaatcgatctgggaaaactgtaagcatgtctacaagaaaaggtgattttgtgtctcttaatgaattaatagaagaggttggaatagacgcatcaaggtttttctttttggcaagaaaaagtgatcaagctttagaatttgatgtcgaattagcattaaagaaagataagaataatcccgtttattacatacagtacgcgcacgccagaatttgcagccttttaaaagaagttgagaaaagagattttgttatagattccaaaaacggtcttgaaaacttaaatttgataactggagaacaagaattaagtttaataaatgaaatagaattatttcaggacactcttgagcaatgtcaaattgatttagaaattcatcctctgtgtttttatttgcgtgatttagcttctaaatttcattcttattacaatgcaaacaagtttattgaagaagaaaaaaacttaagagatgcaaaattcacaattgttttatcaatcaaaagaataattactgacggcttaaatattcttgcaattaatgctcctgaggaaatgtaat

SEQ ID NO: 300628 - DNA, 574 bp, Unknown
  Bacterial polypeptide expressing nucleotide sequence isolated from the Sargasso Sea
tatgaatatatttaaattatacaaagataaaattattaatattttaaaatcagcaaataaagaaaatttaattaaattaccagaaaatttaaattctattaatgtagatttaccaccgtcaaaatttaattgtgatatttcaactaatgttgctatggttttgtccaaatctaatgaaaaatcaccaattgtattagctgaaatattgtcaaaattaataaaacaaaatgatcattacataaatgatatttcaatagaaaaaccaggatttataaatattagattaaataaagacttttggaatttttttttaaaaaaaattataaatgataatagctatggttcacaaaaatcattaaatcaaaagaaataccttgtagaatttgtatcagctaatcctacaggaccattgcatgtgggacattcaagaggtgctatattaggcgatgttatttcaaatttattaaaatttaataatcatattgttacaaaagaatattatgtaaatgattatggcaatcaaattttacactttacaaagtctgtatatttaagaatacgcgaaattttaaaa

SEQ ID NO: 300629 - DNA, 439 bp, Unknown
  Bacterial polypeptide expressing nucleotide sequence isolated from the Sargasso Sea
ttgaaagatataattaaaaatatacttgtcgatgctattaacagaacatatcctaataaaaactttattaaattaattgaggttcagaatgttacggcaaaaaatgtagatgcagattttttttctaatatatcaatgaagctgtctaaggaacttaagattaatccaatggaaacagctaatcaattaattaaaaatatgtcgatgaataatgatatacagattgacgtagtcaagcctggatatataaattttcttatcaaagatacgaaaaagaataatattatttcagcaataaatactaataacgatctactagaaaattgtagagctaacaataagcttaatatcaatgttgaatttgtgtctgccaacccgactggtccattacatgttggtcacggccgtggagttatttatggaaatataatagctaagt

SEQ ID NO: 300630 - DNA, 838 bp, Unknown
  Bacterial polypeptide expressing nucleotide sequence isolated from the Sargasso Sea
attgactaaggatggtaaggcatataaaaaagatggggctgtatggcttgatactgaaagtgctggagatgataagcatagggttctaataagagatgatggaagagcaacatactttgcatctgatgttgcatatcataaaaataaaatagatagaggatatgataatttaattaatatctggggtgctgatcaccatggttacataaaaagaattgaagcctctatagaggcgattggttctaaaaaagaaaagttaatagtaaagctcgttcaatttgcaaatctttttaagaatggtaaatcagtcaagatgtctaccagatctggggaattttttaccctaagagagcttttagaagatattggatccgatgcagcaagattctattacttatcaaagcaagctgatcaacatctagattttgatttagatttagcaaaatctgatagcaaggaaaatattttctactatattcaatatgcccatgctcgaattttttcattggaacaaaaatataaggaaatgtacccaaacctagatcctagtatacaagcaattgaagaagacctttataggaaatgtgactctcttattcatgaaataagcaaatatccatacattgttaataaatctgcaagaacactacaacctcatataattattttttacttgagggatttatcgcaattatttcatagttactataacgataatcatgttctctctgaatctaaagaaaatatgcgatctataattttatgtttgtctgctttaaggcaggttatttctaacggactaggtattcttggtatatcgccaatgcaaaaaatgtga

SEQ ID NO: 300631 - DNA, 1119 bp, Unknown
  Bacterial polypeptide expressing nucleotide sequence isolated from the Sargasso Sea
aatgaatatatttgaaaattatttattaaagataaaaaaaattattaaatctggccacaaaaataatttgttagagttgccagataatttatcaggtatcaatgttgatattccacctgcaaaatttactggagatatttccacaaatgttgcaatggttttatccaaaattaataaaaaatctccactagaacttgctaagcagatagctgacctaataaaagatagtgataacaatattgatgaaattagcattgaaaaaccaggttttattaatctaaaatttaaaaatgaattttggaatggctttatactagatgtcttaaataattcatcatatggaagtagcattagtggaaaaaaaaatagttatttagtagaatttgtatctgcaaatccgactggacctttacacgtaggccattcaagaggtgccatacttggagatgtaatatctaatcttttatcctttaacggtcataaagttaccaaagaatattatgttaatgattatggaaatcaaatctctcattttacaaaatctgtttatttaagaataaaagaaattctttatgatgaaacttttccgatagacgataaggaattatatcctggagactatcttatagatatagcaaaaaaaataatttcaaaaaataaagatttagatttcaaaaactttgaatcagtttcagaaaaactaaaaaaactttcaatacaagaatctttaaaattaataaaaataaatttagaaaatcttggtataaagcatgataattttgcaagtgaaactgatgtaataaataataatgaagttgatgaagtaataaaaaatttaaaagaaaaaaaatatatttatgaaggaaaaattaaagcacctgaaggagaaagtgatgaaaactgggtagaaagagagcaattattgtttaaatcaacagactttggtgatgataaagatagagcactacaaaaagaggataaatcgtggacatactttgcaagtgatgttgcttatcataatacaaaattaaaaagaaattttaatattcttataaatattcttggtgctgatcacgctggttatattaaaagaattacttcagtagttgaggcattatc

SEQ ID NO: 300632 - DNA, 730 bp, Unknown
  Bacterial polypeptide expressing nucleotide sequence isolated from the Sargasso Sea
aatgaacatttttgaagtttatctagaaaaaatcaaatctataattagtgaacttcaaaaagataataaaataattgttcctgataaatttaatggaataaatgctgaaatacctccaccaaaatttaattgcgacatctcaacaaatgttgcaatggtattatctaaaattaataataaaccacctcttgatctagcagaacaacttgcacctataataaaagataaagataaattaatagaaacaataactattgctaagcctggttttattaacataaagtttaagaaatctttctgggcaaattttactaaagaaatcagcgacaattctgaaatttttggaataaatcaaaaagaaaaaaagaataattatcttgtggaatttgtgtctgcgaacccaacaggaccattgcatgttggtcattgtcgaggtgcaatacttggtgatgtaatttcaaatatattaaccttcaacaatcataaagttaccaaagaatactatgtaaatgactatggtaatcaaatcattaattttacaaaatcagtatattttcgaatacgtgaaataactcataaagaaacatttccatctgataatgctgatttatatcccggtgattacttaatagattttgcaaaaaatatatcctctaactcaaatttgaattttgataaatatgatgaaattagtgagaaactaactgaattatcaattgaacaagcatta

SEQ ID NO: 300633 - DNA, 1069 bp, Unknown
  Bacterial polypeptide expressing nucleotide sequence isolated from the Sargasso Sea
catgaataatgatgagataagtgaggctggcctcgagctttctagaaataaaaacaacgaccacggagacttctcaagcaatattgctttaaagttgtcgggaaagttgaagcgctcgccgatggtcattgccgaggagatcgtcagctcaattcagttttttgatgggcttgaaagaacagagtttgtaaagccaggctttattaatttctatctttcagctgaaaaaaaacatggtgttcttgaggaaataatgagtaaaggaaaatcatttgggtcatcctgtgtttcagaaaaaaagaaggttcttttagagtttgtctcagcaaatccaactggaccacttcacgtagggcatggtcgtcatgctgcttttggtgactctttggcgcgtttgctcagaaagtctgggcatgaggttgttacagaatactatctcaatgatgcaggtagacaaatagacatcctttgtgcgagcgttatgtttgagctacttatactagaaggtcagaagcttggccaaattgctggactctataagggttcatacattaaagagattgctacagggcttcgagatgaaggcatggtgatcaataaacaaataacacttccaaaaacaggcggatcagatgatgaaattgtcgacgctctcatattggaaatgagggatattgctggaaatgatctttttcagatcgttttagagaagactgtgctgcaaatgacaaaaatgcttaaagatgatcttgcagactttagggttatacaagatggtttttattcagaaaaatctctcttttctgaaggaaggattgaagaagcatgcgagatcattgagaaaaatggaaatgcttataaaaaagacggcgccctgtggcttgaatcaactaagtatggtgatgataaggatcgtgtggtcatcagagaggatggaaggtctacttactttgcttctgatattgcttatcatcatcacaagaagattaggggctttgatcttttaatcaatgtgctaggctctgatcaccacggctatgtcacaagacttaaggcgggtcttgcctca

SEQ ID NO: 300634 - DNA, 1420 bp, Unknown
  Bacterial polypeptide expressing nucleotide sequence isolated from the Sargasso Sea
atgaatatttttgatcaatatttagataaaataaaaaatattttattagacttagctgacgaaggtataatcttactacctgaaaagttagatggaataaatacagaaattcccccagaaaaatttaactgcgatctttcaactaatgtggggatggttttgtcaaaaataaataaaaaaaatccaatagaaatagctcaaactattgctgacactcttaaaaaaaaagatccattaattagtgaaatttcaattgtaaaacctggttttataaatattaaatttaagtcaatattttggacaaattttattcaaaaaattattgagaattcaaaaacatttggaaaaaatatcaaagagaagaaaaaaagttatcttattgaatttgtttcagctaatccaacaggcccattacacgtaggtcactgtcgaggtgcaatattaggtgacgtaattgctaatgttttattatttaataatcataaagtgacaaaagagtactacgtaaatgattatggtaaccaaataataaattttactaaatctgtttatttaagaattaaagagattaagtttggtgaaccttttccaaatgatgaagatttatatccaggtgattatttaaaagattttgccaataatattatttcatctaataaaaaaatggactttagtaattttgataatatttcagatgaattaacctctctttctatagatgaggcgcttaaacttataaaaaaaaatcttaataatcttggtataaaccatgataatttcataagtgaaaagaaattagttttaaatcaagaggtagaaaaagtaatagattatcttagaaaaagtaaatttgtctatgagggtaaaataaaagcacctgctagcgaagacaacgataagtggattcaacgagaacaattactttttaaatcaacagattttggagatgataaagatagagcactacaaaaatctgatggcacttggacatattttgcaagtgatgttgcatatcataaaaataaacttgatagaaattatgattgtttaataaatattttgggagcagatcatgctggttatattaaaagaatttcttcttcagtagaggctttatcaaagtcaaaagaaaaacttatttgtaaggtaagtcaattagttaaacttattaaagataaaaaaccttttaaaatgtctaaaagaaaaggggattatattacagtcgaagatttaatcagtgaggttggaaaggacgcaacaagatttataatgttaaatagaagtagtgatgtagaattagattttgattttgatagtgtggtagaaaaatctaaagacaatccgctttattatgttcaatattgttatgctagaattgcatcagtttttagacaccttgatatgaatttaattgatgatg

SEQ ID NO: 300635 - DNA, 1630 bp, Unknown
  Bacterial polypeptide expressing nucleotide sequence isolated from the Sargasso Sea
atgattgatatcaaaaaatatttaagtgaaatagttgctgatgcgttagcaaaattaaatgttcaatcaaatattataattgaaaaatcatctaatacaaattttggagattattcaactaatattgcactatccttatctaaacaattaaaaaatagtccactaaaaattgcagaagatattggcaatctattaaaaattgataaaaatattattactgaatattcagtaacaaaacctgggtttttgaatttctttgtatctaatacatattaccaaaaaacggttaacgaaataatttcatcatccaaatcatatggtatgacagaaattggaaaaaataaaacagcaaatgttgagtttgttagcgcaaaccctacagggcctctaactgtagggcatggacgtcaagcagtattgggtgatacaattgcgaatatattagaatggcataattatgaagtcactagagaatattattataatgatgcaggaagacaaatgcgcatattaggtgagtctgttgctgcccgctattttgacttaattggcaaaaagtacgatttcccagatgatggatataaaggtgaatatattatatcaattgcaaatcagataaaagattcacataatgaaaaattgcaaacaaattctaaagtttttagaagagaagcagaaaaagcaatttttaaagatattaaaaaaacactcaattcaattggtataaaacacgatgtgttttcaaatgaacaaacatattatgacaatggatcaattgacgaattagtcaaagaactcaacaataaaaatcttatatataattctgatggcgctgtgtggtttaaagctacaaagctagggctggaaaaagatcgtgtgtattataaaagctctggggaagcaacatacagattaccagatactgcttaccatagacataaattaaatcgagggttcgatttagttgtagatatttttggcgctgatcatgctgatgcttatcctgatgttttagctgcattaaatgctctagatattgatacgaaccctataaaagtactaatacatcaatttgttacattattaaagggcggtgaaaaagtaaaaatgtctactaggcaggcaaattttgtaacattagatgagctaatcaatgaggtcggtggtgatgtggtaagatatttttttatcatgcgaagcatgaacagtcatttaaattttgatcttgatcttgcggctgatcaatcagaaaagaatcctgtatattatatacagtatgctcatgcaagaatatcaaatattataaataatgggaaatcaaagcacattgatgttgatggaaattttgattctagtttgttactaaatacagctgaaatttcattaattaaatcattatatgaatttcctgaaataatgaaaaagacattaaacacgcttgagcctcaatccatagcaaaccacttacatgatatagcatcagaatttcacaagttttatgctaagtgtcgcgttataactgatgatattgagttaacaaaatctcgtattcatcttatcaaatcagtaaaaatagtgttggctaatggtttaaatatcctagggattcaggcaccagaaaaaatgtaaa

SEQ ID NO: 300636 - DNA, 771 bp, Unknown
  Bacterial polypeptide expressing nucleotide sequence isolated from the Sargasso Sea
aatgaatatttttacaaattatttagatgagataaaaaaaattttatttaatttatcaaaaaaaggtgaattaattttaccagataaaatgaatgggattaatacagaaataccaccatcaaaatttaattgcgatatatcaacaaatgttgctatggttttatctaaattaaataataaatctccaatagacctagctaaaattttatctggggaaataaaaaaaaatgatcaattaattgaagatatatctgtggtaaaaccaggttttattaatatcaaattcataccaattttttggacaaagtttgtaaaaaatataactcaaaattcaaaaacttttggaattagtaaaagtaaaaaaaaaaaaaattatttagtagaatttgtatcagcaaatccaacaggacctttgcatgttggtcattgtagaggagccattttaggagatgtaatttctaatgttttattatttaataaacataaagttaccaaggaatattatttaaatgattatggtaatcaaataatcaattttactaaatctgtttattatcgaataagagaaattatctataaagaaccatttcctaatgataatgaaaatttatatcctggtgattatataattgattttgcacaaaatataataaattcaaataaaaaattagatttcaaagatttcaaaaaaatttcaaatgaattaacagctctatcaactaatgaagctctaaaattaatcaaaaaaaacctgaatagcgttggtattaa

SEQ ID NO: 300637 - DNA, 1008 bp, Unknown
  Bacterial polypeptide expressing nucleotide sequence isolated from the Sargasso Sea
aatgcaacaaaaaatacttaaccagcttaaattaatcgttgaggagctcataaagaagtccgatgttggtgatataaagtacaaaataaggctacaagaaaataaagacaaagagcatggtgattatgcaagcaatatagcaatgattcttgccaaggatttatctgaaaaccctaagaatttagcaaagcaaatatctgaagagtttttattagatgaagacatcttaaaggtagaggttgctggaccgggttttataaattttttcgtttctcaggctactcatgcagagattttaaaggatatagattcagaaaaaggaaaatatggtcataacaaaaagaaagcaggtaaagtcttaatagaatatgtttctagtaatcctacaggccctttacacgtgggtcatggaaggggtgcagtatttggatcagtcttagcaagtcttttaacagctgcaggacatgaggttgatgaagaatactatgtgaatgattacggaaggcagatgaacattctgactgcaagtgtttggataagatatctacaaaactcgaacgaaaatatatcaatgagcgctttgggatatcaaggagactatattaaattaattgccgaaggactctttagagaaaaaaaagaagaatacctactttcagataatgaccaagaaaatatcttacccatactcaaagtgcagaaagatgaaaaggacgtcgactctttaatttctttcatgcaatcaatattaggagaagggttttttgaaattagatcttttgctttagataacatgttagacattattaaatctgatctaatcaattttggagttaagcataatttatggttctttgaatcgtctctctacttcgaagaaaaggggaaacctagtaaagctgacaaagctatatctgacttaagttcaaatgactttgtatacgagaaagatggagcaatttggtttaaatcgtctgaattaagagatgataaagatcgcgtactgca

SEQ ID NO: 300638 - DNA, 550 bp, Unknown
  Bacterial polypeptide expressing nucleotide sequence isolated from the Sargasso Sea
aatgaatatatttgaaaattataaaaacaaaattatttcaattttaaatgaagcagctagtgaaggtcatattgtgctacctgataatttaaatggtattaatgttgatagcactcctaaatcaattgactttgatatttctacaaatgtatcaatggtactagctaaattaaattctaaatctccagaagaattatcaaaagttataattaaattaattaaaaaaaaagatactaaaattgatttaatagagtttgctaaacctggttttattaatattaaatttaccaaaaagttctggagtgagttttctcaaagtgttattgaaaatgaaatatcatatggttcgagtaaacttaaaggcagaaaaatacttgtagaatatgtgtcagctaatcctactggcccacttcatgttggacattgtagaggtgccatattaggtgatgttatctcaaatcttttaatttttaacaataatgatgtatcaaaagaatattacgtaaatgatcatggtaaccaaatttatcattttacttattctatatat

SEQ ID NO: 300639 - DNA, 631 bp, Unknown
  Bacterial polypeptide expressing nucleotide sequence isolated from the Sargasso Sea
attgaaaaaacaacttcaagaattaattaatcaatccctacaaacattaaaatccgaggggcttgaaattacaattcaaaaaaacgacattaaaattgaatatagtcgtgacgcatcgcatggtgattttgctacgaatatagctatggtactagcaaaaatgttggactgtaatccgcgtgaattggcaaataaaatcactaaaaatatacctaaaacggatttagtaaaaaatgtagagatcgctggacctgggtttattaatttttttctcagtcaaaattcatatcaatcagtcgttttagatattttaaaacggggtgacttgtacggaaattctaaaatcggagaaaacaaaccaaccttagtcgaatttgtctcagcaaaccccaccggacctttgcatattggccatggaagaggggccgcttgtggtgcggctatttgtaatttgctaagaaaaactggatttgatgtttactgtgaatactatgtaaatgattcaggaagacaggtaaatatcctaacggttagtgtctggttacgatatttacaacaatttgaagagaagattattttcccagacaatgcttatcaaggtaattatatcactgatattgcaattagctta

SEQ ID NO: 300640 - DNA, 1629 bp, Unknown
  Bacterial polypeptide expressing nucleotide sequence isolated from the Sargasso Sea
gttgccagataatttatcaggcataaatgttgatataccacctgcaaaatttactggcgatatttccacaaatgttgcaatggtattatctaaaattaataaaaaacctcctcttgatcttgctaaacagatagctgacttgataaaagatagtgataaaaatatcgatgaaattagcattgaaaaaccaggttttatcaatctaaaattaaaaaatgaattttggaatggctttatattagatgtcttaaataattcatcatatggaagtagcacgagtggaaaaaaaaatagttttttagtagaatttgtatctgcaaatccaactggacctttgcacgtaggccattctagaggcgccatacttggagatgtaatatctaatcttttatcttttaacggtcataaagttaccaaagaatattatgtaaatgattatggaaatcaaatctctcattttacaaaatccgtttatttaagaataaaagaaattctttacgatgaaacttttccgataaacgacaacgaattatatcctggagactatcttatagatatagcaaaaaaaataatttcaaaaaataaagatttagattttaaaaattttgaatcagtttctgaaaaactaaaaaaactttctatacaagaatctttaaaattaataaaaatcaatttgaaaaatcttggcataaagcacgataattttgcaagtgaaactgatataataaataatcatgaagttgatgaagtaattaaaaatctaaaagaaaaaaaatatatttatgaaggaaaaattaaagcaccggaaggagaaagtaaagagaactgggtagaaagagagcaattattatttaaatctacagattttggtgatgataaagacagagcgctgcaaaaagaagataaatcatggacatattttgcaagtgatgttgcttatcataatacaaaattaaaaagaaattttaatattcttataaatattcttggtgctgatcacgctggttatattaaaagaataacttctgtagttgaggcactatcaggtgaaaaaaataaattaatttgcaaagtaagtcagttagtaaaactgattaaagacaaaaaaccttttaaaatgtctaaaagaaaaggtgactatatcaccatcgaggatcttattaatgaagttggtaaggatgcaacaaggtttattatgttaagcagaagcagtgatgctgaaattgattttgattttgataaagtaaaagaaaaatctaaagaaaatcctatttattacgttcagtatgcatatgctagaatatcgtctgtgtttagaaatacccaaaatgatataaatagcaatcttaagataaagaattcagattttagttttggcaatgaagaaataaaacttttcaaaaaaattagtgaatggcctaaatgtgttgaagtatcttcagaaaaattagaaccacatagaatttcagtttatttatacgaattagcttccgagtttcattcttattggaatatgggtaaggaagatatttctaaaagatttattggtcaagataattcaattcaaatggaaaaactagttttcctaaaatctatagcaaatactttgaaaacaggtatgaatatttt

SEQ ID NO: 300641 - DNA, 850 bp, Unknown
  Bacterial polypeptide expressing nucleotide sequence isolated from the Sargasso Sea
atgaatatatttgaaaattatctagaaaaaataattaatttgcttaataatccaaaattaaatagctctattcaacttcctgaaaaaatagctggtataaacgttgatgttcctcctcaacagtttaattgtgacatttcaactaatgctgcaatgattttatcaaaagctaacaaaaaaccacctctcgaaatcgctaatgagttagcagaattaataaaaaaaaatgatgaagagattgatacaatcactacagttaagcctgggtttattaatataaaatttaaaaattctttttggaacaaatttataaaagaaataatttttcaaaaagaaggttttggtgttaataaaaaatcacctaaaataaaatatcttatagaatttgtttccgcaaatcccactggtcctctccatgtaggtcattgtcgtggcgctattcttggagatgttttgtcaaatttgctttcatttaatggtcataaagttagcaaggaatattatgtaaatgattatggtaatcaaattattcatttttctaaatcagtttattttagaattagggaaatccttaataatgaaccatttccaacaagcaacaaagatttatatccaggtgattatattattaatattgctaaaaatattattaataacaataaaaatttgaagtttgataattttgatcaagtttcatcaaaattaaccactctatctgtggctgaatctttaaaattaataaaattaaatcttaaaaatctaggtatagttcatgataaatttgttagcgagactgaattagttaaaaataatgaagttgaaaaaactattaaaaaactaaaaagctaat

SEQ ID NO: 300642 - DNA, 823 bp, Unknown
  Bacterial polypeptide expressing nucleotide sequence isolated from the Sargasso Sea
actgaatgagatcggtctcgagctttctagaaacgccaaaaatgatcgcggagacttttccagcaacattgctctcaagttggccagcaagcttaagagtcctccaatgaaacttgctgagcaaattattggctcccttgaaacccccgctgaactagagctggcagagtgtgttaagcctgggtttataaacttctacctttctgctgaaaaaaaacacagcgttctcgaaacaatattgaaacacggcagggattttggctcgtcttgtgctccagaaaaaatgaggattcttctagaatttgtctcagcaaatccaactgggccacttcatgtaggacacggtcgacatgctgcctttggtgattcactggcgcgccttctaaaaaaagcgggtcatgaggtttttactgaatattatctgaatgatgcgggcaggcagatagatatcctttgtttaagtgttatcttggagatgcttcgtgctgaagggctggaattaaagaatatcagtggcctttacaaaggcatatacatcaaagaaatttctcaagcattaatcaaagaaggtttcgagataaataaaaaagtcttgattccaaagctcgacggatcagctgatgaaattgttgatgcgcttatattagaaattaaaaatgttacaggatccgagctttttcaaaaaatttcagacaaaaccgtatctcgaatgacaaaattgcttaaagacgacctttcagactttagagttaagcaagatggtttttattctgaaaaatctcttttttctaaaggaaaaattgaagaggcttggaaatcataa

SEQ ID NO: 300643 - DNA, 795 bp, Unknown
  Bacterial polypeptide expressing nucleotide sequence isolated from the Sargasso Sea
tttgtatgggagttcagaatctattcatgatgaatttgaaataagcatccaagacaataaagagaatcaatatggtgatctcgctagcaatgtagctttagtgctagccaaacccctaaaaagaaatcctaaagagattgctgaagaaattaaaggcaaatttataactgacaaggaaatagtaaaagttgatgttgcaggccctggttttatcaactttttcttatctaaagagtcacatggcgcaattttgagagatatctcaattcaaaaagataagtttggaaaatttgaatccaataataaaaaggttcttatcgaatatgtctcaagcaatccaacaggtcctttacatgttgggcacggaagaggtgcagtttttggatctgtattgtcgagacttttgaaggaagcaggatttcaagtagatgaagaatattatgtaaatgattttgggagacaaatgaatattctttccgtgagcttatggattagatatgcacagatattcgacaagaacataaaaatgttaaataacggttatcagggcgattatcttattgtcattgcacaacatttaaagaagttaagatctgatgagctgtttgatgatgatgatgaaataaagagccttctagaatatgagaacgaagaagctgaaaaatatactgacgaggttattgatagcatcaaatctaagctaaatgatgaattttcttatgtgagagattttgctctcagagaaatattagagttaataaaggaagatctattagaatttggcgtcgatcacaa

SEQ ID NO: 300644 - DNA, 1558 bp, Unknown
  Bacterial polypeptide expressing nucleotide sequence isolated from the Sargasso Sea
aatggtcgttgccgaagaaatcatcaactcaattcatgtttccgatgagcttgaacgaacagagtttgtaaaaccaggttttattaatttctatctttcagctgaaaaaaaacatggcgttcttgaagaaatcacaagcaaaggaaaagcatttgggtcatcttgtgtttcagaaaaaaagaagattcttttagagtttgtctcagcaaatccaactggtccgctccatgtagggcatggtcgtcatgctgcttttggtgactcattggcgcgtttgctcagaaagtctgggcatgaggtttttacagaatactatctcaatgatgcaggaaggcaaatagacatcctttgtgcgagtgttatgtttgagcttcttttactagaagggcagaagcttggtcaggttgatggtctttataaaggctcatacattaaagagatcgctggaggtctccgagaggaaggtgtagcgatcaataaaaaaatatcgctcaccaaagcaagcggatcggatgatgaaattgttgatgctctcatattggaatttaaggatgttgctggagatgagctttttcagatggttttagagaagactgtcctgcagatgacaaaactgcttaaagatgatctttcagactttagggttagacaagatggtttttattcagaaaaatcgctcttttctgaaggcaggattgaagaggcttgcgggatcattaagaaaaatggaaacgcttatgaaagagatggtgcgctgtggctcgaatctacaaaatatggggacgacaaggatcgcgtggtcatcagagaggatggaaggtctacttactttgcatctgatattgcttaccatcatcacaagaaggttagaggctttgaccttttaatcaatgttctaggctctgatcaccatggttatgtttcaagacttgaggcgggtcttgcttcaacaggaaataagatctctgacttagaggtaattctgatgcagtttgtcaccctttacaggggtaagaaaaaaattcagatgtctactcggtcagggaactttgttcccatgagagacctctattcggaagttggggttgatgccgcaaggtttttttatgtcagtagatctcatgatcaacacttagactttgatctagaacttgcaacaaaacaaaacaacaaaaatcctgtttactacatccaatatgccaatgctcggataaaaagcgtgatcaaagaaaataaaaaaaggggctatttatttgatgaagccttagggaggtcaaatcttggaaagcttaaactgtctattgaggaagatatcatttctcttttaggcaaatatccagaaaccatcttaaaaagctctaatagcagagaggtgaacaaaatagcaaactatctaaagtctttatcacagctttttcattcatattatggttcaacaaagtttgtatcagatgaagatgggcttagaaatgctagattgcttttattgaaatgtgtgtccacagtaattgaggacggccttgatatcttaggcgtttccgctcccactaagatgtag

SEQ ID NO: 300645 - DNA, 1438 bp, Unknown
  Bacterial polypeptide expressing nucleotide sequence isolated from the Sargasso Sea
aattcaaaaagataagtttggaaaatttgaatccaataataaaaaagttcttattgaatacgtttcaagcaatccaacaggtcctttacatgttgggcacggaagaggtgcagtttttggatctgtattgtcgaggcttttgaaggaagcaggatttcaagtagatgaagaatattatgtaaatgattttgggagacaaatgaatattctttctgtgagcttatggattagatatgcacagatattcgataagaatataaaaatgttaaataatggttatcaaggcgattatcttattgccattgcacaaaatttaaagaaattaagatctgatgagctgtttgatgatgatgatgagataaaaagccttctagaatatgagaacgaagaagctgaaaaacatactgacgaggttattgataggatcaaatctaagctaaatgacgaattttcttacgtgagagattttgctctcagagaaatattagaattaataaaagaagatctattagaatttggagtagatcacaataactggttttcagaatctacactttataaaagtgaaccgcatgatcttagcaaggttgatcaatctattgatgagctttcatctaaaggtttcgtatacgaaaaagaaggtgctatttggtttaaatcttcagaacttggagatgataaggacagagttttaaaaagaggcaatggtgaatttacttattttgcctctgatgttgcctaccacttagacaaatatgatcgcggatacgataggataatcaatatttggggttcagatcatcatggctatcttccaagagtgaaggcggccatggaagcaagtgaaaagaatgtagaaaagcttgaagtggtctttattcaatttgctaatttaattagggcagggaaaaaagtgaccatgtctactagaagcggtgaatttattacacttaaagaactcatagaagaggttacatcagaagcagcaagatttttttatattaatagaaaagctgatcaacatttagactttgatttagacctcgcgaaagagcagtctaaagataatcctctgtactatatacaatacgcacatgctcgcatatgcagtgttttacgtaagtccaaagttcaagaagaagaattgactacatcagaacttggattattggattccaacaaagagatagaaatacagaaaattcttaaacagtatcctcctttaattgaaagagcagctctagcaagcgagcctcatttaatttgctattacttaaaagacttggcaagtatttttcatagttactacaatactgaaaaatttatagttgaagatcagaagcttatgaactctagattgtttttgctgagtggagtaaagcaagttatttataatgggctcaccgttctgggtataaatgctcctcatgaaatgtag

SEQ ID NO: 300646 - DNA, 1711 bp, Unknown
  Bacterial polypeptide expressing nucleotide sequence isolated from the Sargasso Sea
atgattttagataaattaaataacaaactagtcgaagttgttaaaaatacagcaaaagaaaaaagtgtagaaataagtgaagaaatcttaaatcaggtacattttgaaattaatgatgaagagagccatggagattattctacaagttgtgccttaaaactagctaaaacattcagtatgaatcctagagaagtagcagaatctttggttgagcatttagctttgccatctattaagtcattagctgttgagggcgctggatttattaatgtcttcctaactagcagtgaaaaaagcctcttattaaaagaaatagtgaggttagattcacagtggggcaaaaatgaaaaacataaaggccaaatattagttgaatttgtatcatctaatcctacgggaccgctgcatgttggtcatggaagaggggctattctaggaatggccttatcaaacttactagaaaattcaggctatcaagtaacaaaagaatattatgtaaatgatgctggaagacagatatctatacttacgagcagcatacttatagatgcatatgtagagaatttgaatattaatggtatgtatgaaggtagctatatacatgaacttgcacaagaattcttaaaagatcatggaaaagttgatattgctcttaaatcagaggagctttctgacgataaagaaaaggctttggatcaaatatctgaatattttcaaacaaatcatgctgataaatgggaagctgcaaaaaatttctcggtagcgaatattctcggcacgataaaacaagaacttcgtagcttcgatattgtccatgataattggtttcatgagagctctcttggatctatccaagattcaaattctgatctatcaaaatctctatcagtaattgaaagggctggtcatacattctctagggatgatgccatctggttcaaaactacagagttccaagatgataaagatagagtgttattaagagaaaatggagagccaacttattacttaactgatgttgggtatcataaaaataaaatagatagaggttatgacttatgtataaatatttttggggctgatcatcatggatatataacaagattaactgctgcatttgatgtgatgaaaagcaaaaagcaagaaattgaatttatgctttatcaattagttaatctttatgaagatggcaataaaagggcaatgtctacaagaaaaggcgagttctactctctagaagagttaagaaaggaacttggtcctgatgtaattaaattcttcttccttgaaaaaaaatctgatcacccaatggattttgatattaatttagctaaagatgaaagcaagaataatccttacttttattctcaatacgctcatgtgagatgttgctctatattaactaaaaagagttttgaccctgatattcaagttgatgataaagaaatagaaaagaattttgatattgttaataaaataataaacttcccacatttcttggaaagatatacagatgaaagatctcctcattcgttagttcactatatcaaagatctatcagcagcttttcatgctttttatgagcaaaatccagtcataaatgatgaggaaaaaatagaaaattcaagactgcttttgaccttagcaactagggttgtgctcgcaaatagttttaagattttaaatgttaagccactagagaagatgtaag

SEQ ID NO: 300647 - DNA, 433 bp, Unknown
  Bacterial polypeptide expressing nucleotide sequence isolated from the Sargasso Sea
atggacaaaaatgttttatcaataatcaatgaaaaatattctactaccatttctgacgatctaaaaaatggtcatttgaccagtaatgtatgtatggttgctgcaagtatattgaatcttaatccaaaagatttagctaaagaattagaagaaaagcttaaaaaattaaataaatttcaagaaattaaagtagctggtcctggatttataaatatatctcttaatagaaaagattttatttccattttagatgaaataaataataacaaagaaaaatttggagaatctaacctaggcaatggaaataaaatacaaattgagtttgtgtctgcaaatcctactggacctttgcatgttggtcatggaagaggtgctgcatatggtgacgccctagcaagaatccttacaaagacagggtctatagtagaaaaag

SEQ ID NO: 300648 - DNA, 1735 bp, Unknown
  Bacterial polypeptide expressing nucleotide sequence isolated from the Sargasso Sea
gatgaacatatttgatatatatcttgataaaataaattttattgtaaataagggtaaaaaaagcaaccaaattatagtaccagaaaatatatccggaattaatgtagatattcccccagataaattcgatgccgatatatcaactaatgttgcaatggtactggctaaaccaaataacaaaaaccccttagagatagctgaaattataacaaaacttttaattcaagaggatgatcaaatcgataaagctgataccgtaaaaccaggttttattaatattaaattaaaaaaaagtttttggaataactttttaaaaaacacaataaacgaaggaattaaatacgggactaacaaaaaaaatgttaaaaaaaaatatcttatcgaattcgtttctgcaaatccaactgggccgttacatgtaggccacagtaggggcgcaattttaggagacgttttatcaaatcttttaaaatttaataatcatgaagttgtaaaagaatattatgtaaatgactatggtaatcaaatagttaattttactaaatctgtctatcacagaataagggaaataaaatttaatgaaaaatttcccactgataatgaagacctctatcctggtgattacttaatagaaatagcaaaaaacattataaaaaaaaataaaaacattccttttgattcttatgaaagttcatcagaaattttatctaaaaaatcaattgaagaatctctagtgattataaaatcaaatcttaaaaatttaggagtacaacatgataattttgttagtgaaacattacttgttgaaaataacgaagttgatgatgtagtaaaagatctaaaaaataaaaactttgttttcgtgggtaaaattaaagcaccagaaggtgaagataattctaattgggttgaacgtgatcaattactcttcaaatctactgattttggagatgataaagatagagctttgcagaaatctgataatacatggacatattttgctagtgatgttgcttatcataataataaattaaaaagaaaatttgattttttaataaatattttaggcgcagatcatgctggttatattaaaagaattacttcagtagttgaagctatatcaggtaaaaaaaataaattagtttgcaaagttagtcaattagttaagcttatcaaagatggtaaaccttttaaaatgtctaaacgtaaaggtgattatataacagtagaagatttaatttccgaagttggccgtgatgccacacgattcataatgttgaatagaagcaatgatgcagaattagaatttgattttgaaaaagttaaagaaaaatcaaaggataatccattatattatgttcaatattgttatgcgagaatttcttcagtttttcgaaatattagtaaaaaagtttctgatgatgtaattattaatgaatataattttaattattcaaaagaagaaatagaaatattaaaaaaaatatcacaatggcctaaatgtgttgagatttcatctaataaattagaaccacacagggttccagtctatctatatgaattggcccaacaatttcatcattattggaatctaggtaaagaggatgaaactaagagatttatttcaaaagacaaaactatatctgaagataaaattgctatattaaaaggcgtttcaatagttattaagtcaggaatggatatactgggtgttagcacacccgaaagaatgtaa

SEQ ID NO: 300649 - DNA, 1723 bp, Unknown
  Bacterial polypeptide expressing nucleotide sequence isolated from the Sargasso Sea
atgaacattttcgacatttatcttaacaaaattaaaaatatagttactaataattctgctaatttaaaaattcctcaaaatttatcaggtataaatgtagatacagctcccgctaaatttaaagctgatctatcaacaaatgtctgtatggttctttcctcattaaataaattgccaccaactgagatttacaaacaacttaatttagatgatctaaaaaatgataaagatattgaaaatattgagtttgttaaaccaggttttgttaatataaaatttgttaagaaattttggaatacttttttgacaaaaatgctcaatgatcaaaaatacggtgcaagtcttaaaaatgataaaaaaaattatttacttgaatttgtttctgctaatccaacagggccattacatgtgggtcattgtcgtggtgctatatatggagatgctttgtgcaatcttttaaaattttgtgatcataaagttaccaaagaatattatgtaaacgatcacggtaatcagatcaaaaacttttctttatctgtatactttagaattaaagaaaaattatataatgaagaataccctaagggtgaaaatttatatccgggagactacataattgaaatagcagaacaaattattagtaaaaattctattaagaattatgaaaattatgaaaaaatttcagatgaactctctaaattgagtgttgttgcctctttagaaataataaaaaaaaatctaaattctttaggtgttgttcacgataattttgtaagtgaaaataatattattaattcaaaagaagttgatgaagctatagataatttaaaaaagaacaatttagtatttaaaggcaagatcgaggcccctgaaggtgaagataagtctaaatgggttgaaagagagcagctactatttaaatctacaaattatggtgacgataaagatagagctttaacaaaaagtgataattcttggacatattttgctggcgatattgcttatcacaacaacaaattaaaaagaaattttgatgaatacataaatattcttggtgcagaccatgccggttatattaaaagaattaattctgttgtagatgctctctctaataaaaagaaaaatttaatttgtaaagttactcagcttgtaaaattgattaaagacggcaaacccttcaaaatgtcaaaaagaaaaggtgattatataattgttgatgacttagttaacgaggtaggtaaggatgcaactcgttttataatgttgagcagaagtaatgatgttcaattagagtttgattttgaaaaagttaaagagaaatcaaaagataaccccctgtattatgttcaatattgttatgcaaggatctgttctgtttttaaaaatgctgatgaaaaaatagaaaatgacctaactgaagttgaaaaaaattatgaatttaacgatgaagaaataaaaataataaataaaatttctgaatggcctaaatgtgtagaggtatcctcacaaaaactagagccacacagaatacctatctatttatatcaactgtcagctttatttcattcatattggaatatgggaaaagataatgagtctatgaggtttttagataaaagtaaaaaattaaataaaaacaaagcggttctattaaatagtgttttgaaaactattggcactggaatgaaaatattagatgtagagacgccggaaaccatgtaat

SEQ ID NO: 300650 - DNA, 1531 bp, Unknown
  Bacterial polypeptide expressing nucleotide sequence isolated from the Sargasso Sea
tttgctcttaatttatataaggagattagtgaataattttataaaagacctttcagattttttatttgattttacagattttttagagagtaacaaatttatatctccaatcaataaaaaacagattagcatcgattactcttcaaataataaacaaggtgatttagcgacaaacttttatttaattgttaaaagaaaaattattaatgaaaattttaatattgaaaaagaactaaatgatagaattaaatcaattggatttatcgatcattttgtggtttcaaaaaatggttttataaatttttttctcaaagataaatttgtattaagaagtttaaaggaaatttatagtaaaaattttttaaattatattaattatggtgcaggtaaaaaaataaatgttgaatttgtttcagctaatccaactggaccattgcatatagcccatataagaggtgctgtatttggagatgtattaagctctctttatactaaaacaggttttgatgttaccagagagtattacgtaaatgatgcaggttctcaaattgataaattatcaaactctcttttaaaacgatatttacaattatttgataaaaaaattgaattagaagaagatgagtatcctggtgaatacctaatagatattgcaaaaaaaattaaaaatgaagattctgataagtggttaaactttcagcaagaggaaactattcaacatttcaaaaactttgcattaaaaaatatacttttaagcataaaatcagatttagaattaataaatataagatttgataaatttactcacgaaactgaaatagaaaaaagtaaaattattaatgaactttttttaatcttagatgaaaaaaaattactatatgaaggtattttagaaaaaccaaaaggtgatgattctgattgggagccaagagagcaattattatttagatcctctaaattattagacaatgaagatcgagcattaaaaaaatcaaatggtgaatggacatattttgctaatgatgcagcataccatttagataaatgtaaaagaaattttgatagattagtaaatatttgggggtttgatcatattggctatattccaagaatgtattcgttaattaaagctattaaagatgatgaaacttatttaaaaattttaacttgtcagattgtaagtttaattcaaaataaacataaaattaaaatgtcaaaaagatctggaaattttgttacattagctaatgttcattctaaggttggaaaagatcctataaggtactacatgatttctactaaaaatgagacagcaattgactttgatttagatgctgttgttgaaaaaaataaagataataaagttttttactgtcaatacgcacacgctagagcttcatcagtaattaataaagcaaacgaattaggtataaaaattaaaaatgattataatttttctgaaataaaaaatctatcttatgaggagataaaattaatcaaaaagttaatttgttatcctttatttgttgta

SEQ ID NO: 300651 - DNA, 1633 bp, Unknown
  Bacterial polypeptide expressing nucleotide sequence isolated from the Sargasso Sea
gtagatttaccacctagtcaatttaaggctcatatttcaacaaacgttgctatggttttatctaaaatcaataaatctaatcctaatgatcttgcaaaaaaaattgaggttgagctattaaaaattgataaagatattgaaaaaattgaaatagttaaacctgggtttataaatataactttcaaaaatattttttggaataaatttattcagaatgtaattaatcaaaaactagaatatggatcaaatttaacggctaaaaagaaaagtttctttttagaatttgtctccgccaatcctacaggtccacttcatgttggccattgcagaggagctgtttccggcgatgtacttgctaatattttaaaattcaacaagcacaaagtgcataaagaatattatgtaaatgattatggaaatcaaataatcaattttacaaaatctgtttactacagaattaaagaacaaaccgataatgaactttttccaaaggataatgaggatttatatccgggtgattatattatccaaatcgcaaaaaatataattaatgataataaaggtctagattttaaaaattttgaaaaaatatctgataaattaacaatactagcagtaaacgagtctattaaaattattaaatcaaatttaaaaaatattgggattgttcatgacaaatttcaaagcgaaagagaaattgtcaataataatgaagttcaaaaaacagttgataaattaattaaaaaacaatttgtttataaaggaaaaataaaagctccagaaggtgaagataaaaaaaattgggtggaaagagaacaacttttatttaaatcgacagattttggagatgataaagacagagcgttacaaaaatcagataacagctggacttactttgctggtgacgttgcatatcatgaaaataaattaaatagaaagtatgatacttatattaacattttaggcgcggaccatgcaggatatataaaaagaataacagcctctgtcgaagccttatcaggagagaagaataaattagtttgtaaagtcagtcagttagttaaattaattaaagacggaaagccttttaagatgtcaaaaagaaaaggcgattacataacagtagaagatttaatcgatgaagtcggaaaagatgctacaagatttataatgttaaatagaagtagtgatgcagaaatagattttgattttgataaagtaaaagaaaaatcaaaggataatccattatattacgttcaatattgctatgctagaatttgctcagtatttagacatataggtaaagaaattgataaggatataaaagtagataactataattttaatttttcttcagaagatattgatatttataaaaaaatatctgaatggccaaaatgtattgaaatttcatcaaaaaaattagagcctcacagagtgccaacatatctctatgaactatcatcactatttcattcttactggaacatgggcaaagatgataaaagtaaaagatttattagtgaagataaagaaatttcagatgaaaaattagtactattaaagtcagtttctaatgtaataaaatgtggaatgaatctagttggggctagtactccagaaaaaatgtaat

SEQ ID NO: 300652 - DNA, 1123 bp, Unknown
  Bacterial polypeptide expressing nucleotide sequence isolated from the Sargasso Sea
aaatcaaaggataagttagtacctcaaagcagtgaattctttgaattagttaagaaggctaaagattctgaagaaggattaaatgaagctataagttggatcaaagatgaagaaggtcaaaatctaaagattattaaggattctgccttaagaaatatactttcagttataaagctagatctaaaagaatttggtgttaatcataactcttggtttcatgaatcaagcttgtacaaaaaggaaggaagcaaaaatagcaaaatagaacaagcaatagaaactctccaaaataatgatttcatttacgaagaagatggggccatttggttcaaatcaacagaatttggcgatgataaagatagagtggtcagaagagccaatgaagatcctacttattttgcatctgacattgcttaccatttagataaatatgaaagaaagtatgatcgtgtgattaatatatggggttctgaccatcatggatatttgccgagagttaaggcttctgtttctgctttaaaccaagatgaaaaaaaattagaagtagtttttattcaatttgcgaatttgcttagatcaggggaaaaagtatctatgtctacaagaggcggagagttcatcgaattgatagatctcattgaagaagttggttctgatgccgccaggttcttttatatcaataggaaaggagatcagcatctagactttgatctagatctagcaaaagaacaaagtaaagataatcctcttttctatattcagtatgctcatgcaagggtctgcagcgtaatgcagaaactaaataagaatcaaaaattagatattaatttagcgaagaaaaatcttaatctgctgattggtgaaaaggagatagatcttcaaaaacaacttgctatgtttccagaaattatcgagaggtctgcttcaaaacttgaacctcatacaatctgttattacttgaaagatcttgcttcaatctttcatagttactataacgatgaaaaaataattactgatgatgaaaacttgcttcaatctaaactattattgattaactccgtgcgtcaggtgataaaaaatggtctgggggttctgggaatacaagcacctgaatctatgtaag

SEQ ID NO: 300653 - DNA, 1285 bp, Unknown
  Bacterial polypeptide expressing nucleotide sequence isolated from the Sargasso Sea
acagcgaatgttgaaattgtaagtgcgaatccaaccggcccattaacagttggtcatggacgtcaggctgtgctaggagatactattgcaaatatattagaatggcataactataaagtaactagagaatattattataatgatgctggaagacaaatgcgtatccttggagaatctgttgctgcacgttattttaatttaataggtaaaaacttcacgtttccagaagatggatataaaggtgaatatattatttcaattgcaaaagaaataaaaaatatacatggtgaaggattagatacgaattcacctgtgtttagaaaagaggcggaaaaagcaatctttaatgatataaaaaaaacacttaattcgattgggataaatcatgatgtattttcaaatgaacaaacatattatgacaatgggtcaattgatacgttagttgaaaaattaactaataagaatcttatatataaatcagatggtgcagtttggtttaaagcgactgatttgggattagaaaaagatcgtgtttattataaaagctcaggcgaagcaacataccgcctcccagacactgcttaccatcaacataaattagatcgatcatttgatttagttgttgatatttttggtgcagatcatgctgatgcctatcctgatgttttagcagccttaaatgctctaggtctgaatacggatcctataaaagtattaattcaccaatttgtcacattattaaaaagtggtgaaaaagtcaaaatgtctaccagaaaagctaactttgttactttagatcaattaataaatgaagtaggtgttgacgtagtaagatatttttttattatgcgtagtatgaatagtcatttgaattttgatcttgatctagctgctgatcaatcagaaaagaatccagtatattatatacagtatgcacatgctagaatatctaatattattaataatggtaaagtgaataatttatctataaatggaaagtttgatacttccttattaataaataagtctgaaatttcattaattaaatcattaaatgatttccctgaagtaatggtaaaggtattagataaccttgatcctcaaattatcgcaacctacttacataatattgcatcagaatttcacaagttttatgcaaaatgtcgcgttatgacagatgatattgaattaactaaatcgcgtcttcatctagttaaatcagtaaaagtagtattaggaaatggtctaaagattcttggaattcaagcgcctgaaagaatgtaat

SEQ ID NO: 300654 - DNA, 1234 bp, Unknown
  Bacterial polypeptide expressing nucleotide sequence isolated from the Sargasso Sea
tgctgtagttggcagttgtttagcgaatattcttagtttttcaggttataatgtcaccagggaatattatgttaatgatgctggaacccaaatagatctttatgttaaaagtattctttataatatttacagtaaatttaatcttgaatttgagaaacctgaagaaggttaccaaggagagtttatagaaaatatatcaaatgaaattattaatgaatttaatattgctaaaaacctagatttgcttacaaatagagaaaatttttacctccaagttaaaaaaacttctttagaaaatacaattttaaaaattgaaaatgacttaaaggatttaggcgtagagtatgataaatggttttatgaaagtagtttatttaatgatgctacaaataaagttttatcaatacttgaaagtaaaaaactaatatacgaaaaagaaggcgctaaatggtttatgtcctcaaagttttttacagatcaagacgtagtaatagaaagatcagaagatggtggtcatacatatttttttacagatatctcatatcattatgataaatttcaaaatagaagattcgataaagttataaatatatttggtgctgatcatcattcacatgttaacaggttaaaatcggctgtgtcagcaatggacattaacgttgaaaaattgaacatattgctaacccaaatagtgcatttcaagaatcaagacaaaatagaaaaattttccaaaagatcaggaaatatttattccataagagatcttatagatattgtaggatctgactccataagattcaattttctaaatagaacattagatagtcagcaagaatttgatttagacttagctgtaaaacaatcaaatgaaaatccagtttactatgtccaatatgcgtatgcaagactatgctcgattattaattcagcagatatggactttaaaaatcctgacttaagtttacttaaaacaaaatatgaagaaaaattgatagatgatatagatttttttgaagatgtgatagtacattctgtagaaaatttagaaactcataatattacaaaattttctctagatttagcaaaagacttacaaatcttctatgaaaattgcagagtactatctgataataaagaattaactaattcaagattaagcttagttctaagttgtaagatagttctgagtaatttactaaatttaattggtgttaatgctcctgaaaggatgtaa

SEQ ID NO: 300655 - DNA, 1079 bp, Unknown
  Bacterial polypeptide expressing nucleotide sequence isolated from the Sargasso Sea
aatgtaacaaaagaatactatataaatgatgcgggtactcaaattgatactcttgcaaactctacaattattagaataaaagaaatcttcgatagcaaaagcgaagaaaattatccagatgatttttatcctggtgaatatctaatcgatattgctaaaaaaataatagacaaatacggcacatcaattcttgaaagcgacaatcacttttcaacaataaaagacgagtgtgtaaatttactattagaaaacataaaagaagacttaggcaaactatcaattaatcaggatatttttgtttcagaaaaagaattaataactcaaggtaaaatagatcaaaccatagaggaactcaaaaatatgaatttaatttatgagggtattttagataagcctaaaggtaaacaaattgaagattgggaaccaagaaaacaattgttatttaaatcttctgaatatggagatgaaatcgataggccgttacaaaaatcagatggtgattggacttattttgcaaacgatattgcctatcattacgataaatatttaagaggatcgacacatttaatcgatatattgggcgctgaccatggtggatatattaagagaatgagcgcatcaatacaggctctaactaagaataaagctagatttacagcaaagttatgtcaaatggtaaaacttctaagtgatggcaaggaattaaaaatgtcaaaaagatctggcgacttcatcaccttgagtgatttagtggaagaagttggcagtgatagtataagatttatgatgatgtacagaaaaaatgaagcacctttagagtttgattttaaaaaggtaactgaacagtctaaagaaaatccagttttttatgttcagtatgcacatgcaagaatttcatctgttttaaacaatcttcactctcaaaatatcaaattaaatctagagaattttagtgaatgtaatttttctgaattgaatgatgattctgaaatattacttttaaaaaagatactggattatagcaatatcattaatacctcagtttctctatatgagccacatcgaattgcatattactt

SEQ ID NO: 300656 - DNA, 700 bp, Unknown
  Bacterial polypeptide expressing nucleotide sequence isolated from the Sargasso Sea
atgaaatcacatatccaatcattacttgaacaaactatcgaatcctttaaacaacaaggtattttgcctgcggattttgaggcgcgaattcaagtagatcgaaccaaggataagagccatggcgatctggcaaccaacttagccatgatgctaaccaaagcggcgggtaaaaatccccgcgaattggcgcagctgatcatcgacaacctacccgcctcagcctatgtggcgaaagttgaaatcgcaggccctggctttatcaacttcttcattgatgacagcgccttagcgaaccaattacaggccgccattagcgatgagcatttagggattaagctaccaacgccacaaactatcgtcgtggactactcttcacctaacctcgccaaagagatgcacgtcggccacctgcgttcgaccatcattggtgacagcgtggtgcgtaccctcgagtttttaggccataaagttatccgccaaaaccacgtaggcgactggggcacccaatttggtatgctgctggcttacatggaagaattgcgtgcgcaaaatggcgaacaagcccaattagaattatcggatctcgaaaccttctaccgtgccgccaaactgcgttttgacgaatcggcagagttcgcgactcgtgcccgtcagctcgtggttgaactgcaatcaggcgacgaatactgcaacaaactgt

SEQ ID NO: 300657 - DNA, 920 bp, Unknown
  Bacterial polypeptide expressing nucleotide sequence isolated from the Sargasso Sea
tatagctgctaatttaaacgataaaagaattgaaaatatcaaaattgaaggtccaggttttataaatatattcatttcagcagaaacaaaaagtgagttgctaaaaaacataattattgaaggcgataaatggggtataactaaggattattctggaagaatattattagaatttgtttcttctaatccaacaggacctttacatgttggacatggaagaggagcagttctgggcatggcaattgcaaatctattagaaaatatcggttatgaggtaacaaaagagtactacgtcaatgacgctggaagacagatatcaatcttaacaagtagtgttttactaaatgcctatgtagaaacttttgaaacagatggaacttatgagggtgagtatattaaagagcttgctaaaacatttaaatcaaattttggagaacttgataaaaaaattgatttcggctcccttgatgatgataaagatatcaggctagatgaaatttctaaatactttaaatctgagtttagtggagcatggaaggaagctaaaaaatttgctgttagtgaaatattaaatcttattaaagaagatcttcataattttaatattattcatgatcattggtttagcgaaagctctctagggacagtagaagatgttgaatcggatttgtctaaatctctcaaaaccataaaaaatcaaggatatacatattctaaagacggtgcagaatggtttaaaaccactgaatttggtgacgataaagatagagtattattacgagaaaataaggaaccaacctattacttgacggatgttggctatcacaaaaataaaatagatagaaactttgactcttatataaatatttttggtgccgatcatcacggatatattccaaggcttacaagctgcctttgat

SEQ ID NO: 300658 - DNA, 660 bp, Unknown
  Bacterial polypeptide expressing nucleotide sequence isolated from the Sargasso Sea
aatgctaatcatttttagagaattaacaaaacaatttgaacaatctcttttagatagtcttgaaaaaaatgataaaaaaggagaattcgaaattcttagaaagaatttaattacacaatcatcaaaagaggaatttggtgattatcaatgtaatgtttgtttaagtttatctaaaacatataaaaagaacccaagagatatttctaatgattttattaaccttttaaataaaaataaaatcatagcaaaattatgcaagagtctagaaatagctggacctggatttataaatataaaattaaaagatgaggttctaataaatgaaattaagtctaatattcaatgcaatagggctggcatacctctaattagaaaagatttagatagtggtttgtccaataaagttattgtagatttttctagtcctaacattgctaaagaaatgcatgtagggcatttaagatcaacaataataggtgactcaatatctagaattttcgagttaagaggttatgaagtattaagactcaatcatgttggtgattggggcacacaatttggcatgcttattactcagctcaaagatttatattcaaatgatcttgaagaaataggaaagatcaagataagtgatttagttgaattttataaagaatcaaa

SEQ ID NO: 300659 - DNA, 331 bp, Unknown
  Bacterial polypeptide expressing nucleotide sequence isolated from the Sargasso Sea
ttggcgcagctcatcatcgacaacctacccgcctcagcctatgtggcgaaagttgaaatcgcaggccctggctttatcaacttcttcattgatgacagcgccttagcgaaccaattacaggccgccattagcgatgagcatttagggattaagctaccaacgccacaaactatcgtcgtggactactcttcacctaacctcgccaaagagatgcacgtcggccacctgcgttcgaccatcattggtgacagcgtggtgcgtaccctcgagtttttaggccataaagttatccgccaaaaccacgtaggcgactggggcacccaatttggta

SEQ ID NO: 300660 - DNA, 465 bp, Unknown
  Bacterial polypeptide expressing nucleotide sequence isolated from the Sargasso Sea
tctacgactgtcggatggcagccatcaagtatgcggatctaagtcaaaatagagtttctaattaccaatttagttttgacaagatgctctctttgcaggggaatacagcaccatatttactttatgcattggtacgaatagcgggaatatctcgcaaaggtggagatttaaatgtattagatcagaatattcagttcaatgaaccacaagagtgggccttgattcgcaaactattggaacttgattgtattatcgctgaagtcgaaaaagaactgcttcctaatcgtctatgcgggtatttatttgaattaagtcagatctttaacagattctatgatcaagttcctattttgaaagcaagtgaacctttaagaactagtagacttgcgttatgctctatcactgcagatacacttaaactggggatgactttgctaggcatccccactctggaaagaatgtaat

SEQ ID NO: 300661 - DNA, 838 bp, Unknown
  Bacterial polypeptide expressing nucleotide sequence isolated from the Sargasso Sea
attgagaatcgctgttgattattcatccccgaatctagcgaaggaaatgcatgtcggtcatctgcgcggcactataataggtgacgcgatagtcagagtccttgaaaaactgggacacaaggttgtaaggcagaatcatgttggagactggggtactcagtttgggatgctgatttgttatttacaagaattacaggagaaaggcatcgaagcccacccgtctgctctcgctgatctagaaaaattctataaagccgcgaagtcgcggtttgattctgatgaggaatttgcaaaaaggtcacgcaaagccgttgttgaacttcaggctggaaatgctcagtcactcgtagcttggaagcagttcatagaagagtctctcaatcactgtgacgaaatttactctaaattgaatgttactctcaatagaacacatctcgatgctgaaagtaaatacaacgatgatctatctggagttattcagatacttgaaaaaaaaggcttattatcagaatcagaaggcgccaaatgtgtatttttgcctgaatttattggcaaggatggaaacaatctgccggttatcgtgcaaaaatctgatggtggttatctctactcaacgaccgacttggccgctgtcattcataaatcaaaagatcttcaagttgatagagctctctacgtcgtcgatgcgagacagtctctccattttcagcaggtatttgctgtagcaaaagaagcagaattcgctaaagaagaaatttcgttagaacatatctcctacggcacaatgatggattcaagtggcaagcccttcaaaaccagatcgggcgatacagtaaaa

SEQ ID NO: 300662 - DNA, 496 bp, Unknown
  Bacterial polypeptide expressing nucleotide sequence isolated from the Sargasso Sea
aatggacaaaaatgttttatcaacaatcaatgaaaaatattctactaccatttctgacgatctaaaaaatggtcatttgactagtaatgtatgtatggttgctgcaagtatattgaatcttaatccaaaagatttagctaaagaattagaagaaaagcttaaaaaattaaataaattccaagaaattaaggtagctggtcctggatttataaatatctctcttaatagaaaagattttatttctattttagatgaaataaataacaacaaagataaatttggagaatctaacctaggtaatggaaataaaatacaaattgagtttgtatctgcaaatcctactggacctttacatgttggccatggaagaggtgctgcatatggtgacgccctagcaagaatccttacaaagacagggtctatagtagaaaaagaatattatattaatgatgctggaagacaaatagatattttaacagctagtgtaatcaccaag

SEQ ID NO: 300663 - DNA, 927 bp, Unknown
  Bacterial polypeptide expressing nucleotide sequence isolated from the Sargasso Sea
cgcgagctgcatcagtccgggaagattgatacgacactcaaacagcttcaaaacaaagatctgatctatgtgggcgttctggagccacctaaaggcaagacgccggaggattgggaacccaaaccgcaaactctgtttcgctcaaccaattttggggatgatgtcgatcgggcgctgaagaagtcagacggcagctggacctatttcgcgcccgatattgcctatcaccttgacaaatatcagcggggctacacgcacctgattgacgtttggggggctgatcatggcggctatgtaaagcggatgaagtcggctgtggaggcggtgaccgaaggtggcgccgaccttgacgtcaaaatctgccagctcgttcggcttatgcgaaatggcgagcccattaaaatgtccaagagagcagggacctttgtgacactccgggatgtggtggaagaggtggggcgcgacgcggtgcgcttcatgatgctctatcggaaaaacgatgcgccgcttgatttcgattttgcaaaggtgacggaacagtccaaggacaatccggtcttctacgttcagtacgcgcacgcgcggattcattctgtgcttcgcaatgctgcgatggatgaagggctcaccggcgtcgaccttaccgatagcgctctggcaaccgctgaccttggctccttgagcgatgaggcagaactcgggctcatcaagcacatgcttcaatatccccggatgattgaagcagcggcggaggcgcacgaaccacatcgggtcgcgttctatcttttcgaattggcgtccagcttccatgcgctttggaacaagggcaaggatcacccggaattgcgatttatcgttccagaacaaagagatgttacgcttgcacggctcgcattgattcgggcaacagggtatgtgatcgcttcg

SEQ ID NO: 300664 - DNA, 733 bp, Unknown
  Bacterial polypeptide expressing nucleotide sequence isolated from the Sargasso Sea
ccggaatttggagattttcaaataaattgtgctttatcacttgcaaaagaaataaaacaatctcctcgcgatattgcaaaacaaatagctgatcaactacaaaaagataatgatttcgttaaaatatgtaatccgccactcattgcaggtccaggcttcataaacttgtctataaattcgaaaacacttatatcggaaatccattttcgtctaaatgataaaagattgggagtgcctctaaaaaaattcagtagtgaaaaaatagaagaggggaaaaaaaatacccgcgtgattattgatttttccagtccaaatatcgctaaagaaatgcatgttgggcacttacgatcaacaattattggagactctttagcacgggttcttgaattctgcggttatgaggtcatacgactcaatcatgtgggcgattggggtacacaatttggaatgcttatcactcatctaaaagaggttgtaccagaggcactctatacaaaaaatgtagtggaaataagggatctcgtaaatttctatcgtcaagcaaaaaaaagatttgatgaagatcaaatctttcaaaacaaatcacgaagtgaggttgttaatttacaagcaggtgatcaagaaagtcttattgcgtggcaattactctgcaaccaatcaagaaaagagtttcaaaagatctacgatcgacttgatatcaagctgactgaaagaggtgaatccttttataaca

SEQ ID NO: 300665 - DNA, 948 bp, Unknown
  Bacterial polypeptide expressing nucleotide sequence isolated from the Sargasso Sea
aaaagcacgcagctgcgcgccaagggcttcaagcccggcgacgagtgctggcccaccgacagcgagaacccgctggccaagaacttctacaacggcgactacatcgccgacattgcagaggccttcaaggccaaggccaccgtgaaggccgacgaccgcgagttcaccgccaacggcgatgtggacgactacgacaacatccgccagtttgccgtggcctacctgcgcaacgagcaggacaaggatctgcaggccttcaacctccagttcgacgagtactacctggagtccagcctgtacaccagcggccgcgtcgaggccacggtgaacaagcttatcgccaacggcaagacctacgaacaggacggcgcgctgtggctcaagagcaccgactacggcgacgacaaggaccgtgtcatgcgcaagcaggacggctcctacacctactttgtgcccgatgtggcgtaccacatcgccaagtgggagcgcggttttaccaaggtcgtcaacatccagggcacggaccaccacggcaccattgcccgcgtgcgcgccggcctgcaggcggccgatgtgggcatccccaagggctaccccgactatgtgctgcacaccatggtgcgggtggtcaagggtggtgaagaggtcaagatcagcaagcgggcgggcagctatgtcacgctgcgcgatttgatcgagtggaccagcaaggacgcggtgcgtttcttcctgctcagccgcaagcccgataccgagtacaccttcgacgtggacctggcggtggcgcagaataacgacaacccggtctactacgtgcagtacgcccatgcgcgcatccagtccgtgctgcgcgcctggcaggaggcgggcggtggcgacgtagcgtcgctccaggacgtggacctgtcggctctggaaggcccgcaggcccaggccctgatgctgcag

SEQ ID NO: 300666 - DNA, 571 bp, Unknown
  Bacterial polypeptide expressing nucleotide sequence isolated from the Sargasso Sea
atgctgcgcatcgcccaggccctcgaaacccagttgcgcggtgccatgcaacgggccttccctgaggcagaagcggtgctggatccccagctggcaccggcgagcaagccggaatttggcgactttcaagccaacggtgctctgcccctggccaagccgctgaagcaggccccacggcagatcgccacggcgattgtggagcagctgcaggctgatacggccttcacggaactgtgcctggaaccccagatcgccgggcctggtttcatcaacctcacgattcgcccggagcggttggcggcggaggtgtcggtgcggctgggggacgagcggctcggcgtgccggcggtgacgaacaaggcgccggtggtggtcgacttctcgagccccaacatcgccaaggagatgcacgtggggcatctgcgctccacgatcattggtgattcattggcgcgggtgctggagttccgcggccatcccgtgctgcgcctcaatcacgtgggcgactggggcacccagttcggcatgttgattacccatctcaagcaggtggcgccggaagcacttgaga

SEQ ID NO: 300667 - DNA, 585 bp, Unknown
  Bacterial polypeptide expressing nucleotide sequence isolated from the Sargasso Sea
caatacgcctaaaagatttattaaatgaagcagttagaagagcaaaagaagatttattgaaaagattagaagatgaagatcgttatgagaccgaagagtttatagcaaatacttcaagaattattggattaggagctgttaagtatgcagatttaagtcaaaataggattaccaattatcaatttagttttgataaaatgctttccctaaatggtaatactgctccttatttgttatatacacttgtaagaattttaggaattaaaagaaaaaataattttgtttatgactctaaagattttcagtacgtaaattatgaacataaatctgagtggaaacttatcagaaaattacttaagttcgatgaagtcataatttctattgaaaaagacttaatgccaaatagattatgcaattatctgttcgagctatgtcagacttttaatagattctatgatcaagttccaatcctcaaagaagaaaaagatataaaaatttctaggcttaatttatgtgacctaactgcaaaaacactaaaattaagcttagagcttttaggaattgaaactttagaaagaatgtaat

SEQ ID NO: 300668 - DNA, 589 bp, Unknown
  Bacterial polypeptide expressing nucleotide sequence isolated from the Sargasso Sea
catgggcttcggcaccatgaacggcccggacggtcgcccgttcaagacccgcgacggcggcaccgtgaagctggtgcaactgctcgacgaggccgagcagcgcgcctacagcctggtcaaggacaagaacccggacctggccgaagacgaactgcgtcagatcgcccgcgtggttggcatcgcttcggtgaagtacgccgacctgtccaagcatcgcaccagcgactacagcttcaacttcgacctgatgctgagcttcgagggcaataccgcaccctacctgctgtatgcctacacccgcgtggccggcgtgttccgcaagctgggcaagggcgtgaacgagatcggcgggcagatcaccctggttgccgagcaggagcaagccctggccgccaagctggcacaattcaacgagctgctcggcaacgtcgccaacaagggcacgccgcacatcctttgtgcctacctgtatgacctcgccggcctgttctccagcttctatgagaactgcccgatcctcagcgccgaggaggagaccacgcgtgacagccgcctgcgcctgacagcccttaccggccgcacccctcaa

SEQ ID NO: 300669 - DNA, 922 bp, Unknown
  Bacterial polypeptide expressing nucleotide sequence isolated from the Sargasso Sea
ccgatgccccgcggccagcgtctggtgtccgccgttgagatcgccggcccgggtttcatcaacctgcgcctgtctgccgccgcgcgtgccgacgtgatcgccgccgtgtttgccgaaggcgaccgctacggcgccgccaacacgcatgacggcgcgccggtgctggtggaattcgtctcggccaatccgaccggtccgctgcacgtcggccacggccgccaggccgcactgggcgatgcgctggcgagcctgctcgactggcaaggccacaaggtccaccgcgagttctattacaacgacgccggcgtccagatccacaacctcgccgtctccgtccaggcccgcgcacgcggctacaagcccggcgacgccaactggcctgaagccgcgtacaacggcgactacattgccgacatcgccgccgattacctcgccggcaagaccgtacgcgcctccgatggcgaacccgtgaccggcgagcgcgatgtggaaaacctcgaagccatccgccgctttgccgtgacgtatctgcgcaacgagcaggacatcgacctgcaggccttcggcgtgaagttcgaccgttactacctggagtcgtcgctgtacaccgaaggcaaggtacagcaaacggtggacgcgctcgtcgctgccggcaagacctacgagcaggaaggcgcgctgtggctgcgcacgaccgatgacggcgacgacaaggaccgcgtcatgcgcaagtccgacggcgcgtacacgtacttcgtgcccgacgtggcgtaccacacgaccaagtggggccgtggcttcacgcaggtcatcaacgtgcagggcagcgaccaccacggcacgatcgcccgcgtgcgcgccggcctgcagggcctgaacatcggcatcccgaagggctaccccgaattacgtcctgcacaag

SEQ ID NO: 300670 - DNA, 814 bp, Unknown
  Bacterial polypeptide expressing nucleotide sequence isolated from the Sargasso Sea
caaaaccacgtaggcgactggggcacccagtttggtatgctgctggcatacatggaagaattacgcgcacaaaatggcgaacaagcccaattagaattatcagatctcgaaaccttctaccgcgccgccaaactgcgttttgacgaatcggcagagttcgcgacccgtgcccgtcagctcgtggttgaactgcaatcaggcgacgaatactgcaacaaactgtggcgtgaatttaacgacatttccttaagtcactgccacgaagtgtacgagcgtttaggggtgagcttaacccgcgccgacgtgcacggtgaaagcgcctataacgccgacttagaacaagtagtcaaagatttagacgcccaaggtttactgacccaaagcaacggcgccaaagtggtcttccaagaagaattccgtaacaaagaaggcgaggcgctacctgttatcattcaaaaagccgatggtggttacctctatgccactaccgacttagcggctatgcgttaccgttcaagcgtgctaaaagccgaccgcgtactctactttgtcgatttacgccaagcgctgcacttccaacaagtatttagccttgccaagctggccaagtttgtccgtaacgatatgtcactggaacacttaggcttcggtaccatgaatggcgaagatggtcgtccgttcaagactcgtaccggtggcgtggtgaaactggtggatctactggatgaagccaatactcgcgcacttgagctggttcgcagcaaaaacccagatatggatgaagcgaccttagctgaaattgcccgcgttgttg

SEQ ID NO: 300671 - DNA, 607 bp, Unknown
  Bacterial polypeptide expressing nucleotide sequence isolated from the Sargasso Sea
aatgatagctgatgaaataaagaataagattctcagtcatatagaagagcacttctctgaagaagaggtttcaattgcttcttcaaagttccaaatagaaatacccgatagtcctgagaaaggtgatcttacatgcaatattgcactgatattaggaaatatcactaaaagcaatccaaaagaaatcggtcttgagattggaaatattttgaaggagctcaatttagtaagctctattgaggttgctggtcctggatttattaacatctttctcaaccattctggaactctaaaaataattaaagatatccttaataaaaatactattagagaggaagcggattcaaaaaaaattcaagtcgaatttgtttcagcaaatccaactggtcctcttcatgttggtcatggaagaggagctatttatggcgatgtaatctcaaaactgcttgaaaagaaaggccacgaagttcaaaaagagtactatgtcaatgatgcaggaagacaaatagatattcttacggctagtgtatatttaagagccattaacatagaagataatatttttcctgaaagtgcttacagaggagaatatataaaggaaatgcaa

SEQ ID NO: 300672 - DNA, 952 bp, Unknown
  Bacterial polypeptide expressing nucleotide sequence isolated from the Sargasso Sea
aatgttgaatttgtcagtgctaatcccacaggtcctcttcacgcagggcatgcgcgaggtgcctgctacggagatgcaattgcaaatcttcttgagtacgtggggttcagtgttcatagagagttttacatgaatgatagaggcttacaaatgacagcttttggaaggtcactagaggcccgaaagaataatgaatctctccccgaggacggatacggaggcgaatatgtaattgagtgggctaaagagatgcctgcaggcttagcactggaggaagtcattacttggggttgtgagttcgctaaaagtgatcagcaagacactttaagtgagttgggcatctattttgatacctggtttagcgaaaagtctatgattgacaatggtgagattgatcgagtccttgcgaatttagctgaaaagggaatggcatacgaaaaggatggagccacttggctatcttcggttgaattcggtgacgataaagaccgagtgttaataaaaagcgatggtgaatatacgtatttaactcctgatgttgcgtaccacagaaataaatttgaacgatctgattggttgataaacgtttggggggcagatcaccacggctacatagcacggatgaaagctgccatgcatgcattggggtatgactctgatgctctcacagttcaagtaacgcaactcgtcaagcttcttcgggctggggaggaagttaaactctccaaacgacaaggtgacattattgaactccggagcataattgaggagataggtgctgatgcgactcgattcatgtacctcctacaatcggttgattcaaaacaaacatttgatctggagttagcagcatctcaagggatggataatcctgtttattatgttcagatggcttatgcaagactttgctcaatcgaacggaatgcaaatgagcatggtttcgatttgaaat

SEQ ID NO: 300673 - DNA, 795 bp, Unknown
  Bacterial polypeptide expressing nucleotide sequence isolated from the Sargasso Sea
tatgaattactttaagattgtatcggaaatagtctgtttagagattcaaagccttgttgatgaagggaagctagtctccgacttaaacttagaggatgtaggcttagaatcaacgagggatcctgcacatggggacctctcctcaaatgcagccatggttctcgcaaaatcagcgaaaacagacccaaaagaattagggcaattaatcgttgatcgtctaacaaaacggtcagagtttgagagggtttcgctagccggccccggttttataaatttaaaattagtgtctaaattttggacaaaacttttaccaagagttctagaacgtggcctcaaatatggcgattgcgatttgggtggaggtaaaacgataaatttagaatatgtctcggcaaatccgaccggcccgatgcatataggtcatgcgagaggggctgttattggggacgctcttggaaatttactttctaaagccggatacaacgtttctcgggagtattatattaacgatgcaggtgggcaaatcgacgttttagcgcgttcagttcatctgcgttatcttcaagccctgggtaagaaaattgataaatttccagatggtttatacccaggtgagtatttagtgcaaacggctaaagatctttttgagcgggatggaagtaaatggagcgaattaaaagaggagatttggttgccggagttaaaaaacttcgcaatcgaatcgatgatggcattaatacgcgatgatttaatggccttagggattatccatgatgtctttacgtccgaagccag

SEQ ID NO: 300674 - DNA, 145 bp, Unknown
  Bacterial polypeptide expressing nucleotide sequence isolated from the Sargasso Sea
ttgcacgtcggccacctgcgttcgaccatcattggtgacagcgtggtgcgtaccctcgagtttttaggccataaagtgatccgccaaaaccacgtaggcgactggggcacccagtttggtatgctgctggcatacatggaagaat

SEQ ID NO: 300675 - DNA, 735 bp, Unknown
  Bacterial polypeptide expressing nucleotide sequence isolated from the Sargasso Sea
tgaaagtaaatacaacgatgatctatctggagttattcagatacttgaaaaacaaggcttattatcagaatcagaaggcgccaaatgtgtatttttgcctgaatttattggcaaggatgggaacaacctgccggttatcgtgcaaaaatctgatggtggttatctctattcaacgactgacttggccgctgtcattcataaatcaaaagatcttcaagttgatagagctctctacgtcgtcgatgcgagacagtctctccattttcagcaggtatttgctgtagcaaaagaagcaaagtttgctgcagaagaaatttcgttagaacatatctcctacggcacaatgatggattcaagtggcaggcccttcaaaaccagatcgggcgatacagtaaaattaatcgaactccttaatgagtcggtgtctagagcctacacattagttacaggaaaaaatcccgatttaacagaaaatgaaagaatcgaaatttcgcaaaaagtgggtatcgcctcagttaaatatgctgacttgtcaaaaaatagaacttcagattatatcttcaactggagtagtatgctctcttttgagggaaatacagccccatatcttttatatgcttatgccagaattagaagccttttaaagaaagcctcaagtactcagtcatcaaacatttcaaatttaatagctccagtagaaagggcattactgaccaagcttttacagtttccgga

SEQ ID NO: 300676 - DNA, 682 bp, Unknown
  Bacterial polypeptide expressing nucleotide sequence isolated from the Sargasso Sea
aatgataatcatttttaaagaattaacaaaaaactttgaacaatctcttttagatagtctcaacaaaaataataaaaaaggagagttcgaaaatcttagaaaaaatttagttacacaatcatcaaaagaagagtttggtgattatcaatgtaatgtttgtttaagcttatctaaaatatatcaaaagaatccaagagatatttctattgattttatgaaccttttaaataaaaatagaaacatatcaaaattatgcaagagtctagaaatagctggacctggatttataaatataaaattaaaagatgaagttctaataaatgaaataaaatcaaatattcaatgccaaaggtctggagtacctcaaattaaaaaagatttagatagtggcttatcaaaaaaagtgatagtagatttttctagtcctaatattgctaaagaaatgcatgtagggcatttaagatcaacgataataggggactcaatatccagaattttcgagttaagaggttatgaagtattaagattaaatcatgttggtgattggggaacacaatttggaatgcttattactcagctcaaagatttatattcaaatgatttagaagaaataggaaagatcaagataagtgatttagttgaattttataaagcatcaaaaaaaaaatttgataatgaatct

SEQ ID NO: 300677 - DNA, 607 bp, Unknown
  Bacterial polypeptide expressing nucleotide sequence isolated from the Sargasso Sea
aagaagttaaaaactcgatcaggagaaacaattagattagtagaccttctggatgaagcaattcaacgagcaagagaagatcttaaagatcgtctcaaaactgaaagcagatccgaaaatgaaagttttatagataaagtttctacgactgtagggattgcagccatcaagtatgcggatctaagtcaaaatagagtgtctaattaccaatttagttttgataaaatgctctctttgcagggaaatacagcaccatatttactttatgcattggtacgaatagccggaatatcgcgcaatggtggggatttaaatgtatcaagtcagaatatacagttcaatgaaccacaagaatgggccttgattcgcaagctattgcaacttgattgtattatcgctgaagtcgaaaaagaactgcttcctaatcgtctttgcgggtatttatttgaattaagtcagatttttaacagattctatgatcaagttcctattttaaaagcaagtgaacctgcgagaactagtagacttgctttatgttctatcactgcagatacacttaaactgggaatgagtttgttaggcatccctactctggaaagaatgtaat

SEQ ID NO: 300678 - DNA, 556 bp, Unknown
  Bacterial polypeptide expressing nucleotide sequence isolated from the Sargasso Sea
ttggccgaccatacaaacaaagaagagattaataaaataatcgaaaaatactctatatcaataacagaaacccttaagaatggtcatatcacgactaatgtttgtatggtggctgccagtaacttaaaattaaatccaattgagctcgcctcaaaattagttgaaaaactaaatctattaaatttgtttgaaacagttgaaacagcaggtccaggctttattaatataactctgcgtagagaagatttcgtatcaataattaactccattaatgataataaagaaaagtatggtgaatctaatattggcaatggaaaaaaaatacaaatcgagtttgtctctgcaaaccctacaggacctttgcatgttggtcatggtagaggcgctgcttatggagatgcaattggcagaattttaaaagctacaggttacgatgttcaaaaagaatactatatcaatgatgctggaagacaaattgatatccttacggcaagtgtaatcttaaaaagtatctctaaagagattggagattatttcccaagaaaatgcatataag

SEQ ID NO: 300679 - DNA, 606 bp, Unknown
  Bacterial polypeptide expressing nucleotide sequence isolated from the Sargasso Sea
aatgatagctgatgaaataaagaataagattcttagtcatattgagaagcacttctctgaagaagaggtttcaatagcttcctcaaagttccaaatagagatacctgatagtcctgagaaaggtgatcttacatgcaatattgctttgatattgggaaatgttactaaaaataatcctaaaaaaatcggtctcgagattggaaatattttgaaagagctcaatttagtaagcactattgaggttgctggtcctggattcattaacatctttctcaaccattctggtactctaaaaattattaaagatatccttgataaaaataccatcagagtggaagaggattcaaaaaaaattcaagtcgaatttgtctcagcaaatccaactggtcctcttcatgttggtcacggaagaggagctatttatggtgatgtaatttcaaaactacttgaaaaaaaaggccacgaagttcaaaaggagtactatgtaaacgatgcgggaaggcaaatagatattcttactgctagtgtatatttaagagtcattaatatagaagataatatttttcctaaaagtgcttacagaggaaaatatataaaggaaatcgc

SEQ ID NO: 300680 - DNA, 745 bp, Unknown
  Bacterial polypeptide expressing nucleotide sequence isolated from the Sargasso Sea
atgaatgtaattcaaaaagttttggaaattatccaagttgaaattaaagacttaatttcagaaggaatagtatcgtctagtgcagatttaacgaggattaacctggacaggactaaagatccggctcatggagatttttcaaccaatgcagctatgattttatccaagtcttcgggtatcaaaccccatgatttaggaaagatcattgccgaacggttgaaagaaaaaaatgagtttaagacaatagaaattgcaggaccgggatttattaatatccgcttagtgagagagttttggagaagccttattcctacaatcttaaaaagtgggatagggtatggcgatagtgatattgggaagggtcagcctgtaaatattgaatacgtatcagctaacccaaccggtccaatgcatataggtcacgctcggggtgctgttttcggagatgcattgtcttcattactagaaaaggtaggttataaagttacccgcgagtattatataaacgattggggttcacaaatagatgttttagcgcggtcaacatatctccgttaccgagaagcgctaggggaagacattggtaaaataccagaagggctctaccccggagattatcttaaaaatcttggggagtttataaaaagaaaagacggggataaatggaaaaatttatcagaggacgaatggctggatagcttcaaagaattggccattcaagaaatgatggctttgattcgagagg

SEQ ID NO: 300681 - DNA, 849 bp, Unknown
  Bacterial polypeptide expressing nucleotide sequence isolated from the Sargasso Sea
atactcgtagaagatcaaggtgcaaaatgtgtatttttagaagggttgactaataaagaaggcaaacctttacctttaattattcaaaaaaaagatgggggttttaattatgccactacagatcttgctgctataagatatagattcaataaagctcctaatggggataatgcttcaagaattatttatgtaactgatcaaggacaagcaaatcattttgcaggagtttttcaagttgcaaaaaaagcaaaatggatcccagataattgccaagttgaccatgtgccctttggattagttcaaggcattgatggcaaaaagctaaagacaagagagggtgaaacaattcgtctaaaagatttattaaaagaagcagttaaaagagcaaaagaagatttattgaaaagattagaagatgaagatcgttatgagaacgaagaatttattgcaaatacttcaagaataattggattaggagctgttaagtatgcagatttaagtcaaaataggattactaattatcaatttagttttgataaaatgctttctctcaatggaaacactgctccttatttgttatatacacttgtaagaattttaggaattaaaagaaaaaataattttgtttatgactataaggattttgaatctataaattatgaacataattctgagtggaaacttatcagaaaattacttaagttcgatgaagttataatctctattgaaaaagacttaatgccaaatagactttgcaattatctgtttgagctatgccagacttttaatagattctatgatccagttccaatcctcaaagaagaaaaaaataaaaaatttctagactta

SEQ ID NO: 300682 - DNA, 805 bp, Unknown
  Bacterial polypeptide expressing nucleotide sequence isolated from the Sargasso Sea
catgaaagaacgcctgatatcccttattgaaagcgccttggacaccctgatcaccgacggtactctgcccgctgacgccaagcgcccagtgcaaattgaccgcacccgggacaagagccacggtgactttgccaccaatatcgcgctgatgctggccaaacccgccggcatgaagcctcgtgatctagcagaaaagctgatcgccgctctgcccaacgacagcgccgtggccaaagtcgacatcgccgggcccggatttatcaatttcttccaggccgatgactggctcaccggcctattggattccgccctggccgacgactttctcggcattagccggccagagcagccccaaaccgtggtggtggactactcctcacccaatctggccaaagaaatgcacgtgggccacctgcgctccaccatcatcggcgacgccgtggtgcgtaccctggaatttctcggtcacaccgtgattcgccagaatcatgtgggcgattggggcacccagttcggcatgcttctcgcttatctggaggagcaaaaaaccgaagaaggtgagcgcgagctgagccgtgaactggccaacctggaaacgttctaccgggccgccaaacaacgcttcgatgaatccgacagcttcgccgaccgggcccgcgccctggtggtaaaactgcaatccggcgacgactactgcctgaccctttgggcagagtttaatcaggtatcgctaagccactgccaagcgatctacgaccgcttaggcgtcagcctaacaccggcagacgtgcacggcgaaagcgcc

SEQ ID NO: 300683 - DNA, 895 bp, Unknown
  Bacterial polypeptide expressing nucleotide sequence isolated from the Sargasso Sea
ggcacgggccgagttggtgaaactgcaatcgggcgacgaggagaatctcgcgatttggcaacgtatgattgcgctttcgcaggaacaatttgaccatgtatacggccggcttgaggtgacgtttgacgagactttgggcgagagtttttacaacccgcaattgcccgggctggtcgaggagttgcaagggaagggcattgccgagctgagtgaaggggcgatggtggtgcgattccccggtgataaacaattggccgataagccagcgattgtacgcaagcgcgatggggcggcgaattataccaccacggatctcgccactctgcgttatcgcatggagacgtggtcgcctacggatatcgtttatgtgaccgacggccgacaacagctgcatttccagcagctcttcaatatttttggccggtggcaggaatcagtttcagccaagctggagcatgtttggtttgggtccattcttgggccggatgggaaacccttcaagacgcgcagtggggaaaccgtgcgtttggctgatctgctcgatgaagcggtggaacgggcccttgcggtggtgagtgaaaaaaatccggatcttccagatgctgaacggcgtgagattgctagggtggtcggtttgggggccttgaaatatgccgatctctcaaacaaccggcagagtgattacatttttgattgggacaaaatgctcgcattgcagggcaacaccgcgccgtacctccaatacgcctacacgcgcgtgcgcagcattttccgtaaagtggatgcgccggactttacgaaggtggagttgcaactcaaggcgcctgaggaattggccttggccaagcacctgatgaattttgggcagacactggaaatggtggctcaagattat

SEQ ID NO: 300684 - DNA, 868 bp, Unknown
  Bacterial polypeptide expressing nucleotide sequence isolated from the Sargasso Sea
ccctgagcttgctgaaaagagggcaacccctgccgtttatatcgtacaaaaatctggtggggggtatttgtacgccactacagatttggctgccatgcgttatcgcagtggtaaattgaatgctgatcgtactcttattcttaccgatgcacgtcaggcacttcacttcaaacaaaccgaaattgttggccgcaaagctggctttatgaaagaagcgcaaacttacgagcactgtccattcggtatgatgttgggtagtgatggcaagccgtttaaaacccgtactggtggaacggttaagttagttgaactattggatgaagctgtagaacgtgcaggtaaattgatagctgagcgcgacaacgatttaagtactgatgaacttcaagaagtggcgcgtaaagtgggtattggcgcggttaaatatgcagacctttccaaaaaccgtactacagattacatgttcaactgggattcaatgctgagttttgaaggaaatacggcaccgtaccttcaatatgcgtatacccgtgtaaaaagcctctttagaaaagccggcgttgaaatggcgaatatgccagtagacatcaatatagttgaaaagcaagaacatgcacttgccgtgctactcatgcaatttgaagaagtcattggcatggtttctcgcgaagcaacgcctcacgtgttgtgtacctacttgtacgatgtggcgtctgcattcatgaccttctatgaagcctgtcctatgcttaaagagggaattgagcctgaagtacgcgatagtcgtttagcattgtcagccctagttgccaaaacacttgagaaaggtttgaccctattaggtattgaaacactagaaaaaatgtag

SEQ ID NO: 300685 - DNA, 964 bp, Unknown
  Bacterial polypeptide expressing nucleotide sequence isolated from the Sargasso Sea
tttgtttaaccttttaaataaaaataaaagcatatcaaaattatgcaagagtctagaaatagcaggacctggatttataaatataaaattaaaagatgaagttctaataaatgaaataaagtcaaatattgaatgccaaagggctggagtacctctaactaaaaaagatttagatagtggcttatctaataaagttattgtagatttttctagtcctaatattgctaaagaaatgcatgtggggcatttaagatcaacaataataggggactcaatatccagaattttcgagttaagaggttatgaagtactaagactaaatcatgttggtgattggggaacacaatttggaatgcttattactcagctcaaagatttatatttaaatgatttagaagaaataggaaagatcaagataagtgatttagttgaattttataaggcatcaaaaaaaagatttgataatgaatctgaattccaaaaaagatctagagaggaagtagtaaagttacaaagtggagatagtaaatctattcaagcctggaaattattatgtgatcaatctagaaaggaatttgatgaaatctataaaaatttaaaaataaaaataaaagaaagaggtgaatctttttataatcccttcttaaagggagttattgaggatttgaatttaaaaaaaatactcgtagaagatcaaggagcaaaatgtgtatttttagatgggatgactaataaagaaggtaaccctttgccactaattattcaaaaaaaagatggcggttttaattatgccaccacagatcttgctgccataagatatagattcaataaagctcctaatggggatgatgcttcaagaattatttatgtaactgatcatggacaagcaaatcattttgctggagtgtttcaagttgcaaaaaaagcaaaatggatcccagataagtgtcaagtagacccatgt

SEQ ID NO: 300686 - DNA, 757 bp, Unknown
  Bacterial polypeptide expressing nucleotide sequence isolated from the Sargasso Sea
actgcctcgtgaagaaagccatggtgatatttcaactaatatttgcttagtattatcaaaaatcgttggtttaaaacccaaagaattagcaattttaatgaaatctaatttagagaagctcgactgctttaatggcatttctattgaaggacctggattcataaatataaacttggaaaattcattttggcatgagcaaattttgaaaattttaaaactaaaatcaaaatttggtaggtctgaaatttttttaaacaataatattaacgttgaatttgtttcggcaaatcctactgggccacttcatgttggacacgtaagaggtgctgtcattggtgatgtcttatcaaatgttttaaagatggttggatataatgtcacaaaagaatactatattaatgatgcgggtaatcaaattgatgtcttggctgcttcagtttttattaggtatgaagagttaattacaaaaaataaagctgaaattcctgaaggttattatcctggtgaatatttaattgaattagcaaaatcattatatgatgttcacgggtacagcttgcttaatggagataaattaaaatcattagaacttataaagaaattttcgattgaataccttcttaatcagattaagaatgatctaaaaaagttaaatattgaaatggatgaatattcctctgaaaaaaaattagttgaagatctgtcagttgaaaaaacaattcaagagcttgataaaaagggtttgatttacattggg

SEQ ID NO: 300687 - DNA, 648 bp, Unknown
  Bacterial polypeptide expressing nucleotide sequence isolated from the Sargasso Sea
catgcgaattcgctcgctgctctcgcagcgcatggaagcggcatttaccgcgctgggtttatccggtcaggcactgctacagagcgctagccgaccggagtttggcgactatcaagccaacggcgtgatggcagctgccaaacgggcgggccaaaacccacgcgaggttgcgcaagctattatcgatgcgatcgacctagacggcattgccagcgacttgtctgtagccggaccaggctttatcaatatcactttggcacccgagttcattgccaacgcagtgacttctccccagccaagcgtcgatccgcagcgcgtagtggtcgattactccggcccgaatctggccaaggaaatgcacgttgggcatttgcgcggcacgatcatcggtgactgtattgcgcgggtgctggaaagtttggggcataccgtcattcgacaaaatcacgtcggtgactggggtacgcaattcggcatgctgctgacgtttatggcagaacaggaggaggcatcagattccctcgcggatctggaaaatttctaccgtcaggcaaagcaacgcttcgataccgatgaagactttcaaacccgcagcagacaagccgtggtgcagctgcaatccggcgatgcagacatgctggatgagtg

SEQ ID NO: 300688 - DNA, 940 bp, Unknown
  Bacterial polypeptide expressing nucleotide sequence isolated from the Sargasso Sea
cgctgtgggaaaattcattgacgtgtctattgctcactctgaagaagtgtacgacaagcttaacgtaagccttacccgtaaagatattatgggtgagtcggcttacaatgacgacttggccaacgtaatcagcgaccttaaagcgaaaggccttgcagtagaagaccaaggcgcgcaggtggtgtttatacctgagcttgctgataaagaaggtaatcctgcggtttacatcgttcaaaagtcgggtggcggctatttatacgcaacgacagaccttgcggcaatgcgctatcgcagcggcaagttgaatgctgaccgtacgctgattcttaccgatgctcgccaagcactacacttcaagcaaactgaaattgtgggccgtaaagcgggctttatgaaagaagaacaaacttacgagcattgcccatttggaatgatgctaggcagtgacggtaagccatttaaaacgcgtactggcggtacggttaaactggtcgaattgcttgatgaagccgttgagcgtgcgggtaagttaattgcagagcgcgacaacgatttaagcgaagacgagctcaaagaagttgcccgcaaggtgggtattggcgctgtgaaatacgctgacctatctaaaaaccgcacaactgattacatgttcaactgggactccatgctaagctttgaaggtaacaccgcgccttaccttcagtatgcctatacccgtgtgaaaagcttgttcagaaaagcgggtgtggatatggccaccatgccagtagatatcaatattgccgagaaacaagagcacgcgctagctgtattacttatgcagtttgaagaggtgattggtacagtatctcgagaagccacgcctcatgtactgtgtacttacctctatgatgtggcttcagcatttatgtcattctacgaagcgtgcccgatgtaa

SEQ ID NO: 300689 - DNA, 472 bp, Unknown
  Bacterial polypeptide expressing nucleotide sequence isolated from the Sargasso Sea
gcatgtggccggcacggttgggctggccgcggtgaagtatgccgacctcagccagaaccggatcaccaactatcagttttccttcgatcggatgctggcgctgcagggcaacacggcgccgtatctgctgtatgccgttgtgcgtgttgcggggattgcccgcaaaggcggtgacctggatgcctcaacggctcagctgcacttttcagaaccccaggaatgggctctggtgcgggagctactgaagttcgatgctgtgatcgcggaggtggaggaggagttgttgcccaatcgtctctgcagttatctgttcgagctgagccaggtgttcaaccgtttctacgaccaggttccggtgctgaaggccgagccggaagcgctcccatcccgattggccttgtgccgtttgacggctgacaccctcagactggggcttggactgctggggatttccaccctcgatcgcatgtga

SEQ ID NO: 300690 - DNA, 517 bp, Unknown
  Bacterial polypeptide expressing nucleotide sequence isolated from the Sargasso Sea
atgaatatcaaagaattattatccagcaaaactcaggccgctatggtggctttgggtttgcctgccgataccaatacagctgtcaccatcagcactaaagttgaatttggtgattaccaaattaacggtgctatggcggctgccaagttattaaaaaccaatccccgtgctttggcgcagcagctggtgcaacaactggatttagccgatatggctgaaaaagtggagattgcaggcccgggttttattaacgtcactttacgtaaagactggttagcagcgcagctggtgggagcttcacaaaacccacgtttaactttaagcgcaaatccggccccgcaaactgtcgtagtggattactcagcgcctaacctggctaaagagatgcacgttggccatttgcgctccaccattattggcgacgcagtcgtgcgttgtctggaattctggggcgataaagtcattcgtcagaaccatatgggcgactggggtacgcagtttggtatgttgattgcgc

SEQ ID NO: 300691 - DNA, 697 bp, Unknown
  Bacterial polypeptide expressing nucleotide sequence isolated from the Sargasso Sea
tgtttgattgcatccaatcttgcaaagaaaaatcctcgagatatagcttccgctcttatatcaaggctagagattcattctgaaattgtaaaagtagaattagcaggtcccggtttcataaatatatttttaacccgagaagcatttttaaaccaattagatgatgctcacaaaaatcaaaattcttttattaattcatctaatacacccaaagaaaaaatacaaatagagtttgtatcagccaatccaaccggtccattgcatgtgggacatggtcgtggcgctgcctatggagatgccattggtagaatcttgcagcaactaggtcataaagtatcaagagaatattatgtgaatgatgctggtaggcaaattgatatcttggcatgcagcatctttttaagaaaatttgaatgctttgatgaagatgcttttccaaaatctgcatataaaggatcgtatattttagaaattgctaaaggcgcagatatagaacaggcattagccgaattagataaagaaaaattaatagccaatcttccagatgatgaagaagaaaaaatagatgagttaatagagcgtataaaaattaatcattcaaatagttggtatttaattagagactttggtctgaactttgtaattaaatctatcaaagaagatttaactcaatttaaagtaatttttgataattggt

SEQ ID NO: 300692 - DNA, 466 bp, Unknown
  Bacterial polypeptide expressing nucleotide sequence isolated from the Sargasso Sea
atgctgcgcatcgccgaaaccctggaagctcagctgcgctctgcgatgcagcaggctttccctgaggccgatgccgagctgaatccagccctaagcccagccagcaaaccggaatttggtgatttccaagccaatggctcactcgccttggccaaacccctgaagcaagcaccgcggcagattgccggcgcgattgttgagcaactgcagaacaacccggaattttcagccctagctgaagcccctgaaatcgccggccctggattcatcaatatcaccctcaaaccgacggttctggcagcagaagtacgtcagcgaatcggcgatcctcgcctgggcgttgcggcggttcagcaagccaaagcaccggtgattgttgatttctccagccccaacatcgccaaagaaatgcatgtggggcatctgcgttccacgatcattggcgactgcttggcacgggttctgg

SEQ ID NO: 300693 - DNA, 820 bp, Unknown
  Bacterial polypeptide expressing nucleotide sequence isolated from the Sargasso Sea
agccccaacatcgccaaggagatgcatgtggggcatctgcgctccacgatcatcggcgattccctggcgcgggtgctggagttccgggaccatccggtgctgcgcctcaatcatgtgggcgactggggcacccagttcggcatgttgatcacccatctcaagcaggtcgcgccggacgcgctcgagaccgcctatgcagtggatctaggcgatctggtggccttctaccgcgaagccaagaaacgctttgatgacgatgaggccttccaatccacctcccgggaggaggtggtgaaactgcaggggggcgatccggtgtcgctcaaggcctgggggctgctctgcgatcagtcgcggcgtgagttccagaagatctacgaccggctcgacattcgcctcaatgagcgaggtgagtccttctacaaccccttcctgcccgcggtgattgatggcttgaaggacgccgagctgctggtcaccgacgacggtgcccagtgcgtgttcctcgaaggcgttcagggcaaggacggcaagcccctgccggtgatcgtgcagaagagcgatggcggcttcaactacgccaccaccgacctggcggcgatccgctaccgctttggagtggcaccggatggggatgacgcacgccgggtgatctatgtgaccgacgccggccaggcaaatcatttctccggcgtgttccaggtggctcagcgggccggttggatcccggacggtgcgcggctcgagcacgttccctttggcctggtgcagggggaggacggcaagaagctcaagacccgctccgggacacgggcggtgc

SEQ ID NO: 300694 - DNA, 819 bp, Unknown
  Bacterial polypeptide expressing nucleotide sequence isolated from the Sargasso Sea
gaaatatccaccagattagaagaagcccttaatagagctttcattaaagtattcccagaagaggatcgaagttcaaaaacttcatcaatacttacagcttctaatttagtccccgcctccaaaccggaatttggagattttcaaataaattgtgctttatctctagcaaaagaaataaaacaacctcctcgtgatattgcacaacaaatagctgatcaactacaaaaagatagtgatttcgttaaaatatgtaatccaccgctcattgcaggcccagggttcataaacctatctataaattcaaatacacttatctccgaaatccattgtcgcttaaatgacaaaagattgggagtccctctaaaacaattcagtagtgaaaaaatagaagatggaaaaagcaataaccgcgtgattattgatttttccagtccaaatattgctaaagaaatgcatgttgggcacttacgatcaacaattattggagactccttagctcgggttcttgaattctgcggttatgaagtcttacgactcaaccatgtaggagattggggtacacaatttggcatgctcatcactcatctgaaagaggttgtaccagaggctctacatacaaaagatgtcgtagaaataagtgatcttgtaaatttctatcgtcaagcaaaaaaaagatttgatgaagatcaaatctttcaaaataaatctagaagtgaggttgttaatttacaagcaggtgatccagaaagtctaatagcgtggcaattgctctgcacatcatccagaaaagagtttcaaaagatctacgatcgactttga

SEQ ID NO: 300695 - DNA, 583 bp, Unknown
  Bacterial polypeptide expressing nucleotide sequence isolated from the Sargasso Sea
aatacgtctaaaagatttattaaaagaagcagttagaagagcaaaagaagatttactgaaaagattagaagatgaaaatcgttatgagaccgaagaatttattgcaaatacttcaagaataattggattaggcgctgttaagtatgcagatttaagtcaaaataggattactaattatcaatttagttttgataaaatgctttccctgaatggaaatactgctccttatttgttatatacatttgtgagaatttcaggaattaaaagaaaaaatgatttcgtttatgactctaaagattgtcaattcataaattatgaacataaatctgaatggaaacttattagaaaattacttaagttcgatgaagtcataatttctattgaaaaagacttaatgccaaatagactatgtaattatctttttgagctatgtcagacttttaatagattctatgatcaagttccaatcctcaaagaagaaaaaaatataaaaatttcaagacttaatttatgtgacctaacagcaaaaacactaaaattaagcttagagcttctaggaattgaaactttagaaagaatgtaa

SEQ ID NO: 300696 - DNA, 526 bp, Unknown
  Bacterial polypeptide expressing nucleotide sequence isolated from the Sargasso Sea
aaaagattagaagatgaagatcgttatgagaccgaagaatttatagcaaatacttcaagcattattggattaggagctgttaagtatgcagatttaagtcaaaataggattaccaattatcaatttagttttgataaaatgctttccctaaatggtaatactgctccttatttgttatatacacttgtaagaattttaggaattaaaagaaaaaataattttgtttatgactctaaagattttcagtacataaattatgaacataaatctgaatggaaacttatcagaaaattacttaagttcgatgaagtcataatttctattgaaaaagacttaatgccaaatagattatgcaattatctgttcgagctatgtcagacttttaatagattctatgatcaagttccaatcctcaaagaagaaaaaaatataaaaatttctaggcttaatttatgtgacctaactgcaaaaacactaaaattaagcttagagcttttaggaattgaaactttagaaagaatgtaat

SEQ ID NO: 300697 - DNA, 835 bp, Unknown
  Bacterial polypeptide expressing nucleotide sequence isolated from the Sargasso Sea
ctgctctgcgatcagtcgcgccgtgaattccaaaagatctacgaccgcctcgacatccgcctgagcgagcgcggtgagtcgttctacaacccgttcctgcctgcggtggtggatggcttgaaggacgctgagttgctggtcaccgatgacggtgcccagtgcgtgttcctcgaaggagtgcagggcaaggacggccaacccctgccggtgatcgtgcgcaagagcgatggcggcttcaattacgccaccaccgatctggcggcgatccgctatcgattcggtgatggccctgagggggatggcgcccgccgcgtcatctacgtgaccgatgccggccaggcgaaccatttcgcgggggtgttccaggtggccgagcgggccggttggatccccgatggagcttgccttgagcacgttcccttcggtttggttcagggggaggacggcaagaagctcaagacccgatccggcgacacggtgcgcctgcgagatcttctcgatgaagcggtggagagggctgaggccgacctgcgctcgcgtctgaagcaggaggagcgcagcgagtcggaggagttcatccagcatgtggcgggaactgttggtttggcggctgtgaagtacgccgacctcagccagaaccggatcaccaattaccagttctccttcgaccggatgctggcgctgcagggcaacacggcgccgtatctgctgtatgccgtggtgcgcatcgctggcattgcccgcaaggggggcgacctggatgcgtccacggctcagctggcgttcaccgagctccaggaatgggccctggtgcgtgagctgctgaagttcgatg

SEQ ID NO: 300698 - DNA, 826 bp, Unknown
  Bacterial polypeptide expressing nucleotide sequence isolated from the Sargasso Sea
attaaaatgaatttatacaaaaaatacttaaacgaaattaaaaaaaatttatctaagaataaatcaaaaattaatctaaaaacgcaatatagcttagataatattgtattagagagccccccagaaaaatttaattttgatttttcttgtaatgctgcaatggcattatctaaatctttaaataaaaactcaagagatctagcagaaattatcagggatattttaaaaaaaggtgttgttgattttgagaaaattgaaattgctggtcctggatttataaatatcacattaaataacaaagcatggcttaaaataattaatgatatattaaaaaataaggccaagtatggatcaaacaaatataataaaaaatacaatgtggaatttgtttccgcaaacccaactggacctttacatgtcgggcattgtcgaggtgcgatttttggtgacgttttatccaatttattaaagtttaatggaaataaagtaattaaagaattttatataaatgattatggtaaccaaattaatgattttacaagatcagtatattttagattaagagaaattaaacttaaagaaaattttcctaatgaaaataatttataccctggtgcctatgttattgatattgctaaaaatatcttaaaaaaaaatcctaaaataaagttaaatgaatataaaaaaatgtatagttcattaaaagataaagcattaaaagaatctatgaacttaattaagaatgatcttagacttttaggtatatatcatgactattttttttcagaaagtaaacttgttaatgataaccttgtaattaaaagca

SEQ ID NO: 300699 - DNA, 973 bp, Unknown
  Bacterial polypeptide expressing nucleotide sequence isolated from the Sargasso Sea
ataaaagaaagaggtgaatctttttataatccatttttaaagtcagttattgaggatttgaagtttaaaaaaatactcatagaagatcaaggagctaaatgtgtatttttagatggtatgactaataaagaaggcaaacctttaccgctaattgttcaaaaaaaagatggcggttttaattatgccaccacggatcttgctgctataagatacagattcaataaaccgccaaatggggatgatgcttcaagaattatttatgtaactgatcatggacaagcaaatcattttgctggagtttttcaagttgcaaaaaaagcaaaatggatcccagataagtgtcaagtagatcatgtcccttttgggttagttcaaggaattgatggcaaaaaactaaagacaagagaaggtgaaacaatacgtctaaaagatttattaaatgaagcagttagaagagcaaaagaagatttattaaaaagattaaaagatgaagatcgttacgagaccgaagagtttattgcaaatacttcaagaattattggattaggagctgttaagtatgcagatttaagtcaaaatagaattactaattatcaatttagttttgataaaatgctttcccttaatggaaatactgctccttatttgctatatacacttgtaagaatttcaggaattaaaagaaaaaatgattttgtttatgaatataaagatcttcagtacataaattatgaacataaatctgagtggaaacttatcagaaaattacttaacttcgatgaagtaataattgctattgaaaaagacttaatgccaaatagactatgcaattatctgttcgagctatgtcagacttttaatagattctatgatcaagttccaatcctcaaagaagaaaaaaatataaaaatttctagactcaatttatgtgatctaactgcgaaaacactaaaattaagcttagggcttttag

SEQ ID NO: 300700 - DNA, 1427 bp, Unknown
  Bacterial polypeptide expressing nucleotide sequence isolated from the Sargasso Sea
tttgatattggggaatattactaaaaataatcctaaagagatcggtcttgaaattggaaatattttgaagggtcttagcttggtaagctctattgaggttgctggtcctggattcattaatatctttctcaatcattctggaactctaaaaataattaaagatatccttgataaaaatactatcaaaaaagaggaggattcaaaaaaaattcaagttgaatttgtctcagcaaatccaactggtccacttcatgttggtcatggaagaggagctatttatggcgatgtaatttcaaagctacttgaaaaaaaaggccacgaagttcagaaggagtactatgtcaatgatgcgggaaggcaaatagatattcttacagctagtgtatatttaagagccattaatatagaagataatatttttcctgagagtgcttacagaggaaaatatataaaggaaatcgcaaagaatactaatttacatgaagctgtaaatattgatgatctcttcaaaaatcttcccgaggatgatgaagaaaaaatagataaaattatctcgcatctcaaatctgctagcgagaaagactggcaatcggttaaagaagtatcactagagaatgttctttcaacaatacaaaaagaccttgaagattttggtgtaacttttgataactggtttttggaatcctctttactcggcgctgattcaaaaattgatgaagctgtccaacaactaaatactaataatctaatagataatcgagatggaaatatctggtttaagtcttcagattttggtgatgataaggatagagttttgataagagaagatggaagacaaacctacttcgcttctgatgttgcttatcataaagataaattagacagaggttttgatgaaattataaatatttggggctccgatcatcatggatacataaagagggttgaagcatctctggaaggcctaggctacgataaaaataaactttctgtgaagctggttcaatttgcaaatctaataaaaagtggttcgccggtaaagatgtctacaagaagtggagaattttactctcttgaggacttgttaagtgatgttggctctgatgttgctagattttattatctttcaaaacaaactgatcagcatttagatttcgatctagacttagcggtctcaagcaagaaagaaaatatgtattactacattcaatacgcacacgctagaatatgctctcttgaaaaaaaagctggcttaaaaacttttcttgtagaaaatatttctgaagaccatgtagaaatttgctctaatcttatacatgagatctcaaaatacccaaatgtacttgaaaaaacctgcaacaatctttcaccacatttattaatcttttatttgaaagatttatcttcaatttttcacaatttttata

SEQ ID NO: 300701 - DNA, 1633 bp, Unknown
  Bacterial polypeptide expressing nucleotide sequence isolated from the Sargasso Sea
ttgactctttcagattctctaaaaaaaggtcactggacttctaacctgtgtttgattgcatctaatcttgcaaaaaaaaatcctcaagatatagcctcagcactaatacctcttcttgaatcgaaatctgaaattgcaaaagtagaattagcaggaccaggttttataaatatatttttaactcgagaagcatttttaaatcaacttgataatgctcataatgatcctaattattttctgaattcttcaaatacctccaaagaaaaaatacagatagagtttgtttcagcaaatccaactggtccattgcacgtgggtcacggccgaggtgctgcttatggcgacgctattgggcgaatcttagagcgactgggccatgaagtatccagagaatactatgttaatgatgcaggcagacagattgacattctagcctgtagtatttttttaagaaagtttgaatgctttaaaaatgaatttcctgagtcagcatataagggatcgtacattttagaaattgctgatgcaatagaacttgatattggtataactaaatctgaaaaagaatccctgatagataatcttccaaatgataatgaagaaagaatagacgctctgattgagcgtataaaaattaattatccagaggcctggtcaacaataagggattttggccttagctatgttattgaatctataagagaggatttaacaaaatttaaagtgatatttaataattggttttttgaatcatcacttggagagctgacagacaaaaaatcggaaatttcaaaagcactggctaaagtacaaaaagatcatgcgtatgaaaaaaatggagctatttggttagaatccacaaaatttggggatgataaagatcgagtaattattcgtgaagatggcagaggaacatatctatctgctgatttggcgtatcacagaaataagttagataggggctttgataccataataaatgtttggggagcagatcatcatggttacataaaaaggatagaggcaaccattgaagccatgggttatagcaagaaacaaatgcaggttcagcttgtccaatttgccaacctttttgaaaatggatctaaagtaaaaatgtcaaccagaagtggaaatttctatactttgaagcaattaattgatgacataggccctgatgcatcaaggttttactacttgtccaaacaagcagatcaacatttagattttgatattggaattgctagatctaattctaaagataatctttattattatattcaatatgcacatgcaagaattagctctgtagaaaaaaagtttcttgaattgagtcggcctttgcctaagaagtttaataatgttgattttgacgattgtgatgaactgcttcaaatggctttaagtgctcaatttgtaattaaaagttcaggagagagcttgcagccgcatcttattatttattatcttagggatattgcacaaaattttcatcaattttataacaacgtaaacatcctcaatgcagatgaaaaacataaaaataatattatgcgcactcttatgatagttaagtctgtaatagcttcctctttgcacctattgggtattgagcctttagaaaatatgtaat

SEQ ID NO: 300702 - DNA, 1681 bp, Unknown
  Bacterial polypeptide expressing nucleotide sequence isolated from the Sargasso Sea
aatgggcgtagaaaatgcgccagtgccagtttcgcgcagcgctcgacctgaatttggtgagtatcagtttaacggcgcgatggcgctagccaagcagcttaagcaaaagccgcgcgatattgcagagaaaattgttgagactgtaaagctcgacgatattgccagcaagctagaagtggcgggccctggttttatcaacgttcatttaaatgacgaatggctgtctaatcaatgtgagttgtcgctaaccgacccacgtttaggtattgctaagtcaaaagaacaaaacattgttgttgattactcatcgcctaacctggccaaagaaatgcacgtgggccacctgcgtactactatcatcggcgatgctgtggttaaagtacttgagttcttgggccacaatgttattcgtcaaaatcacatgggcgactggggcacacagttcggcatgttgcttgcgcacctttcagacaagctacaagatgaagtggctgaaactgcactctctgatcttgaagacttttaccgcgaagccaaagtacgctttgacgaagaagaaggttttgccgaccgcgcccgtgaatacgtagttaagctgcagggcggtgacgctcagtgtctggcgctatgggaaaagttcattgacgtgtctattgctcactcagaagaagtgtacgacaagctaaacgtaagcctgacccgtaaagatattatgggtgagtcggcttacaatgacgatttagccaacgtaatcagcgatcttaaagcgaaaggccttgcagtagaagaccaaggtgcgcaggtggtgtttatacctgagctggctgataaagaaggtaaccctgcggtttacatcgttcaaaagtcgggtggcggctatttatacgcaacgacagaccttgcggcaatgcgctatcgcagcggcaagttaaacgctgaccgtacgctgattcttaccgatgctcgccaagcactgcacttcaagcaaactgaaattgtgggccgtaaagcgggctttatgaaagaagagcaaacttacgagcattgcccatttggaatgatgctaggcagtgacggtaagccatttaaaacgcgtactggtggtacggttaaactggtcgaattgcttgatgaagccgttgagcgtgcgggtaagcttatcgcagagcgcgacaacgatttaagtgaagacgagcttaaagaagtcgctcacaaggtgggtattggcgctgtgaaatatgctgacctatctaaaaaccgcacaactgattacatgtttaactgggactccatgctaagctttgaaggtaacacggcgccttaccttcagtatgcttatacccgtgtgaaaagcttgttcagaaaagcgggtgtggatatggccaccatgccagtagatatcaatattgctgagaaacaagagcacgcgctagctgtattacttatgcagtttgaagaggtgattggtacagtatctcgtgaagccacgcctcatgtactgtgtacttacctctatgatgtggcttcagcgtttatgtcattctacgaagcgtgcccgatgttaaaagacggtattgagccagctgtacgcgatagccgtctagcgttgtcagctctggttgccaagacgctagagcaaggattaactctacttggcatcgaaacactagaaaaaatgtag

SEQ ID NO: 300703 - DNA, 502 bp, Unknown
  Bacterial polypeptide expressing nucleotide sequence isolated from the Sargasso Sea
atgctaatcatttttaaagaattaacaaaacaatttgaacaatctcttttagatagtcttgaaaaaaatgataaaaaaggagaattcgaaattcttcgaaaaaatttaattacacaatcatcaaaagaggaatttggtgattatcaatgtaatgtttgtttaagtttatctaaaatatataaaaagaacccaagagatatttctaatgattttattaaccttttaaataaaaatataagcatatcaaaattatgtaagagtctagaaatagctggacctggatttataaatataaaattaaaagatgaggttctaataaatgaaattaagtcaaatattcaatgcaatagggctggcatacctctcattagaaaagatttagatagtggtttgtccaataaagttattgtagatttttctagccctaatattgctaaagaaatgcatgtagggcatttaagatcaacaataataggtgactcaatatctagaatttcgagta

SEQ ID NO: 300704 - DNA, 1747 bp, Unknown
  Bacterial polypeptide expressing nucleotide sequence isolated from the Sargasso Sea
catgaaatcacatatccaatcattacttgaacaaactatcgaatcctttaaacaacaaggtattttgcctgcggattttgaggcgcgaattcaagtagatcgaaccaaggataagagccatggcgatctggcaaccaacttagccatgatgctaaccaaagcggcgggtaaaaatccccgtgaattggcgcagctgatcatcgacaacttacccgcctcagcctatgtggcgaaagttgaaattgcaggcccaggttttattaacttcttcattgatgacagcgcgttagcgaaccaattacaggctgcaattagcgatgagcatttagggattaagctaccaacgccacaaactatcgtggtggattactcttcacctaacctcgccaaagagatgcacgtcggccacctgcgttcgaccatcattggtgacagcgtggtgcgtaccctcgagtttttaggccataaagtgatccgccaaaaccacgtaggcgactggggcacccagtttggtatgctgctggcatacatggaagaattacgcgcacaaaatggcgaacaagcccaattagaattatcagatctcgaaaccttctaccgcgccgccaaactgcgttttgacgaatcggcagagttcgcgacccgtgcccgtcagctcgtggttgaactgcaatcaggcgacgaatactgcaacaaactgtggcgtgaatttaacgacatttccttaagtcactgccacgaagtgtacgagcgtttaggggtgagcttaacccgcgccgacgtgcacggtgaaagcgcctataacgccgacttagaacaagtagtcaaagatttagacgcccaaggtttactgacccaaagcaacggcgccaaagtggtcttccaagaagaattccgtaacaaagaaggcgaggcgctacctgttatcattcaaaaagccgatggtggttacctctatgccactaccgacttagcggctatgcgttaccgttcaagcgtgctaaaagccgaccgcgtactctactttgtcgatttacgccaagcgctgcacttccaacaagtatttagccttgccaagctggccaagtttgtccgtaacgatatgtcactggaacacttaggcttcggtaccatgaatggcgaagatggtcgtccgttcaagactcgtaccggtggcgtggtgaaactggtggatctactggatgaagccaatactcgcgcacttgagctggttcgcagcaaaaacccagatatggatgaagcgaccttagctgaaattgcccgcgttgttgggatcagcgcagtcaaatacgctgacctgtcgaaaaaccgtaccagcgattacatcttcagcttcgagcaaatgctgagctttgaaggcaataccgcgccttacctgctatacgcttacacccgcgttgcaggtatcttcaaacgtgcgaccgatattgacttaagccaagccaagattgtactcgaacacgaaaaagagaaagacttaggtaacaaactggcgcagtttggtgaaatcctcagccgcgtggtcgacaagggccaaccacatgtactttgcggttacctctatgaattagcgggggccttctctagcttttatgaggcctgcccagtacttgccgccgataacgacgagcaaaagcatagccgtttactgctgtcacaactgacggccaacacgctgcaaaaaggcctaaatctactaggtatcgaaaccctagaacggatgtaa

SEQ ID NO: 300705 - DNA, 1720 bp, Unknown
  Bacterial polypeptide expressing nucleotide sequence isolated from the Sargasso Sea
ttggccgatcatacaaataaagaagagattaataaaataattgaaaaatactctatatcaataacagaatccctcaagaatggtcatatcacgactaatgtttgtatggtggctgccagtaatttaaaattaaatccaattgatctcgcctcaaaattagttgaaaaactaaatctattgaatctgtttgaaacagttgaaacagcaggtccaggctttattaatataactctgcatagagaagatttcgtatcaataattaactccattaatgataataaagagaagtatggtgaatctaatattggcaatggaaaaaaaatacaaatcgagtttgtctctgcaaaccctacaggacctttgcatgttggtcatggtagaggtgctgcttatggagatgccattggcagaattttaaaagctacaggttacgatgttcaaaaagaatactatatcaatgatgctggaagacaaattgatatcctcacggcaagtgtaatcttaaaaagtatctctaaagagattggagattatttcccagaaaatgcatataaaggtgaatatataaatgaaattagtaaaaattttgaagaaaaagcaaaagtaacttatcaaaatcttgactcagttttaaatgttcaaaaatctttcttggattcaaaagttgatgatgaaaaagaaattgatgcagtaatattaagtcttaaaaacttaaatattgatttttgggattctgtaaaagaactttctgtaaatgagattgttaactcaatagagaatgatttaaaaaaattcaatgtttcatttaacaactggttcagagaatcatccttgggaaatattaatgaaaattcatcaattatttcatcgtcaataaataagctcaagaaagatggacatgcatacgaaaaagatgatgcaatttggttaaatactgaatcaagcggggatgataaacacagagtattggttagggacgatgggaggcctacatactttgcctcagatgttgcatatcataaagataaaattgatagaggttttgataagcttataaatgtttggggagcagatcatcatggttatataaaaagaattgaggcttcaatagaagcattgggctctaaaaaagaaaaaatgattgttaagttagtgcaatttgcaaatctttataaaaatggcaaaaaggttaaaatgtctacaaggtcaggagattttttcacactagaaaatttgattgatgaaattggatcagatgcatcaagattttattatctttcaaaacaagcggatcaacatttagattttgatttagaccttgcgcaatcagataataaagaaaatattttttattacatccaatacgctcacgccagaatttgttcgctgttagataaatacaataaaaatgcgggcattagaaatctaaatctttctagtattgaaaaaaattcctacaataagtgcgatgaattaattcatgaaatatcaaagtacccagatgtggtaactaaagcttcaaacacattacaaccacatttaattattttttatttgagagatttatcccaactatttcacagttattacaatgataatcatgttttatctgaatcaaatgacaatattgaggcaataatttcttgcttgtcttcggtaggaattgttatttcaaatggtttaaatcttttgggaatcatgccaatcaaaaaaatgtaat

SEQ ID NO: 300706 - DNA, 1798 bp, Unknown
  Bacterial polypeptide expressing nucleotide sequence isolated from the Sargasso Sea
catgctgccagcacacaaacagaccctcgaagccctgctcgcggatagcgtcaagcaggtcgcacacgcgctgaaaggcgccgacgcggcaaacgccgacgtcacgttcgtcgcccccgccatcacgctggagcgcccgaaggtcgccgcgcacggcgacgtcgcgtgcaacgtcgcgatgcagctcgctaagccgctcggcacgaacccgcgccagctcgccgagcagatcgtcgccgccctcaccgcccagccgggcgcgcaaggcctcgtcgaagccgccgagatcgccggccccggcttcatcaacctgcgcctgtcggccgccgcgaagcaggcggtgatcgccgccgtgttcgaccagggccgcgcgttcggcacgtccgatcgcgagaaaggcaagcaagtgttgctcgaattcgtgtcggcgaacccgaccggcccgctgcacgtcggccacggccgccaggccgcgctcggcgacgtgctcgcgaacgtgatcgcgagccagggctacgcggtgcaccgcgagttctactacaacgatgcaggcgtgcagatcggcaacctcgcgatctcgacgcaggcgcgcgcacgcggcctgaagccgggtgacgcgggctggccggaagccgcgtacaacggcgaatacatcgccgacatcgcacgcgacttcctgaacggcgaaacggtcgccgcgtcggacggcgagccggtcaagggcacgggcgacgtcgaggatctcgacgcgatccgcaagttcgcggtcacgtacctgcgtcgcgagcaggacatggatctgcaggcattcggcgtgaagttcgaccagtactacctcgagtcgtcgctgtacagcgaaggccgtgtcgagaagacggtcgacgcgctgatcaaggccggcatgacctacgagcaggacggcgcgctgtggctgcgcacgaccgacgaaggcgacgacaaggatcgcgtgatgcgcaagtcggacggcacgtacacgtacttcgtgccggacgtcgcgtaccacgtgacgaagtgggagcgcggcttcaccaaggtgatcaacatccagggttcggaccaccacggcacgatcgcgcgcgtgcgcgccggcctgcagggcctgcacatcgggatcccgaagggctaccccgactacgtgctgcacaagatggtcaccgtgatgcgcgacggccaggaagtgaagatctcgaagcgcgcgggcagctacgtgacggtgcgcgatctgatcgaatggtcgggtggcgcggcggcgggccaggaagcggcgcccgacctgatcgacgaggcgaccatcacgcgcggccgcgacgcggtgcggttcttcctgatctcgcgcaaggccgataccgagttcgtgttcgacatcgacctcgcgctgaaacagaacgacgaaaacccggtctattacgtccagtacgcgcacgcgcggatctgctcggtgctcaacgagctgaaagcgcgctacaacgtcgacgtcgcacagctgcctggcgccgacctgtcgcagctgacgagcgcgcaagcggcgtcgctgatgcagaagctggccgagtacccggacatgctcacgcacgcggccaacgaactggcaccgcacgccgttgcgttctacctgcgcgacctcgctggcgaattccactcgttctacaatgcggagcgcgtgctggtggacgacgaagcgccgcgcaatgcacgcgcagcactcctcgccgcgacccggcaggtgctcgagaatggtctggcggtgctcggcgtgtccgcgcccgccaagatgtaa

SEQ ID NO: 300707 - DNA, 1240 bp, Unknown
  Bacterial polypeptide expressing nucleotide sequence isolated from the Sargasso Sea
atgatagctgatgaaataaagaataagattcttgcccatattgaagagcgattctctgaagaagaggtttcaattgcttcttcaaagttccaaatagagatacctgatagccctgagaaaggcaatcttacatgtaatgttgctttgatattaggaaatattactaaaaataatccaaaagaaatcggtcttgagattggaaatattttgaaggagctcaatttagtaagctctattgaggttgctggtcctggattcattaacatctttctcaatcattctggtactctaaaaataattaaagatatccttgataaaaatactatcaaagaggaagaggattcaaaaaaaattcaagtcgaatttgtctcagcaaatccaactggtcctcttcatgttggtcatggaagaggagctatttatggagatgtaatctcaaaactacttgaaaagaaaggccacaaagttcaaaaggagtactatgtcaatgatgcgggaaggcaaatagacattcttacggctagtgtatatttaagagccattaatatagaagataatatttttcctgaaagtgcttacagaggagaatatataaaggaaattgcaaaaaatgctaatttacaggaagttgttaatattgatgatctttttaaaaatcttcctaaggatgaagaagagaaaatagatgaaatcatctcgcatctcaaatccgcttgcgagaaagactggcaatcaataaaaaaaatatcgctagagaatgttctttcaacaatagaaaaagaccttgaagattttggtgtaacttttgataactggttcttagaatcctctttactaggtgctgactcaaaaattgatgcagctgtccaacaactaaatacaaataatctaattgataatcgagatggaaatatctggtttaaatcttctgattttggcgatgataaggatagagttttaataagaacagatggaagacaaacctacttcgcttctgatgttgcttatcataaagataaattagatagaggttttgatgaaattataaatatttggggctccgatcatcatggatacataaagagggtcgaagcatctctggaaggcttaggctatgacaaaaataaactttctgtgaagcttgttcagtttgcaaatctaattaaaggtggttcgccagttaagatgtctacaagaagtggagaattttactctcttgaggacttattaagtgatgttg

SEQ ID NO: 300708 - DNA, 1699 bp, Unknown
  Bacterial polypeptide expressing nucleotide sequence isolated from the Sargasso Sea
aatgatagctgatgaaataaagaataagattcttagccatattgagaagcacttctctgaagaagaggtttcaatagcttcttcaaagttccaaatagagatacctgataaccctgagaaaggtgatcttacatgcaatattgctttgatattgggaaatattactaaaaataatcctaaagaaatcggtcttgaaattggaaatattttgaaggagcttagtttagtaagctctgttgaagttgccggtccaggattcattaatatctttcttaaccattctgggactctaaaaataattaaagatatccttgataaaaaaactataaaagaggtggagaatccaaaaaaaattcaagttgaatttgtctcagcaaatccaaccggtccgcttcatgttggtcatggaagaggagctatttatggtgatgtaatttctaaactacttgaaaaaaaaggccacgaagttcaaaaggagtactatgtcaatgatgcgggaaggcaaatagatattcttacggctagtgtatatttaagagccattgatatagaagataatatttttcctgaaagtgcttacaaaggaaaatatatagaggaaatcgcaaagaatgctaacttacagaagactgtaaatattgatgacctatttaaaagtcttcccgaagatgatgaagagaaaatagataaaattatctcgcatctcaaatctgctagtgagaaagactggcaatcaattaaaaaagtgtcactagagaatgttctttcaacaatagaaaaagaccttgaagattttggggtaacttttgataactggttcttagaatcctctttactcggtgctgattcaaaaattgatgcagctgtccagcaactaaatacaaataatctaatagataatcgagatggaaatatctggtttaagtcttctgattttggcgatgataaggatagagttttaataagagcagatggaagacaaacctacttcgcctctgatgttgcttatcataaagataaattagatagaggttttgatgaaattataaatatttggggctccgatcatcatggatacataaagaggatcgaagcatctttggaaggcttaggctatgacaaaaataaactttctgtgaagctggttcaatttgctaatctaattaaaggtggttcgccagttaagatgtctacaagaagtggagagttttactctctcgaggacttgttaagtgatgttggctctgatgttgctagattttattatctttcaagacaaactgatcagcatttagatttcgatctagacttagcggtctcaagcaagaaagaaaatatgtattactacattcaatacgcacatgccagaatatgctctcttgaaaaaaaagctggcttaaaagattttctagcagaagatatttctgaagaccatgtaaatatttgctcaaatcttattcatgagatctcaaaatatccaaatgtgcttgaaaaaacctgtaacaacctctcgccacacttattaattttttatttaaaagatttggtctcaacttttcataatttttataacgacaataagatattagataggtcagaatctgaaaaattaactattcttatagttactcatgccgtaaaggaagtaatagcagatagcctcaacctattgggcgtaaaagcattagaagaaatgtaa

SEQ ID NO: 300709 - DNA, 1598 bp, Unknown
  Bacterial polypeptide expressing nucleotide sequence isolated from the Sargasso Sea
tctgtcagctatttcttttgagtttccaagagatattacccatggagatttctcaacaaatgctgctcttattttatcaaaaaaattaaaaataaatccaaatgaagtttatacaaatattgaaaaattctttgaagctgggcaagattttaaaagtattgagttaactaaatcaggatttattaatttttttataaaagataatattttacacgattttattcatgaagttttgaatgataaaaataatttcggtaaaaagaatattggtagaggagaaaaaattaatatcgagtatgtctctgccaaccccactggccctttgcatgtaggacatactaggggtgctgtatttggcgatactcttgctaatatattagagtttgttggttttgatgtttgtagagaatattacattaatgattcaggtgaacaaattaaaaatttagctcactcagtatacctaagatacttacaaattttttctgataaaaaaattgaaataccgagcgatctctatcccggcgagtatttaatacctattgcacaaaaaattagtgaagatcatggtcaaaaatttattaatgaagaagaaagtcaatggatagattattttaaagaagaatcagtatcaaatgtaatggacattataaaaagagatttaagctctctagagattaagcatgatatttttatatcggaaaaattactgctagaagatggtcaagtagaaaaaacatataaagccttagaaaaacaacaattgctttatgagggaagcacaaagcctccaaaaggagcaaaaaaagatgaatggatagaaaaaaagcatattttatttaaatctaaaaattttggtgatgatgaagacagggttgttaaaaagcatgatggccagtggacatattttatgcctgatattgcttatcatttaaataaattcgaaagagggtttataaaaatgattaatatttttggagctgatcactcaggatatatagcaagaatgaaagctgcagttaaggcggttactaatggagaagctaatctcgatatcaagacttgtcagttagttagtttatcaagggcaggaaagcctgttaaaatgtctaaaaggtcagggagttttgttacattaaaagaaattgttgatgaggttggtaaggatgcagtccgctttatgatggtatcaagaaaaaatgatgctcaattagattttgattttgaaatatttaaaaatgaaaataatgataatcctatattttatattcaatatgcaaatgcaaggatttcatctttattaagaaattcaaaagaaaaacttggtataaatattaaggatgaagatttaaagaatgctgactttactcttttagaaaatgaaaatgaaaagagaataatttttcaaatagcaaattttccaaaggtcattgaacagtctgcaatatttatggagccccatagattgtcttattacttaagagacttggcgtcctcttttcatcaatactggaatttaaaaattgatagtaaaagaattcatatattggataaaagtcaaatagagctatctattgcaagattagcgttactaattg

SEQ ID NO: 300710 - DNA, 1792 bp, Unknown
  Bacterial polypeptide expressing nucleotide sequence isolated from the Sargasso Sea
catgctgcccgcacataaacgaaccctcgaaacactgctcgccgacacggtgaagcaggtcgctgaagcaacccaaggcgcgaccgaagccgccttcgtctcgcccacgatcacgctggagcgtcccaaggtggccgcgcacggcgacgtcgcgtgcaatgtggcgatgcaactcgccaaaccgttgcgcgccaacccgcgccaactggcccagcagatcgtcgacgcgctgctcgcgcagccgcaggcaaaaggcctcgtggacgccgccgaagtggccggccccggcttcatcaacctgcgcctcgcggcggccgccaagcaggccgtgatcgctgccgtattcgctgaaaaggaagccttcggccgctcgcagcgcgacgccggcaagcacgtgctgatcgaattcgtctcggccaacccgaccggcccgctgcacgtcggccacggccgccaggccgcgctcggcgacgcgctgtcgaacgtgctggctagccaaggctatgacgtgcaccgcgagttctactacaacgacgccggtgtgcagatccacacgctcgccgtgtcgacccaggcgcgcgcccgcggcctcgctccgggcgacgaaggctggcccgcttcggcatacaacggcgagtacatcgccgagatcgcgaaagattatctgaacggcgtcaccgtagccgcgagcgacggcgagcccgtgacgggcgcgggcgacatcgaaaacctcgacgcgatccgccgctttgcggtcgcctacctgcgccgcgagcaggatatggacctgcaggcgttcggcgtgaagttcgaccagtactacctggagtcgtcgctgtacaaggaaggccgggtcgagaaaaccgtcgatgcgctgatcgccgccggcaagacctacgaacaggaaggcgcgctgtggctgcgcaccaccgacgacggcgacgacaaagaccgcgtgatgcgcaagaccgacggcacctacacgtacttcgtgccggacgtcgcgtatcacgtcgccaagtgggaacgcggcttcaccaaggtcatcaacattcagggctcggaccaccacggcacgatcgcgcgggtgcgcgccggcctgcaaggcctcggcataggcattccaaagggctatcccgactacatcctgcacaagatggtcacggtcatgcgcaacggcgaagaggtgaagatctccaagcgcgccggcagctacgtgacggtacgcgacctgatcgaatggtcgggcggcgccacgccgggctcggaagcagcgatcgatctgattgacgaagagacgattcgccgcggccgcgacgccgtgcgcttcttcctgatttcgcgcaaagcggacacggaattcgtgttcgacatcgacctcgcgttgaaacagaacgacgagaatccggtgcactatgtgcagtacgcgcatgcgcggatctgctcggtcatcgccgaatgcaaggcgcgctataacacggacgaaagcacgctggcccagctcgacgtgtcgccgctcaccagcgaacgcgccatggccttgctgaacaagctcgccgagttcccggacatgctcgagcacgccgccgacgaactcgcgccgcacgcggtcgcgttctatctgcgcgacctcgccggggaattccactcgttctacaatgacaaagccgaacgcgtgctggtcgacgacgccgccgagcgcaatgcgcgcgtcgcgctgcttgcggccacgcgtcaggtgttggccaacggtctcgcgacgatcggcgtctccgctcccgtcaagatgtaa

SEQ ID NO: 300711 - DNA, 1741 bp, Unknown
  Bacterial polypeptide expressing nucleotide sequence isolated from the Sargasso Sea
atgagaaacataaatggttatttaaagaatataatcggagcagaattttcaaaaatattcaatgtttcgaatgaaactgtagagaagagctcatttgtagttgaatacccaaaaaacaaatctgatggtgagctaagtacaaatatttgtatggttcttgcaaaagagatatcagcaaatccagtagaggcagctaaaactctcattaaatcattagagaaaattgaggactttgagatgttggaagttgcaggtccaggctttttaaattttaatatttctaaagatacttggtttaaatttttaagtcagttgctagaaacgaacttgctctttaatgaggaaattggtttaaataaaaatattaatgtcgaatatgtttctgcgaatcctacaggccccttacatatcggtcattgtagaggagcggtttttggtgacgtactatcaaatctacttaaagtcaccggtcataatgtaacaaaagaatattacattaatgatgcaggtactcaaattgatacccttgcaaactctacaattattagaataaaagaaatcatcaatagcaaaagcgaagaaaattatccagatgaattttatcctggtgaatatctaatcgatgttgctaaaaaaataatagacaaacacggtacatctattcttaaaaacgacaatcacttttcaacaataaaaggtgagtgtgtaaatttactattagaaaacataaaagaagacttaagtaaactatctattaatcaagatatttttgtttcagaaaaagaattaataacccaaggtaaaatcgacaaaaccatagatgaactcaaaaatatgaatttaatctatgagggcattttagataagcccaaaggtaaacaaattgaagattgggaaccaagaaagcaattattatttaaatcatctgaatatggagatgaaatcgatagaccattacaaaaatcagatggtgagtggacttactttgcaaacgatattgcctatcattatgataaatacttaagaggatcgacacatttaatcgacatattaggcgctgatcatggcggatatattaagagaatgagcgcttcgatacaggccctaactaataacaaagcaagatttacagcaaagttatgtcaaatggtaaaacttatcagtgatggcaaggaattaaaaatgtcaaaaagatctggtgacttcattaccttaagtgatttagtgaaagaagttggtagtgatagtataagatttatgatgatgtacagaaaaaatgaagcacccttagagtttgattttaaaaaagtaactgaacagtctaaagaaaatccagttttttatgtacagtatgctcatgcaagaatttcgtctgtattaaacaatcttcattctcaaaatattaaattaaatttagagaattttagtgaatgcaatttttctgaactaaatgatctttctgaaatatctcttttaaaaaaaatcctggattatagtaatatcattaatacgtcagtttctctatttgagccacatcgaattgcatattacctgtatgaattagcatcagaatttcactctttatggagtcagggaaaagtagataacagtaagaaatttatagatgcagataatataccaaggacttatgctcgaatggcactactgattgctactcagagaacaataaaatctggacttgatattcttggagtttcctcgccagatgaaatgaaataaa

SEQ ID NO: 300712 - DNA, 1747 bp, Unknown
  Bacterial polypeptide expressing nucleotide sequence isolated from the Sargasso Sea
tatgaaagagcatattcatcatctacttgaacaaacggtagccaatctcaagtcagcaggcgtcctgccggcggacctggaagcccgcgtgcaagtagaccgatgcaaggaaaaagctcacggcgacctggctaccaacctggccatgctgctggccaaaccggcccgcaagaatccccgtgagctggcagcggccatcatcgagcacctgcccgcctccgacctgatcgccaaggtcgagatcgccggtcccggcttcatcaacttcttcttcgaccagcgctggctggccggtcaggtcgaggccatggtgacctctgccaacgccaacgtgaaattgccgaccccgcagaccgtggtggtggactactccgcccccaacgtggccaaagagatggcggtacaccacatccgctccaccgtactcggtgacgtcgcagctcgcgcgctggagttcctcggccataaagtgatccgtgccaaccacatcggcgactggggtacccagttcggcatgctgatcgcctatctggagaagatgtccaacgagcacgccagcgacatggcgctcaaggatctggaagccttctacacccaggccaagcgttgctacgacgaagacgaagccttcgccgagcgcgcccgtaactacgtggtcaagctgcagggcggcgatgagtactgccgcaccatgtggaagaagctggtcgacatgaccatggaacagaaccagatcaactacgaccgcctgaatgtctccctgaccaacaaggacatcatgggcgagtccatgtacaacgacatgctgccggagatcgttgccgacctgaaagccaaggggctggcggtcgagagcgaaggcgctaccgttgtcttcctggacgagttcaagaacaaggatggcgaggccatgggcgtcatcatccagaagagcgatggcggtttcctctacaccaccaccgacatcgcctgtgccaaataccgttatgaaaccctgggcgccgaccgtgtcatgtacttcatcgactcccgtcagcaccagcacctgatgcaggcctggaccatcacccgcaaggcgggctatgtgccggaatccgtcccacttgagcaccacgccttcggcatgatgctgggcaaggatggtcgtccctacaagacccgctccggtggcaccgtcaagctggttgatctgctgaacgaagccgaagagcgcgccgctgcgctgctggagagccgcaacagcgacctctccgccgaagagaaggccaacgtggtcaacgccatcgccatgggcgcggtcaagtatgcggatctttccaagaaccgcaccaccgactacatcttcgactgggacatgatgctctcctttgaaggcaacactgctccttacctgcagtatgcctacacccgtattcagtccatcttccgcaaggccaacatcgatgccgaggcgctgaccggcaacgtaaccctgaacgaagaggccgaagaggtgctggcccagaagctgatccagttctccgacgcggtcaacggcgtggcagacaaaggcatgccgcacctgctctgtacctacctgtacgagttgtccggcaacttcatgaccttctatgaagcctgcccgatcaacaaggatggcgtggacgaagcaacccgtcagagccgtctgctgctgtgcgccgccaccgccaaggtgctgaaactgggcctcggcgtactgggcatccataccctggagcgcatgtaa

SEQ ID NO: 300713 - DNA, 1699 bp, Unknown
  Bacterial polypeptide expressing nucleotide sequence isolated from the Sargasso Sea
aatgatagctgatgaaataaagaataaaattcttagccatattgagaagcacttctctgaagaagaggtttcaatagcctctgcaaagttccaaatagagatacctgatagccctgagaaaggtgatcttacatgcaatattgctttgatattgggaaatattactaaaaataatcctaaagaaatcggtcttgaaattggaaatattttgaaggagctcaatttagtaagttctattgaggttgctggtcctggattcattaacatctttctcaaccattctgggactctaaaaataattaaagatatctttgataaaaatactatcagagaggaagaggattcaaaaaaaattcaagtcgaatttgtctcagcaaatccaactggtccacttcatgttggtcacggaagaggagctatttatggcgatgtaatctcaaaactacttgaaaagaaaggccacgaagttcaaaaggagtactatgtcaatgatgcgggaaggcaaatagatattcttacggctagtgtatatttaagagctattaatgtagaagataatatttttcctgagagtgcttacagaggaaaatatataaaggaaattgcaaaaaatgctaatttacaggaagctgtaaatattgatgatctcttcaaaagtcttcccgaggatgaagaagagaaaatagatgaaatcatctcgcgtctcaaatccgctagcgagaaagagtggcaatcaattaaaaaagtatcgctagaaaatgttctttcaacaatagaaaaagaccttgaagattttggtgtaacttttgataattggttcttagaatcctctttactgggtggcgattcaaaaattgatcaagctgttcaacaactaaatacaaacaatctaacagataatcgagatggaaatatctggtttaagtcttcagattttggcgatgataaggatagagttttaataagagcagatggaagacaaacctactttgcttctgatgttgcttatcataaagataaattagacagaggctttgatgaaattataaatatttggggctccgatcatcatggatacataaagagagttgaagcatctttggaaggcctaggctatgacaaaaataaactttctgtgaagttggttcaatttgcaaatctaattaaaagtggttcgccagtaaagatgtctacaagaagtggagagttttactctcttgaggatttgttaagtgatgttggctctgatgttgctagattttattatctctcaaaacaaactgatcagcatttagatttcgatctagacttagcagtctcaagcaaaaaagagaatatgtattactacattcaatacgcacacgctagaatatgctctcttgaaaaaaaagctggcttaaaaacttttctagcggaaaatatttctgaagaccatgtagatatttgttctaatcttatacatgagatctcaaaatacccaaatgtacttgaaaaaacctgcaacaacctctcaccgcatttattaatcttttatttaaaagatttagcttcaatttttcataatttttataacgataacaagatattagataagtcagaatctgaaaaattaactattcttgcagttactcatgccgtaaaggaagtaatagcggatagcctaaacctgttgggtgttaaggcattagaagaaatgtaa

SEQ ID NO: 300714 - DNA, 1546 bp, Unknown
  Bacterial polypeptide expressing nucleotide sequence isolated from the Sargasso Sea
atgatagctgatgaaataaagaataagattctcagtcatatagaagagcacttctctgaagaagaggtttcaattgcttcttcaaagttccaaatagaaatacctgatagtcctgagaaaggtgatcttacatgcaatattgctttgatattaggaaatattactaaaagtaatccaaaagaaatcggtcttgaaattggaaatattttgaaggagctcaatttagtaagctctattgaagttgctggtcctggattcattaacatctttctcaaccattctgggactctaaaaataattaaagatatccttaataaaaatactattagagaggaagcagattcaaaaaaaattcaggtcgaatttgtttcagcaaatccaactggccctcttcatgttggtcatggaagaggggctatttatggcgatgtaatctcaaaactgcttgaaaagaaaggccacgaagttcaaaaggagtactatgtcaatgatgcaggaagacaaatagatattcttacggctagtgtatatttaagagccattgaaatagaagataatatttttcctgaaagtgcttacagaggggagtatataaaggaaatcgcaaagaatgctaacttacaggatgctgtaaatattgatgatctttttaaaagtcttcccgaggacgatgaagagaaaatagataaaattatctcgcatctcaaatctgctagtgagaaagactggaaatcaattaaaaaagtgtcactagagagtgttctttcaacaatagaaaaagaccttaaagattttggtgtaacttttgataactggttcttagaatcctctttactaggtgcagattcaaaaatcgatgcagctgtccaacaactaaatacaaataatctaatagataatcgagatggaaatatctggtttaaatcttctgattttggcgatgataaggatagagttttgataagagctgatggaagacaaacttacttcgcttctgatgttgcttatcataaagataaattagatagaggttttgatgaaataataaatatttggggctccgatcatcatggatacataaagagggtcgaagcatctctggaaggcttaggctatgacaaaaataaactttctgtgaagcttgttcagtttgcaaatctaattaaaggtggttcgccagttaagatgtctacaagaagtggagaattttactctctcgaggacttattaagtgatgttggctctgatgttgctagattttattatctttcaaaacaaactgatcagcatttagatttcgatctagacttagcagtctcaagcaagaaagaaaatatgtattactacattcaatacgcacacgctagaatatgctctcttgaaaaaaaagctggcttaaaagattttctagcagaagatatttctgaagaccatgtagatatttgctcaaatcttattcatgagatctcaaaatatccaaatgtacttgagaaagcctgtaacaacctctcaccacacttattaattttttatttaaaggatttag

SEQ ID NO: 300715 - DNA, 1744 bp, Unknown
  Bacterial polypeptide expressing nucleotide sequence isolated from the Sargasso Sea
ttgattgaaactataaataaaagaatagatcttttcatttcttcaatagatggcatcagcaataattctgttcagattatattaaataaattttctacttctatttctgaagacttagataagggtcacttaacaacaaatgtatgcatgattgctgctagtgtcctaaaacttaatccaaaagagcttgctaaagaacttaaagataatttagatgatttggatatttttaaagatgtacaaatagctggacctgggttcgttaatataactcttcataaaaaagaatttgtgtcagtccttaataaaattattaaagaaaataaaagttttggggaatcaaatattggagctggtagaaaagttcagattgaatttgtatctgctaatcccacaggccctcttcatgttggccatggaagaggtgcagcatatggtgatgcaattggaagaattttaaaagccaccggatctattgtggaaaaagaatattatataaatgatgcgggtaggcaaattgatatcttgactgcaagtgtaatcttaagagtaattcaaaataagattaacaacttctttccacaaaaagcttataaaggtgattacattgactctattggtagagagtttgtctctaagaataagattgaatatggtgatatcgactttatagataaagatttatcatcagatccagaagaagagatggatcaaatcatacttaaactaaaagaattagacgagagcatctggagttctgttaaaaccttttctttaaatagcataatagaatcaattaaaaatgatcttgaagattttaatgtctgttttgataattggttttatgaatcttcacttggcgatctaaaaaatgaatcttctgaaatttcaaaatcaataacaaagctaactaaggaaggtaagacatataaaaaagatggagctatatggcttgataccgaaagtgctggagatgataagcatagggttctagtaagagaagatggtagagcaacatactttgcgtctgatgttgcatatcataaaaataaaatagacagaggatatgatgatttaattaatgtctggggtgccgatcatcatggttacataaaaagaattgaagcctccatagatgcaattggttctaaaaaagaaaaattaatagtaaaacttgttcaatttgcaaatctttttaaaaatggcaaatcagtcaagatgtccacaagatctggagaattttttacacttagagagcttctagaggatataggatctgatgcggcaaggttttattacttatcaaagcaggctgatcaacatctagattttgatttagatttagctaaatctgatagcaaggaaaacattttttactatattcaatatgcccatgctcgaattttttcattggaacaaaaatataaggaaatgtacccaaagctagatactaatatcgaggcgattgaaaaagatctttataaaaaatgtgactctcttattcatgagataagcaaatatccacatattattaataaatctgcaagaacgcttcagcctcatataattattttttacttaagggacttatcgcaattattacatagttattataacgataatcatgttctctctgaatctaaagaaaatatgcagtctataattttgtgtttgtcagctttaaggcaggttatttctaatgggttaggtattcttggtatatcaccaatgcaaaaaatgtgat

SEQ ID NO: 300716 - DNA, 1816 bp, Unknown
  Bacterial polypeptide expressing nucleotide sequence isolated from the Sargasso Sea
aatgctaatcatttttaaagaattaacaaaacaatttgaacaatctcttttagatagtcttgaaaaaaatgataaaaaaggagaattcgaaattcttcgaaaaaatttaattacacaatcatcaaaagaggaatttggtgattatcaatgtaatgtttgtttaagtttatctaaaatatataaaaagaacccaagagatatttctaatgattttattaaccttttaaataaaaatataagcatatcaaaattatgtaagagtctagaaatagctggacctggatttataaatataaaattaaaagatgaggttctaataaatgaaattaagtcaaatattcaatgcaatagggctggcatacctctaattagaaaagatttagatagtggtttgtccaataaagttattgtagatttttctagccctaatattgctaaagaaatgcatgtagggcatttaagatcaacaataataggtgactcaatatctagaattttcgagttaagaggttatgaagtattaagactcaatcatgttggtgattggggaacacaatttggcatgcttattactcagctcaaagatttatattcaaatgatctagaagaaataggaaagatcaaaataagtgatttagttgaattttataaagaatcaaaaaaaagatttgataacgaatctgaattccaaaaaagatctagagaggaagtagttaagttacaaagtggagatattaaatcgattaaagcttggaaattattatgtgatcaatcaaggaaagaatttgatgaaatctataaaaatttaaaaataaaaatagaagaaagaggtgaatctttttataatcccttcttaaaatcagttattgatgatttgaatttagaaaaaatattagtagaagatcaaggagcaaaatgtgtatttttagatgggatgactaataaagaaggcaaacctttaccgctaattattcaaaaaaaagatggaggttttaattatgccaccacagatcttgctgctataagatacagattcaataaacctcctaatggcgatgatgcttcaagaattatttatgtaactgatcatgggcaagcaaatcattttgctggagtttttcaagttgcaaaaaaagcaaaatggatcccagaaaattgtcaagtagaccatgtcccttttgggttagttcaaggaattgatggcaaaaaactaaagacaagagaaggtgaaacaatacgcctaaaagatttattaaatgaagcagttagaagagcaaaagaagatttattgaaaagattagaagatgaagatcgttatgagaccgaagagtttatagcaaatacttcaagaattattggattaggagctgttaagtatgcagatttaagtcaaaataggattaccaattatcaatttagttttgataaaatgctttcccttaatggtaatactgctccttatttgttatatacacttgtaagaattttaggaattaaaagaaaaaatgattttgtttatgactctaaagattttcagtacgtaaattatgaacataaatctgagtggaaacttatcagaaaattacttaggttcgatgaagtcataatttctattgaaaaagacttaatgccaaatagattatgcaattatctgttcgagctatgtcagacttttaatagattctatgatcaagttccaatcctcaaagaagaaaaaaatataaaaatttctaggcttaatttatgtgacctaactgcaaaaacactaaaattaagcttagagcttttaggaattgaaactttagaaagaatgtaa

SEQ ID NO: 300717 - DNA, 1342 bp, Unknown
  Bacterial polypeptide expressing nucleotide sequence isolated from the Sargasso Sea
ttctgctaatccaacaggtccattacatgttggacattgtagaggagcaatatttggagatgttctttcaaatttattaatttttaatggaaacaaggtaacaaaagaatattatataaatgattatggaaatcaaattaagaattttgtcgagtcagtttatttaagaattagagaaattaaatttaatgaaaaatttcctagcaaagaaaatttatatcctggtgattatataaaggaaatagccttaaatatattagaaaatcataaagaggttaaatttgataattttaaagattgctttgaagaattaaaaaaacgttctttagaaggatcaatgtctttaataaaaaaagatttaaaacaccttggtatatcccatgatatttttttttcagaaacggaacttctaaaaaaagatttaataaataaaacagttaaaatacttcaaagtaaaaattatgtaaaagaaggatatcttgatccaccaaaaggcgaaccttcaaaaaattggaaaaaagtaaaaagacttatctttaaatcaactgaatttggagatgatttagatagagctttacaaaaaaatgacggatcttggacatattttgctaatgatgttgcttaccactcacataaaataaatagaaaatttgataatttaatcaatattcttggagcagatcatactggatatataaaaagaatttctgccgctgtatctgctttgtctgataaaaaaataaaatttaattgtaaagtttgtcaattagtaaaactttataaaaatggcaaaccttttaaaatgtctaaaagagcaggtgactttattacagtcgaagatttattaaatgaggtaaataaagatgcaataagatttatgatgctcaatagaagtaatgatgcagaattagacttcgattttgaaaaggtaaaagaaaaaacaaaagataacccagtttattatgtacaatatgcgtatgctaggattaattcgattacaagaactcttaagaagaaattaagtgataaaattttaatagagaataaatcatttaatcccaatgaatatgagaaaaaaatattaagaaaaatatttgagtggccaaaaataatcgagtcagcttcttataaacttgaaccacataaaattcctttttacttatatgaactttcaactcttttccactcatattggagtaaaggaaatgaggacaaaaattatagatttctagaaaatgataaggtcaaaagattagagactttagcattcatctacttgactgcaatagtaattaaaaatggaatgaatattcttggagtttctcttcctgaaaaaatgtaa

SEQ ID NO: 300718 - DNA, 1699 bp, Unknown
  Bacterial polypeptide expressing nucleotide sequence isolated from the Sargasso Sea
aatgatagttgatgaaataaagagtaagattcttagctatatcgaggagcacttctctgaaggagagatctcaatagcttcttcaaagttccaaatagagatacctgatagccctgagaaaggcgatcttacttgcaatattgctctaatattaggaaatattactaaaaataatcccaaagaaatcgctcttgagattggaaatattttgaaaggcctcaatttagtaaactctattgaagttgctggtccaggattcattaatatttttcttaaccattctgggactctaaaaataattaaagatatccttgataaaaatactatcagagaggaagaggattcaaaaaaaattcaaatcgaatttgtctcagcaaatccaactggcccacttcatgtcggtcacggaagaggagctatttatggtgatgtaatttcaaaactacttgaaagaaaaggccacgaagttcaaaaggagtactatgtcaatgatgcgggaaggcaaatagatattcttacggctagtgtatatttaagagcaattgatataaaagataatatttttcctgaaagtgcctacaggggaaaatatataaaggaaatcgcaaagagtgctaatttacagaaagctgtaaatattgatgatctttttaaaagtcttcccgaggatgatgaagagaaaatagataaaattatcacgtatctcaagtctgctagtgagaaagactggcaatcaattaaaaaagcgtcactagagaatgttctttcaacaatagaaaaagaccttgaagattttggtgtaacttttgataactggttcttagaatcctctttactcggttctgattcaaaaattgatgcagctgttcaacagctagatacaaataatctaatagataatcgagatggcaatatctggtttaagtcttcagattttggcgatgataaggatagagtcttaataagagcagatggaagacaaacctactttgcttctgatgttgcatatcataaagataaattagacagaggctttgatgaaattataaatatttggggctccgatcatcatggatacataaagagggttgaagcatctctggaaggtctaggctatgacaaaaacaaactttctgtgaaactggttcaatttgcgaatctaattaaaagtggttcaccagtaaagatgtctacaagaagcggagaattttactctcttgaggatttgttaagtgatgttggctcagatgttgccagattttattatctctcaaaacaaactgatcagcatttagattttgatctagacttagcggtctcaagcaaaaaagaaaatatgtattactacattcaatacgcacacgctagaatatgctctcttgaaaaaaaagctggcttaaaagattttctagcagaaaatatttctgaagaccatgtaggtatttgctctaatcttatacacgagatctcaaaatatccaaatgtgcttgaaaaaacttgcaataagctctcaccacatttattaattttttatttaaaggatttagcttcagcttttcataatttttataacgacaacaagatattagataagtcagaatctgaaaaattaactattcttgcagttactcataccgtaaaggaagtaatagcggatagccttgacctattgggtgttaaagcattagaagaaatgtaa

SEQ ID NO: 300719 - DNA, 1726 bp, Unknown
  Bacterial polypeptide expressing nucleotide sequence isolated from the Sargasso Sea
gctgtctttagttgatagaacaaacaaagaaaagattaatacaataattgaaaaatactctatatcaataactgaaacccttgataatggtcacatcacaactaatgtttgtatggtggctgcgagtattttaaagttaaaacccattgaactcgcttcaaaattagttgaaagactgagcttattgggtctattcgaaatagttgaggctgcaggtccaggttttatcaatataacgctacatagaaaagattttgtatcaataattaattctattaatggtaataaagaaagatatggcgaatctaatattggcaatgggaaaaagatacagattgaattcgtgtctgcaaaccccacaggacctttgcacgttggtcatggtagaggagcagcctatggggatgctgttggcagaattttaaaagcaacgggttttaatgttcaaaaagaatattacattaatgacgctggtagacaaatagatattttaacggcgagtgttatcttaaaaattatctctaaagagattgatgaatattttccacaaaatgcatataaaggcgaatacatcaatgaaatcggggaaaattttataaaaaaaacaaaagtttcgtatcaaaatcttgaatcggttctaggtgtccaaaaattgttcttggattcgaaaaatgatgatgaaaaagaaattgatgcagtaatattaagccttaaaaacttaaatatcgatctttgggactctgtaaaaaaattctccgtgaaggagattgttgactctatagaaaatgacctcaagaaatttaatgtttcatttaataattggtttagggagtcttctctaggaaatattaacgataattcatcaactattgcatcatcaataaataagcttaagaaagatggacatgcatacgagaaagataatgcaatatggttaaatactgaggcaagtggagatgataaacatagagtcttagttagagatgatggaaggccaacatattttgcttcagacgttgcatatcacaaagataaaattgatagaggctttgataagctcataaatgtttggggtgcggatcatcacggctatataaaaagaattgaggcttcaatagaagcattaggttctaaaaaagaaaaaatgatagttaagttggtgcaatttgcaaatctatataaaaatggcaaaaaagttaaaatgtctacaaggtcaggagatttttttacactagaaaatttgattgatgaaattggatcagatgcctcgagattttattatctttcaaaacaagcagatcaacacttagactttgatttagatcttgcacaatcagacagcaaagaaaatattttttattacatccaatatgcacacgccagaatttgttcgctaatatacaaatacgataataatgcgaatattaaaaatcttaatctctctagtattgaaaaaaattcctataatcaatgcgatgaattaatccacgaaatatcaaaatatcctgatgtggttactaaagcttcaaacacattacaaccacatttaattattttttatttgagagatttatctcaactatttcacagttattacaatgataatcatgttttatctgaatcaaatgaaaatattgaggcaataatttcttgcttatcatcagtgggagttgttatttcaaatggtttaaatcttttgggaatcacgccgataaaaaaaatgtag

SEQ ID NO: 300720 - DNA, 1738 bp, Unknown
  Bacterial polypeptide expressing nucleotide sequence isolated from the Sargasso Sea
ttgatagatattataaacaaagaaataaaagaatttttattatcggttgataacgacaagaaaaatatacaagccattcttgaaaagagtacaacttctataacagatgatttaaacaaggggcatttaactacaaatgtatgtatggttgctgcaagtactcttaaatctaaaccaaatgaattggctaacaatttaaaagaaaaattaataaagctagacttttttcaagacgttcaatctgcaggacctggttttataaatatctttcttaaaagaaatgacttcgtatcaaccataaatgttatcaataaaatgagggactcattcggcaaatcaaaagttggagatggaaaaaaagttcaaattgaatttgtatctgctaatccaactggaccacttcatgttggtcacggaagaggtgctgcttttggagatgcaataggcagaatccttgaagcaacaggatcattggttgaaaaagaatattacattaatgatgcaggaaggcagatcgatattcttactacaagcgttttattgagaatgattaaggaagatataaataattattttccgcaaaatgcatataaaggaaaatatattgaagatatcgctaataaactgaaaaaagatataaatttaaattgtgattatgaatcattgactaaagatatgcctacagatcctgaaaaggaaattgatcaaattattgaaaatataaaagatcaggatgaatcctcatggaatcaagcgaaagaattttcattggctgaaatggttaaatctattaaaaatgatcttaaaacatttaatgttgattttgatcattggtttaatgaatcatcattaggggatgtgagtgattcctcatcagaaatatcaacttcaataaacaaattaaaaagcgatggtaatgcttatgaaaaagatggtgcgatatggcttaatacagacataagcggcgatgacaaacatcgagttctaataagagaggatggaagatcaacttattttgcatcagatgttgcttatcataaaaataaaattgatagaggttttgataaattaataaatatatggggtgcagatcatcatggttatatcaaaagaattgaggcatctattgaaacattaggatcaagcaaagaaaaacttattgttaaacttgtccaatttgcaaatctttttaaggaaggcaaaaaggtaaagatgtccacaagatcaggtgaattttttactttaaaagatctgattgatgatataggtactgatgcggcaagattttactacttatcaaaacaagctgatcaacatttagattttgatatagatttagcaaaatcagacagtaaagagaatattttttattatattcaatatgctcatgccagaattgtttctttagaagaaaaggctttaaaaaagaactctaaaataaaaacaaatattaataacatagaaaataatagctacaaagaatgcgataagctgattcatgaaatatcaaaatatcctggtgttgttaacaaggccgcgaatgcacttcaacctcatttggtaatctattatttgagagacctggctcaattatttcatagctattacaacgacaatcatgttctttcagaaactgatcaaaatattgaatcaattcttgcatgtttattgtctgtcaaacaagtcatttcaaatggtctagaccttcttggaatatctcctattgaaaaaatgtgat

SEQ ID NO: 300721 - DNA, 1723 bp, Unknown
  Bacterial polypeptide expressing nucleotide sequence isolated from the Sargasso Sea
attgcatgctggcataaaaaaattaccaaaaataaataaagcgtatgatcccagcttcttctctgagacagttgagagaacaagggattcaagtcatggtgattttactagtaatattgcgctcaggcttgccaaatctttaaaaaaaaatccgagagaactggccaatgaaattattaaatacatcccaaaaaataattcaataaagaaaatccaagttgcaggaccaggatttatgaatttctatcttgatgattcagcttatcatattgaaatagagaaaattttatcgaataaaaatctaatagaaaaaaacaaagactttaaaaagcataagttacttcttgagtttgtttcagctaatccaacaggtccattacatgttggtcatggaaggcatgcagcatttggagcatccctaagaaatatccttgaagcggtcggttatgatgtaaaaagtgaatattatgtgaatgattcaggaagacaaatggatattctctgtattagtgtgattattcatttattaagaagagaaaatcaaaaaatttccatgcctttagcaggttatcaaggccagtatattaaaacaatatcactagccattgatcaaaaatttaatgaagatgaaattaagttaaaagagcttatacccaaaatagatgatagaaacgatcaagatcaatacatagattgtttgattgagaacacaaaaagacttattggtacaaaaaaattcaatcaaataaaaaaacagtctctagatttgataaaaaaagatattaaggatgatttgtcggaatttggggttttgtttgactcttggttctcagaagagtcattgcatagaaatggcgaaatagataaagctttacaatcattaaagaaaaaaaattatctttatgaacaagatggagcaacatggttcagagcaactgatcttggtgatgaaaaagatcgagtggtaattcgtaaaaatcaaaataaaacctatttcacttccgatattgtctatcaccataataaaaaagaaagagggtttgacacactgattgatattcttggctcagatcatcatgggtatatcgcaagagtaaaagctggcttagaagcaatgggtcataattctgatgatcttgatgttcaattagttcagtttgtatctctctacgaaaatggagtcaaacaagccatgtcaaccagatcaggtgaatttataaccctaagacaacttagagaagaagtaggtaatgatgccgcgagatttttttacatcatgcgatcaaatgagcaacaccttgattttgatctagccctagccaaaagcaaaactagtgaaaacccagtttattatattcagtatgcacatgctcgtatagcaagtgttataaatcagttaaatgaaaaatctctaaaatacgaccaaaaaaatggcatttctaatcttaaattactcactactgaaaaagaaagacaattgatggtttctatttcaagattttcagaaatacttttcctttctgcaaaaaataaagcgcctcatagtttggcacaatatctaagagatttagctaatgattttcattcatattacaatgaatcgattattttaattgatgatcatgcattaagagacgcgagagtgtctctttcaatatcgactaaaaaggtcatctcaatgggcctcagtcttctgggggtttcgagcccttccactatgtaa

SEQ ID NO: 300722 - DNA, 1702 bp, Unknown
  Bacterial polypeptide expressing nucleotide sequence isolated from the Sargasso Sea
tttgtatggaagttcagaatttattcacgatgaatttgaaataagcatacaagataataaagaaaaggaatacggtgatcttgctagtaatgtagctttggtgctagccaaacccctaaaaagaaatcctcgagagattgcagaagaaattaaagtcaaatttataactgacaaggaaatagtaaaggttgatgttgcaggacctggttttattaactttttcttatctaaagagtcacacggtgcaatcttaaaagatatctctattcaaaaaaataattttggaaagtttgaatcgaagaatcaaaaagttcttattgaatatgtctcaagcaatcccacaggacctttacatgtaggacatggaagaggcgcagtttttggatctgtattatcgagacttttgaaggaagcaggatttcaagtagatgaagaatattatgtaaatgattttggcagacaaatgaatattctttccgcgagcttatggattagatatgcacagatatttgataagaacataaaaatgttaaataacggttatcaaggcgagtatctcattgccattgcacaaaatttaaagaaattcaggtctgatgagctgtatgaagacgatgaggagatcaaaagtcttctggaaaatgagaacgaagaagctgaaaaacatactgacgaggtaatcgaaagcatcaaatctaagctaagtaatgaattttcttatgttagagattttgctctcagggaaatattagagttgattaaagaagatctattagaattcggcgtcgatcacaatcgctggttttcagaatctacactttataaaagtgaaccgcatgatctaagcaaagttgatcaatctattgaagagctttcatctaaaggttttgtatacgaaaaagaaggtgctatttggtttaaatcttcagcacttggagatgataaagacagagttttaaaaagaagcaatggtgaatttacttattttgcctctgatgttgcctatcacttagataaatatgatcgcggatacgataggataataaatatttgggggtcagatcatcacggctaccttccaagagtaaaggctgccatggaagcaagtaaaaagaatgtagaaaagcttgaagtagtctttattcaatttgctaatttaattaaggcaggaaaaaaagtgaccatgtctactagaagtggggaatttattacgcttaaagaactcatagaagaggttacatcagaagcagcaagatttttttatattaatagaaaagctgatcagcatttagactttgatttagacctcgcgaaagagcagtctaaagataatcctctttactatatacaatacgcgcatgctcgcatatgtagtgttttacttaagtccaaagctagagaagaagaattgaacgcatcagaacttggattattggattccaacaaagagatagaaatacagaaaattcttaaacagtatcctcctctaattgaaagagcagctctagcaagtgagcctcatttaatttgctattacttaaaagacttggctagtatttttcatagttactacaataccgaaaaatttataattgaagaccagaagcttatgaactcaagattgttcttgctgagtggagtgaagcaagttattcataatggactagctgttctgggaataaatgctcctcatgaaatgtag

SEQ ID NO: 300723 - DNA, 1407 bp, Unknown
  Bacterial polypeptide expressing nucleotide sequence isolated from the Sargasso Sea
actgtctctagttgatagaaaaaacaaagaaaagattaatacaataattgaaaaatactctatatcaataactgaaacccttgataatggtcacatcacaactaatgtttgtatggtggctgcaagtattttaaagttaaaacccattgaacttgcatcaaaattagttgaaagactaagcttattaggtctattcgaaatagttgaggctgcaggtccaggctttataaatataacgctacatagaaaagattttgtatcaataattaattctattaatagtaataaagaaagatatggcgaatctaatattggtaatggaaaaaaaatacagattgaatttgtgtctgcaaaccctacaggacctttgcacgttggtcatggcagaggagcagcctatggggatgctattggcagaattttaaaagcaacaggttttaatgttcaaaaagaatattatattaatgatgctggcagacaaatagatattctaacggccagtgttatcttaaaaattatctctaaagaggttaatgaatattttccacaaaatgcatataaaggtgaatacatcaatgaaattggtaaaaattttataaaaaaaacaaaagtttcttatcaaaatcttgaatcggttctaggtgtccaaaaattgttcttggatttgaaaaatgatgatgaaaaagaaatagatgcagtaatattaagccttaaaaacttaaatatcgatctgtgggactctgtaaaaaaattctccgtgaaggagattgttgactctatagaaaatgacctcaagaaatttaatgtttcatttaataattggtttagggagtcttctctaggaaatattaacgataattcatcaactattgcatcatcaataaataagcttaagaaagatgggcatgcttacgagaaagataatgcaatatggttaaatactgaagcaagtggagatgataaacatagagttttagttagagatgatggaaggccaacatattttgcttcagatgttgcatatcataaagataaaattgatagaggctttgataagcttataaatgtttggggtgcggatcatcatggctatataaaaagaattgaggcttcaatagaagcattaggttctaaaaaagaaaaaatgatagttaagttagtgcaatttgcaaatctctataaaaatggcaaaaaagttaaaatgtctacaagatcaggagatttttttacactagaaaatttgattgatgaaattggatcagatgcatcgagattttattatctttcaaaacaagcagatcaacacttagactttgatttagatcttgcacaatcagatagcaaagagaatattttttattacatccaatatgcacacgccagaatttgttcgctaatatataaata

SEQ ID NO: 300724 - DNA, 1669 bp, Unknown
  Bacterial polypeptide expressing nucleotide sequence isolated from the Sargasso Sea
ctgaacaaaattagaaatagatatgcctcttcaataactgaagatctaaagaatggtcattacacttctaatatatgtatggttttggccagtaatttaaaattaaatccaaaagaactttctacaacacttgttgagaaattaaataatcttaatatttttgaaaaagttgaatcagcaggcccaggcttcataaatattacactaaaaagagaagattttttatcaacaattaaaaacataaattcagttggagaaaagtatggaaggtctttgattggagaaggaaaaaaagtacaaattgaatttgtctctgcaaacccaactggacctcttcatgttggtcatggaagaggagctgcctacggagatgctatagcaagaatattaactgcaactggctccgaggtcgaaaaagaatactacataaatgatgcaggaagacaaattgatattttgactgtaagtgtgattatgaaaatggcgaagtttgaaggctcattttttccttcaaatgcatataaaggtcaatatattgaagatattggtagctatattgaagaaaatgaaaaagttaaatttaatattgatgagtctatttttaaagggctaccaactgatcctgaaaaagaaattgatagcttgattgaaacaataaaacaaaagtaccctagcgaatggaaccttataaaaagttgttcgcttaaaaatatattagaaggtatcaatcaagatttaaaaaactttaatgttgactttgatgtttggtttaaagagtcatcgctaggagatcttagtgatgataagtcacagttaacaaagtcaataaataaactccaagaaggtggcaaaacatatgaaaaagatggagcaatttggcttaatactgaagtaagtggagatgataagcatagggttctaattagagataatgggaaggcaacatattttgcaactgatgtcgcatatcataaaaacaaagtcgatagaggcttcgacaagctgattaatatttggggtgccgatcatcatggatatattaaaagaatagaagcatcgatcgaagcacttggatcaaataaagacaaacttgatgtgaggttggttcaatttgcaaatctttttaaagatggagctaaggtaaaaatgtcaacaagatcaggtgacttttattcattaggcgatttaattaaagaaatcggttcagatgcagctagatttttttatttatcaaaacaatctgatcaacatcttgactttgatatcgatttggcaaaatctgataacaaagaaaatattttttattatattcaatatgcgtatgcaagaatcttttctctggaagaaaaatactatgaaagcaataagacaaaagatgctaataaatttgatctcgataatagttacaccaaatgcgataaattaattcatgagatatctaaatatcctcaagtagtagaaaagtcagcaaaaactctccagccacatcttataatcttttatttaaaagacttagctcaactttttcatagttattacaatgataatcatgtactgactgaagatccaaaaaatcaacaacttataatctcttctctttcagctgttaagcaagtaattgcaaatggtctaaacttgattggcatttccccaatgcaaaaaatgtaaa

SEQ ID NO: 300725 - DNA, 1182 bp, Unknown
  Bacterial polypeptide expressing nucleotide sequence isolated from the Sargasso Sea
ggcagggattttggctcatcttgtgctccagaaaaaatgagggtccttctagaatttgtctcagcaaatcctactgggccacttcatgtaggacatggtcgacatgctgcctttggtgattcgctggcgcgccttctaaaaaaagcgggtcatgaggtttttactgaatattatctgaatgatgcgggcaggcagatagatatcctttgtttaagtgttatcttggagatgcttcgtgctgaagggctggaattaatgaatatcaatggcctttacaaaggcatgtacatcaaagaaatttctcaagcattaataaaagaaggtttcgagataaataaaaaagtcttgattccaaagctcgacggatcagctgatgaaattgttgatgcgcttatattagaaattaaaaatgttacaggatccgagctttttcaaaaaatttcagacaaaaccgtatctcgaatgacaaaattgcttaaagacgacctttcagactttagagttaagcaagatggtttttattctgaaaaatctcttttttctaaaggaaaaattgaagaggcttgtgaaatcataaagaaaaacggaaatgcttttgaaaaagatggtgcactctggcttgagtcatcaaaatacggcgatgacaaagaccgtgtggttataagagaagacggaagatctacctactttgcgtctgatattgcatatcatcatgacaagaaaatgagaggttttgatcttttgatcaatgttttaggctctgatcatcatggttatatttcgaggcttgaggcaggcctcgcctcaactgggaataaagcttctgacttagatgtgattttgatgcagtttgtgactctatacaggggaaagaaaaagattcagatgtctactcgatcaggtaactttgtgccaatgagagacctttactcagaggttggtgttgatgccgctagatttttttatgtcagcagatcccatgatcagcacttggattttgatctagatcttgcgactgagcaaaataacaataatcctgtttactatatccagtatgcaaatgctcgaataaagagcgtgctcaatgaaaacgaaaaaaggggctatgtttttgatgagggcataggaaaagcaaaccttgtgaagcttgatctaacaatagaagaggagatcatttctctt

SEQ ID NO: 300726 - DNA, 1816 bp, Unknown
  Bacterial polypeptide expressing nucleotide sequence isolated from the Sargasso Sea
aatgctaatcatttttaaagaattaacaaaacaatttgaacaatctcttttagatagtcttgaaaaaaatgataaaaaaggagaattcgaaattcttagaaaaaatttaattacacaatcatcaaaagaggaatttggtgattatcaatgtaatgtttgtttaagtttatctaaaatatataaaaagaacccaagagatatttctaatgattttattaatcttttaaataaaaataaaagcatagcaaaattatgtaagagtctagaaatagctggacctggatttataaatataaaattaaaagatgaagttctaataaatgaaattaaatcaaatattcaatgccaaaggggtggagtacctcaaattaaaaaagatttagatagtggcttatcaaataaagtcattgtagatttttctagtcctaatattgctaaagaaatgcatgtagggcatttaagatcaacaataataggagattcaatatccagaattttcgagttaagaggttatcaagtattaagactaaatcatgttggcgattggggaacgcaatttggaatgcttattactcagctcaaagatttatattcaaatgatttagaggagataggcaaaattaagataagtgatttagttgaattttataaagaatcaaaaaaaagatttgataatgaatctgaattccaaaaaagatctagagaggaagtagttaagttacaaagtggagatattaaatcgattaaagcttggaaattattatgtgatcaatctagaaaagaatttgatgaaatctataaaaatttaaaaataaaaatagaagaaagaggtgaatctttttataatcccttcttaaaatcagttattgaggatttgaatttaaaaaaaatattagtagaagatcaaggagcaaaatgtgtatttttagatgggatgactaataaagaaggcaaacctttaccgctaattattcaaaaaaaagatggagggtttaactatgccacaacagatcttgctgctataagatacagattcaataaacctcctaatggggatgatgcttcgagaattatttatgtaactgatcatggacaagcaaatcattttgctggagtttttcaagttgcaaaaaaagcaaaatggatcccagacaattgccaagtagaccatgtcccttttggtttagttcaaggaattgatggcaaaaaactaaagacaagggaaggtgaaacaatacgtttaaaagatttattaaaagaagcagttagaagagcaaaagaagatttattgaaaagattagaagatgaaaatcgttatgagacagaagattttattgcaaatacttcaagaataattggattaggagctgttaagtatgcagatttaagccaaaataggattacaaattatcaatttagttttgataaaatgctttccctaaatggtaatacggctccttatttgttatatacacttgtaagaattgcaggaattaaaagaaaaaatgattttgtttatgactctaaagattttcaatatacaaattatgaacataaatctgagtggaaacttatcagaaaattacttaagttcgatgaagtcataatatctattgaaaaagacttaatgccaaatagattatgcaattatctatttgagctatgtcagacttttaatagattctatgatcaagttccaatactcaaagaagaaaaatatataaaaatttctagactgaatttatgtgatctaactgcaaaaacactaaaattaagcttagagcttctaggaattgaaactttagaaagaatgtaa

SEQ ID NO: 300727 - DNA, 1708 bp, Unknown
  Bacterial polypeptide expressing nucleotide sequence isolated from the Sargasso Sea
ctgataaaagagtctggtattgatgatttagactatcaaataaagttacaagaaaataaaggtaaagagcatggtgattatgcgagcaatatagcaatgattctcgctaagagcttaggcagaaatcctaaagatttagcagaaaatatttccaaaaactttaagttagatgaccagatcttaaaaatagaggtggcgggcccaggttttataaacttttttgtatcagaattaacgcattcagagattttacgcacgatagattcagaaaaagacaaatatggacacaacaaaagtaaattaggcaaagtgctgattgaatatgtttcaagcaaccctaccgggccattacacgtaggtcatggaagaggagcagtgtttggatcagtgttagcaaagcttttgactgctgcaggacatgaagtcgatgaagagtactatgtaaatgactacggaaggcagatgagcatactgactgtaagtgtttggttaaggtatatgcaaaactcaaagcaagacataacaatgactgctttagggtatcaaggtgactatatcaagttaattgcagatgagctgactaaagaaagtaaagaaaaatacatgctttcaggcagaaattatcaagaagtactttcattgctgaaagttcaggaagatgaaaaggacatcgactctttaatcatgtttatgcaaaaagcattagcagggggatttgcagaaatcagatctttcgctttagacaacatgctaaatattataaagagagatttaatgagatttggagttaatcataacctctggttctttgaatcttctctttatagcgagaagcaagaagaagactctaaagcaaaaaaagccatatcagaattaaatgaaaaaaattatgtctatgagaaagatggagcgctttggtttaaatcatctgaatttaaagacgataaagatcgggtattacaaagaagcaataatgatcatacttatttctcatctgatatagcctatcacttagataaatacattcgatcttatgacagaattattaatatctggggatctgatcaccatggctatttaccaagagttaaagctgcaatgaaagcattgggtttggatacaaataaactcgaggtagtgtttatacagtttgcaaaccttgtcaggagcggagaaaagatttctatgtccaccagaagtggagaatttattacgttaagggagctattggatgaggtcacacctgaagctgctcgcttcttttatattaatagaaaagctgatcaacatttggaatttgatcttgagcttgcaaaagaacagtcaaaagataatcctttgtactatatccaatacgctcatgccagaatttgcagcgtattcaataaagcggaatacaaacatgaagaaaatacaaagaatttagacctttctttattggtcgctgcgaaagaagtagaaattctgaaacagttagctatatttccttcattgatactaaaatcagcagaatcaaacgatactcatttgatttgctattaccttaaagatttagcaagtctatttcacagttattacaacaatgaaaaattcataattgaagacaaggagctcatgctttcaaggctttttcttctaaaaggagttaagcaagtgatctttaatggtcttgaaattcttggagtaagttctccagaaaaaatgtaaa

SEQ ID NO: 300728 - DNA, 1167 bp, Unknown
  Bacterial polypeptide expressing nucleotide sequence isolated from the Sargasso Sea
tttgaccgacgtttctatagcggaaacatcaaagcctttatttggtgactaccaatatagcggctgtatgcagttatttgcgaagttgactgacactcacgagttcaaaagttctcgcgacttggcggtcgtgatatcgaatatgttagagcgcggagatatgtttgacaagattgaagtagctgggccagggtttataaatttccacatttccgatacatttatctcggaacaagctctcaagttagcacaaaatattgactcctcctcaaagcaaacatttggtagacatgttattgttgacttctcgtctccaaacatagcgaaggaaatgcacgtaggtcacttgcgtagcacgataatcggtgattcactatgtcgggctttagaatatcgcggatttaacgtttctaggctcaaccatgttggcgattggggtacccaattcggcatgctcatcgcatacatgcgtgaaaatgtaagttcttttacagagaatatttccgatcttcagatgttctacaaaaaagcgaaagtaaaatttgacacggatgatgattttaaaagacgcgcgcaaatagtggttactcagcttcaggcgtacgatgaagaaacgtacaacatgtggaagcagatttgtcaggcgagcaggaaagagtttgaagaagtttatgaagagcttgatatacagatagaagagcgcggcgaaagtttctacaacaaattgataccagaggttcttcaacatctcgtagacaaagaaattgcggttacggatgagggtgcactttgtattttcagtcacgattcagaggtgccactaatttgtcggaaaagcgatggtggctttaattatgcctcaaccgatctggccgctttatactacaggactcaaattgagcaagcggattggatcatatacgtgacggacgtgagtcaaagtcagcacttcaatgcagtattcgatgcaggtagacgtgcaggttggttagatggaaggaaagtcaccgtggtggaccatgtagggttcggcctggtaacgggcgaggatggaaaaagacttcgaacccgctcaggagaaacagtgaaactaaaagatctacttgcagaggcaaagaaacaatgttttgatcagtttcaagctcgtggtgctgattcaaggaagaa

SEQ ID NO: 300729 - DNA, 1708 bp, Unknown
  Bacterial polypeptide expressing nucleotide sequence isolated from the Sargasso Sea
actggacatacccgactcaacatggctcccccttctaggaaaggcgaccgtggaggatcatggggatgtggctcttccttgccactctctagctggaattctgaaaaaggcacctcaggaaatagccaaacagatttccgaactcgtcgcgtctgatctgcaatcattcgccatcgtttcatctatgagtggctttgttaatattacagccaaaccagaatggctgtcgaagcgactatcgatactacttgcggatcctaggctcggagttagtgttgatgagaagaaaaccttcgccgtggactactctgctccgaatgtcgccaaagagatgcatgtgggacaccttagatcaactgtaatcggagacacgattgtaaggatgctggaattcaagggacacaccgtcattagagagaatcacgtaggagactggggtactccattcggcatgttgatcgagcatctcctagatttgggggaagaccgcgctgcaaacgaattaggagtaggggacctggattccttctacaagcaagccagatcaaagttcgtatcggatgaagaattcgctaatcgttccaggagccgtgtagtactactacagggaggggatgctgagacgctccgtttgtggcgcattctagtggacgagtcaatgaggtacttcaacgaagtttactcaatgctcggagtcatgcttaccgacgacgatatcagaggcgagtccagttatcaagaactgctaccggaggtagttgaaagactcagagaatccggagacctcgaggagagcgatggcgcagatgtcgttttcccaggaggttgggttaatcgagatggagaaccccttccaatgataattaggaaggcagatggtggttacaactacagtacttcagatctggcatgcataattgacagagtggagagactaggctgtgatggattcctgtatgttgtcgggactcctcagaaacagcatttcgagatggtattccaagtagcaaagaaagctggtttcatgagtcataatcaccaagcagtacacgtaaacttcggatctgttttggatactgacggcaaggttctgaagagtagagagggcgaggtgataaagctccacgaccttcttgaagaagcaataaggcgtgccgagcagtctatagatgacaagaatccagatttactaggcaaggaaagggaagaagtcgctcgagcggtgggaatcggcgctgtgaagtacgccgacctatcaaccgagaggaccaaggattacgttttcgactgggagaagatgctatccttcgagggaaatactgctccatatcttcaatacgcatacgccagaatatccagtatcttcagaaagtggggaggcgatagggaatctcttacaacgaacttcgaatctctaatggaaagcgaacttagcacacttaggggtgaagagattttactttctagaagactagtggaattcccttcgattttagatgactcagtttcaacttttagccctcataagctctgcaagcacctgcattcaatagcatcgtcttttgcttccttttacgagaattgcgcaatactcaaggaggataatgaaataatttctcagagacgtcttgctctgtgtgaagtcacctctagagaactgaaactggggttggaaatgatggggatcaatgttccagagagaatgtga

SEQ ID NO: 300730 - DNA, 1735 bp, Unknown
  Bacterial polypeptide expressing nucleotide sequence isolated from the Sargasso Sea
ttgattggtgaaattaataaggaaatagaaaaatttctatcttcaattgtaaataataaaaaaaatatcaattctattacgaaaaaatgctctacttctatatcagatgatcttaaaaaaggtcatataacttcaaatgtatgtatggtcgcagcaagcatactaaagcaaaatccaaaaaatttagctgaagatcttaaaacaaaattagaaaaaattgataaatttgataacgttgaagtagcaggacctggatttataaacatctcattaaatagaaaagattttgtatcaacaattgagtttattaataaaaacaaagattcatttggtagttctgctataggtaaaaaaaataaggtgcaaatagaatttgtgtctgccaatccaactggtcctcttcatgttggtcatgggagaggagctgcctatggtgatgcaattggtagaattcttgaatcaacaggctcaattgttgaaaaagaatactatgttaacgatgctggaagacaaatcgatattctgactgcaagcgttatattaagattaataaaaaatgatataagtaattactttccagccaacggatataaaggtgagtacattgatgaaattggaaaaaaattagacaaaaaagtaaaaatacaagacttcaagtcactttcaatcaaatccagtgaggacccagaagaagaaatagataatatcattcatgaattggaaaaattaaataataattcatggaatctcataaaaaaattctcattaaaagaaattgttaaatcaattgaggatgatctaaaagcatttaatgtaaattttgacaaatggttttatgaatcatcgcttggcaagattggtgatgactcatctgatatagcattgtcagtaaataaactaataaaagatggtcatgcttatgagaaagataaggccatatggctcaatacggacataagtggtgatgataaacatagagttttagtaagagataatgggaaggcaacatattttgcctcggatgttgcatatcataaaaataagattgatagaggctttgataagctaataaatgtttggggagccgatcatcatggatatattaagagaatagaagcatctattgaaaaccttgggtcaaataaaaataaactagctgtaaaacttgttcaatttgcaaatcttttcaaggatggaaaaaaggtcaagatgtccacaagatcgggagaattttttacattaaaaaatcttatcgaagatataggttcggatgctgcaagattttattatttatcaaagcaagctgatcagcacttagattttgatcttgatttagcaaaatcggatagcaaagaaaatattttttattacattcagtatgcgcatgcaagaatcgtttcgcttgaagaaaaggccttagataaattctctgaaattaagagaaatattaaaaatatcagcagtggggattataaagaatgtgacaatctaattcatgaaatatcaaaattcccggatattgtaaataaatctgcaaatacgctgcaacctcatgtcattatctattacttaaaagatttatctcagctatttcatagcttctataacgataatcatgtcttgtctgaatctgaagagaatatgcaatcaattttagagtgtctaatagctgtaaaacaagttatttcaaatggtttaaatttattaggaattactccaatgcaaaaaatgtaag

SEQ ID NO: 300731 - DNA, 1504 bp, Unknown
  Bacterial polypeptide expressing nucleotide sequence isolated from the Sargasso Sea
agaggtcatagaagctgtaaagctggaggatatcgctttagaagtatctttcgcaaagccaggctttattaatatcaaattagccccggattttctaaaacatctggctcccgataaaattacccaggacgaccaagcactaaacattgtcgtcgattattcagccccgaatctcgccaaggaaatgcacgtcggtcacttaaggagcacgataataggcgatagcatggccaatatactggagtcaaaaggccataatgttattcgccaaaatcatgttggagattgggggactcagtttggcatgcttttaacttatatgcatgaacaaggacacgcctcgcatcttttagcggatctagagggtttttatcgctcggcaaaaaagcaattcgattcagacgaagacttcagcaacaggagcagagaggccgtggttaatctgcaaagcggaaaagcatttgaatctgaacactggaaaacctttattgagacctcgatgtctcactgcgaagaaatttatgaaaagttgagagttggactcaatagcagccatgttcgaggagaaagctcctataacgcagctttacccgaagtaattaatatttttaaggaaagcaatttacttgaagagtccgaaggcgctcaatgcatcttttttgagggacagaagtcccctctgatcgttcaaaaggcagacggtgggttcttatacgcgaccactgatctcgctgctattagataccgagttaatgagctcgaggctaatcgaatcatctactttgtcgattcacgacaatctctgcacttccggcaaatattcgcagcaattgagttggccgatttgaatcctaaggcggcttcccttgagcatatggcattcggcactatgctaaatgaagagggtaaaccctttaaaacaagagaaggcgggctaatcaaattaaaacccctgattgaggaagccattagcagggcgactcgcacagttatggaaaagaacccagaaatctcagaacataaggctcaagaaatcggagaaataatcggtgtagcggcaatcaagtacgcagatctctcaaaaaatagaactaatgattatatttttgattgggaccaaatgctgtcgctcgaaggaaatacagcgccatatcttctttacgcttatacacgaatacaaagtttgattaccagaagtggtagaagcgagcgagatcttgtcgagatggttgctccggaagatgagtcagaaagactactgtgtgttgagttgatcaaactcgatgacgtggtggaccaagtggcgaaggacggataccctcatcttctgtgcaaccatctatattctgttgcaaccactttcaaccaattttacgaacaatctgcaatacttaaccagccagaagagacaatgctgcgcagactttcattaactcacgccaccggaagaactctccaaaaaggtttgtctctactgggaatcgatgtcgtcgacaagatgtag

SEQ ID NO: 300732 - DNA, 1366 bp, Unknown
  Bacterial polypeptide expressing nucleotide sequence isolated from the Sargasso Sea
catgggggatatatctactaatatagctttattgtcttccaaagctttaaatagaaatcctagagaattggctgaaaatattggaatacttctcaaaaaaaataattatatagatgaagttaagatcgcaggtcctggttttattaatctatttttaaataaatctatattttatgaatgctgcaaaagtgtcttagatctaaaaaatcattatggtaaaagtgattatggtaaatctgcaatggtgaatatagaatatgtatcagccaatccaactggccctatgcatattggtcatgcaagaggagctgtatttggtgattcattagcaaatttacttgagtattcaggctataatgtgaccagagagtattatattaatgatgctggacagcaaataataaatttagcaagatcagtttatattagatatatagaaatactaaaagataaagaacctatttttggagatgatttataccctggagaatatttaatacctgttgcaaaaagcataattgataagtttggagataaatttatttctttaaaagaattagattggatagaggttttcaaagaatatagtattaatgcaatgatgcatttaataaggaatgatttatctttaataaatattcatcatgataattttgtttcagaaaagagtctaaagtcaaatggtttaatagacaatgtagttgaattattaagtaagaaaaattcaatatatgaaggagtattagaagctcctaaaggacagaaaaatgatgattgggagagtagacctcaactactttttaagtctactttatatggagatgatctagatagacctttgaaaaaggctgataatacttggacttattttgcagctgatgctgcttatcattatgataaatataaaaggaattatacttctataataaatgtatggggtgcagatcatggaggatacataaaaagaattgaaggaataataaaaacagtttcagattcaaaaataaactttgatgtaaaattatgtcagttagtaaatttgagtaaaggtggaaagcctgtaaaaatgtctaaaagggcaggaaattttgtcactatgaaaaatgtaatagatactgttggtcctgacgtattaagatttataatgttaactagaaaaaatgatgcccctttagattttgatttagttaaagtaaaagagcaatctaaagataatccagtttattacgtacaatatgcaaatataagaattaattcactatatgaaaaagcaaaaacacatggcattaatttaagtgatgatttaaataatataaatttcaaattactaaaaaatatttcagaaataaatttaattaaacttata

SEQ ID NO: 300733 - DNA, 1408 bp, Unknown
  Bacterial polypeptide expressing nucleotide sequence isolated from the Sargasso Sea
gatttagggcttgaggatcaatcaacaaatcaaattattaaaaattcgaagctttcattttcggataatctagacaagggtcacttaacaacaaatattgcaatggtcggtgcaggagttgcaaaaaagaatcctaaagagattgctgaatttatcaaaaaaagtcttttagaagatcaatccattaataaaattgaaattgctggaccaggcttcatcaatatcttccttgaacaaagaatatttttagatctgttatgtgaatgcgttcaattctcaaatcaagttccaaaaaaagaaaaacaaaaaattcaggttgaattcgtttcagcaaatcctacagggccactccatgttgggcatggacggggtgctgcttatggagatgcaataataagattgcttaatttcaaaggtcatgatgctacaggtgagtattatgtaaatgatgctggcagacaaattgatatcctaacttgcagcataatcctcagaggaaagaacttatttaatgatgatgactttccagaatctgcatataaggcagaatatattattgatattgctgccaaaattaatcctgaattctttgaaaatttcagtattgatgaattagaacaaagtcaaaatgatcctgaaaagcaaattgatgacctgattgcagtttttaaaaaagagagtccggatctatgggctgaatcaaggaaaattgggttggcttatgtgattgaattaattaaagatgatctgcaaaaatttaatgtcatccatgaacattggttttatgaatctagccttgggagcattgaagataaagaatctctgctaggaaaagccatagaaactgtaaaagagaacaatggttatgaaaaagatggagcattatggcttcaatcgaccaatcatggtgatgacaaagacagggtcttggttagagaggatgggcgaggtacatatttagcatcagacgttgcatatcataaaaataaacttgatagaaactttgatgttatcgttaatgtttggggctcagaccatcatggttatattaaaagaatagagtcatctattgaatctatgggttactcaaaagaaagattaagagttcaattagttcaatttgctaatctttttgaaaatggaaaaaaggtaaaaatgtctaccagatcaggagagttttataagctatcggatttgattgaaaagctgggtacagatgtttcgaggttttattatttgtctaaacaggctgatcagcatcttgactttgatttgtcgctggcaacagaagaaaataaagaaaatatctatttttacattcagtatgcccatgcaaggatttcttctttagaacaaaagtacctattaaataatgatggcctgccttcagagttgatatcaagcgagt

SEQ ID NO: 300734 - DNA, 1708 bp, Unknown
  Bacterial polypeptide expressing nucleotide sequence isolated from the Sargasso Sea
ttgtcttctattagcggtattaaaaacagttctttatctataattaatgataaattttctacaactatcacagaaaatttaaaaaatggtcacttaacgactaatgtatgtatggttgcagcaagtatattgaacctcaatccaaaagagcttgcaaaaggattagaaaaaaaactaaatgaattaaataaatttaaaaaggttgaaatagctggtcctggatttataaacatatccctcgataggaaagacttcgtttcaattttagatagcataaataaacataaagaaaaatttggggaatcaagccttagtaatggaaataaagtacaaatagaatttgtttctgccaatcctacaggtccattacatgttggccatggaagaggagctgcatatggtgatgcactagctagaattcttactgcaacaggttcaatagtcgaaaaagaatactatataaatgatgctgggagacaaatagatatcctgacagcaagtgtaattatcaaaattattcaaaaagatcttgatagtttttctccaattaatacttacaagggtaagtatattgaggatattggaaatgctttaaatagtatagaggttgtttcttaccaagatgtaaaatcaataattgcggatctgcctgaagatgcagaacaagaaattgatcaaataatatctaaccttaaagaaatagacattgtgctttggaatagagtaaaggatttctctctagagaatattcttggattaattgaaaaagacttagaaagttttaatgttaattttgataactggtttaaagaatcttcattggggaatctaaaagattcagattcagaaatctcaactttaataaataaattaaaagaggacgataaagcatataaaaaagatggtgctttatggcttaatactgatataagtggagatgataagcatagagtattgattagggatgatggaagagctacatattttgcatctgatgttgcatatcataagaataaagtagataggaaatttgatactttaattaatatctggggtgctgatcatcatggttacatcaagagaattgaggcatcaatagaggcgttgggttcaaaaaaagaaaaattagttgtaaggctggtccaatttgcaaacctatttaaagatggtaaaaaaataaaaatgtctacaagatctggagaattctttacattaaaagatctcattcaagatattggtaaggatgcagctagattttactatctatccaaacaagctgatcaacacttagattttgatatagatctagctaaatcagatagtaaagaaaacatcttttattatattcaatatgcacatgcaagaattttttcgttagagaaaaagttcaatgaaagccacaaaggcaaagcagttaattcaaaagatatcgaaaataattcatatgataaatttgataaattgatacatgaggtatcaaaatatccaaatatagtgaaaaaagctgcacaaacattgcaaccccacttaattattttttatctaaaggatttatctcaactattccatagttactacaatgataatcatgtgctttctgagtcagatgataatatgagagcaattattttttgcctatctgctgtaagacaaaccatcgcaaatgggctaaatgtaattggcattactccaatgcaaaagatgtaat

SEQ ID NO: 300735 - DNA, 481 bp, Unknown
  Bacterial polypeptide expressing nucleotide sequence isolated from the Sargasso Sea
tatgttcatctcttctattgatggcatcaacaaagattctgctcaaattatcttaaagaaattttctacttctatttctgaagatttagataaaggccacataacaacaaatgtatgcatgattgctgctagtgttcttaaacttaatccaaaagatcttgcaaaagaacttaaaaataatttggatgatttagatatttttaaggatatacaaacagctggacctgggttcattaatataactcttcataagaaagaatttgtatctgttcttcatgaaattattaaagaaaataaaagctttggggaatcaaatattggagcaggtagaaaggttcagattgaatttgtatctgccaatcctacaggcccgcttcatgttggccatggaagaggtgcagcatacggtgatgcgattggaagaatattaaaagccactggatctattgtggaaaaagaatattacattaatgatgcagga

SEQ ID NO: 300736 - DNA, 433 bp, Unknown
  Bacterial polypeptide expressing nucleotide sequence isolated from the Sargasso Sea
atgatagctgatgaaataaagaataaaattcttaaccatattgagaagcacttctctgaagaagaggtttcaatagcctctgcaaagttccaaatagagatacctgatagccctgagaaaggtgatcttacatgcaatattgctttgatattgggaaatattactaaaaataatcctaaagaaatcggtcttgaaattggaaatattttgaaggagctcaatttagtaagttctattgaggttgctggtcctggattcattaacatctttctcaaccattctgggactctaaaaataattaaagatatctttgataaaaatactatcagagaggaagaggattcaaaaaaaattcaagtcgaatttgtctcagcaaatccaactggtccacttcatgttggtcacggaagaggagctatttatggcgatgtaa

SEQ ID NO: 300737 - DNA, 1547 bp, Unknown
  Bacterial polypeptide expressing nucleotide sequence isolated from the Sargasso Sea
tatgagaaacataaatggttatttaaagaatataatcggagcagaattttcgaaaatatttaatgtttcgaatgaaactatagagaagagttcttttgtagttgaatacccaaaaaacaaatctgatggtgagctaagtacaaatatttgtatggttcttgcaaaagagatatcagcaaatccagtagaggcagctaaaactctcattaactcattagagaaaattgaggactttgagatgttggaagttgcaggtccaggctttttaaattttaatatttctaaagatacttggtttaaatttttaagtcagctgctagaaacgaacttgctctttaatgaagaaattggtttaaataaaaatataaatgtcgaatatgtttctgcgaatcctacaggtcccttacatatcggtcattgtagaggagcggtatttggtgatgtactgtcaaatctacttaaagttacaggtcacaacgtaacaaaagaatattacataaatgatgcaggtactcaaattgatacccttgcaaattctacaattattagaataaaagaaatcatcaatagcaaaagcgaagaaaattatccagatgatttttatcctggtgaatatctaatcaatattgctaaaaaaataatagacaaatacggtacatctattctagaaagcgataatcacttttcaactataaaaagtgagtgtgtaaatttactattagaaaatataaaagaagacttaagtaaattatctattaatcaggatatttttgtttcagaaaaagaattaataacccaaggtaaaatcgacaaaaccatagatgagctcaaaaatatgaatttaatctatgagggtattttagataagcccaaaggtaaacaaattgaagattgggaaccacgaaagcaattattatttaaatcatctgaatatggagatgaaatcgatagaccattacaaaaatcagatggtgagtggacttactttgcaaacgatattgcctatcattatgataaatacttaagaggatcgactcatttaatcgacatattaggtgctgaccatggcggatacattaagagaatgagcgcttcgatacaggctctaacaaataacaaagcaagatttacagcaaagttatgtcaaatggtaaaacttatcagtgatggaaaggaattaaaaatgtcaaaaagatctggtgacttcattaccttaagtgatttagtgaaagaagttggcagtgatagtataagatttatgatgatgtacagaaaaaatgaagcacccttagagtttgattttaaaaaagtaactgaacagtctaaagaaaatccagttttttatgtacaatatgctcatgcaagaatttcgtctgtattaaacaatcttcattctcaaaatattaaattaaatttagagaattttagtgaatgcaatttttctgaactaaatgatctttctgaaatatctcttttaaaaaaatcctggattacagtaatgtcattaatacgtcagtttctctatttgagccacatcgaattgcata

SEQ ID NO: 300738 - DNA, 1747 bp, Unknown
  Bacterial polypeptide expressing nucleotide sequence isolated from the Sargasso Sea
catgaaatcacatatccaatcattacttgaacaaactatcgaatcctttaaacaacaaggtattttacctgcggattttgaggcccgaattcaagtagatcgaaccaaggataagagccatggcgacttggcaaccaacgtagccatgatgctaaccaaggcaacaggtaaaaatccgcgtgaattagcacagctgatcatcgacaaccttcccgcctccgcctatgtggcaaaagttgaaattgcaggcccaggttttatcaacttcttcatcgatgacagcgcactggctaaccaattacaagccgcgattggcgatgcgcatttagggatcaaattacccgcaccacaaactatcgttgtggattattcatcacccaacctcgccaaagagatgcacgtaggtcacctacgttcaaccatcatcggcgatagcgtggtgcgcaccctcgagtttttaggccacaaagtgatccgtcaaaaccacgtgggcgactggggcacccaatttggtatgttgctggcttacatggaagaattacgtgcagccaatggcgaacaagcccaattagagttatcggatctcgaaaccttctaccgcgccgccaaactgcgtttcgacgaatcggctgagttcgcgacccgcgcccgtcagctcgtggttgcactgcaatccggtgatgagtactgcaacaaactgtggcgcgaatttaacgatatttcgctaagccattgccacgaagtgtacgagcgtttaggggtgagtttaacccgcgccgacgtgcacggtgaaagcgcctacaacgccgatttagagcaagttgttaaagatttagatgcccaaggtttattgaccgaaagcaacggcgccaaagtggtcttccaagaggccttccgcacaaaagaaggcgaaccactgccagttatcattcaaaaagccgatggtggttacctgtacgccacaaccgacttagccgcgatgcgttaccgctcaagtgtgctcaaggctgaccgcgtgctgtactttgttgatttacgccaagcacttcacttccagcaagtgtttagccttgccaaactggccaagtttgtccgcgaggatatgtcactcgagcacttaggctttggtactatgaatggcgaagatggccgtccgttcaagacccgtactggtggcgtggtgaaattagttgatctgctcgacgaagccaacagccgcgcgctggaattagttcgcagtaagaatccagatatggatgaagcgacacttgcagagattgcccgcgtagttgggatcagcgcggtgaagtatgctgatctgtcgaaaaaccgtaccagcgattacatcttcagcttcgagcaaatgctgagctttgaaggcaataccgcgccttacctgttatacgcttacacccgtgtcgctggcattttcaagcgtgcaaccgatgttgacttaagccaagccaaaatcgtactcgaccacgaaaaagagaaagatctaggcaacaaactggcgcagtttggtgaaatcctaagccgtgttatcgacaaaggccaaccacatgtgctctgcggttacctctatgaattagcaggggctttctctagtttctatgaggcctgcccagtgcttgcagccgataacgacgagcaaaaacacagtcgtttactgctgtcacaactgacggcgagcactctgcaaaaaggcctaaatctactaggtatcgaaaccctagaacggatgtaa

SEQ ID NO: 300739 - DNA, 1594 bp, Unknown
  Bacterial polypeptide expressing nucleotide sequence isolated from the Sargasso Sea
attgaaagaaactataacagaaaaactcaccgatatagtcattaataaatttgggaagaaatatgcttcgttcatagaggtaagtagggtaacaaaatctcatattgatgctgatttctattctaacattgctatgaaacttgcaaaatttctgaaacaaaatcctgccagtattgctagagatataacagaggcgattgcggagttagatggtatttccgtatcagttgcaaaaccgggttatataaattttcaaattaataaaaatctaaaaaataatttagtttatgaaattgtcatgactgatgatttactagcatcttttaaagttgaaaatccaaaaaaaattcatcttgaatttctatctgcaaatcctaccggtcctctgcatgttggtcatggaagaggtgctatatttgggaatgtccttaaaaaattccttaaagtccaaggtcatgatgtccatagtgaatattatgtgaataatgtaggtaatcaaatgaggaatttatgggaaagtgtaaaacgaaaacattcaggggatgaggtagattcggatgagaatgatttatatgttggggattacataaatgatgttcacgctgctatgtcaaaatcaataaaagatgatttcgaaaattgtaatgagagagaagcaataaacattttgtgcgatatcatgattagcaaatttataaaacctgatttggattatttagatataacttttgatgagtggtataaagagagtaatctcgttgaagacaatagtgtcaaaaatatgatcgagaaattaaaaaattcaaaagatgcagtggagattgatggtgctttaatgctgaaagctgacgagttacgagctatgattaaatctaatggagatttaacatactttgcatctgatttagcctatcatgataaaaaactcaataattatgaattagtgatagatatttggggcgcagatcatcatggatatgttccaagaattagagaaggattaaaaaaacttggacatgacgatagtaagcttctagtaaaacttatacagtttgcaaacttgtataaaaataaagagaaaatatcaatgtcaactaggaaaggtacatttgtgactttaaaaaaactagctgatgaaattggtattgatgccatttatttcttttatcttacgaagaatagcaatcaacatttagattttgatttagatgtggctgtctctcaagataagaataatccagtctattatattcaatatgctcatgcaagaatagaaaagatattaaaccaagttggctcaatagaaaatatacaatttaatcctgaattaattacgagtagagatgatgtaggcttaattaataaattaaatcaatataaagatatttttgagaaatctcttcttaaccttgaacctcatttgttagctaattatttatatgatttagcttcagaatttcatagttattattcaaagataagaattattactgaagatataaactatagtagggtttaccttatcaactctgtccaaaaggttttgaaaaatggactagatctactcaatgtaagtgccccgacaaaaatgtga

SEQ ID NO: 300740 - DNA, 1353 bp, Unknown
  Bacterial polypeptide expressing nucleotide sequence isolated from the Sargasso Sea
gagaataaagaaaaagagcatggagacttagcgtcaaatatcgctctagtgttagctaaaccacttggcaaaaatcccaaagaaatagcggatcaaattaaagctaatttttttacagatgaagatataacaaaagtcgaggtagctggaccaggttttattaatttcttcttgtcaaagaaatctcatggatctgtgcttaaagagatctcggtaaaaaaggataattatggttcatccaaatcaaataataaaaaagtattaatagagtacgtttcaagcaaccctactggtccgttacatgtagggcatggaagaggagctgtttttggatcagttctcgctaggctcctaagtgaagcaggatttaaagttgatgaagaatattacgtaaatgatttcggcagacagatgaatattctagctgcgagtttgtggataaggtacgcacaaattttcaatagtgagttaaagatgtttaaaaatggttatcaaggcgagtacttgaaatccatagctcaacaattaaaggaacagaagaaagatgggctttttttgagtgatctagaattaaatgaccttgacagggataaacaagatgatgaaagttttacagattcagttattgaagcaattagatctatgcttggagatgaatttatatttattagagattttgctcttcaaaaaattctagacttgattcaggtcgatttgtctgagtttggagtaaaacataataaatggttttcagaatcgtctctctataagagcaaacctggttcagaaagtattgtagataaagccatcaatgaacttgagtccaaaggatttatttatgagctagaaggtgccacttggtttaaatcatctgcattaggagatgataaagacagggtactaaaaagaggtaacggagaatatacttacttcgcctctgatgtagcctatcatttaaacaaatatgatagagggtacgacagaatcattaatatttggggctctgatcatcatggttatattccaagagtcagggctgcaatggaggctagtgaaaggaatattgaaaaattagaggtagtttttattcaattcgcgaacctgataaggtctggtaagaaagtacccatgtccacaagaagtggcgagtttattacactcaaagagttaattgatgaggtgacaactgaggcagctaggttcttctatattaataggaagtcagaccagcatttagatttcgatttggatcttgcaaaagaacaatcgaaggacaatccactctactatattcaatatgctcatgctcggatttgcagtgttttaaataagtcagatatagatacagataag

SEQ ID NO: 300741 - DNA, 1023 bp, Unknown
  Bacterial polypeptide expressing nucleotide sequence isolated from the Sargasso Sea
ttagccggtcctggattcataaacattcacctaaaaaatacggagttagtcaaaagagcaaatgccattatcaatgacgaactcccattaattcccgaaactgaaaagttattgaggatcgccgttgattattcatccccgaatctagcgaaggaaatgcatgtcggtcatctgcgcggcactataataggtgacgcgatagtcagagtgcttgaaaaactgggacatgaggttgttagacagaatcatgttggagactggggtactcagtttggaatgctgatttgttatttacaagaattacaggaggaaggcatcgaagcccagccgtccgctctcgctgatctagaaaaattctataaagccgcaaagtcacggtttgattctgatgaggaatttgcaaaaagatcgcgtaaagccgttgttgaacttcaggctggaaattctcagtcactcgcagcttggaagcagttcatcgaagagtctctaaatcactgtgacgaaatttactgcaaattgaatgtcactctcaatagagcacatctcgatgctgaaagtaaatataacgatgatctacctggagtcattcagatacttgaaaaaaaaggcctgttgtcagaatcagaaggtgccaaatgtgtatttttgcctgaatttattggcaaggatgggaacaatctaccggttatcgtgcaaaaatctgatggtggctatctctattcaaccaccgacttggcagctgttatttataaatcagacgatcttcaagttgatagagcactctacgtcgtagatgcgagacagtctctccattttcagcaggtatttgcggtagcaaaagaagcagaattcgctaaagaagagatatcgttagaacatatctcctacggcacaatgatggattcaagtggcaggccattcaaaaccagatcgggcgatacagtaaaattaatcgaactcctcaatgagtctgtgtctagagcctacacattagttacagaaaaaaaccctgatttaacagaa

SEQ ID NO: 300742 - DNA, 1242 bp, Unknown
  Bacterial polypeptide expressing nucleotide sequence isolated from the Sargasso Sea
gttgaatttgtttcagcaaatccaactggtccacttcatgttggtcatggaagaggagctatttatggcgatgtaatctcaaaactacttgaaaaaaaaggtcatgaagttcaaaaggaatactatgtcaatgatgcaggaagacaaatagatattcttacggctagtgtatatttaagagccattgaaatagaagataatctttttcctgaaagtgcttacagaggagaatatataaaggaaattgcaaaaaatgctgatttacaggaagctgttaatattgatgatctttttaaaagtcttcccgaggacgatgaagagaaaatagataaaattatctcgcgtctcaaatctgctagtgagaaagactggcaatcaattaaaaaagtgtcactagagagtgttctttcaacaatagaaaaagaccttgaagattttggcgtaacttttgataaatggttcttagaatcatctttacttggtgctgattcaaaaattgatgcagctgtccaacaactaaatacaaataatctaatagataatcgagatggaaatatctggtttaaatcttcttattttggcgatgataaggatagagttttgataagagctgatggaagacaaacttacttcgcatctgatgttgcttatcataaagataaattagatagaggttttgatgaaattataaatatttggggctccgatcatcatggatacataaagagggttgaagcatctttggaaggcttgggctatgacaaaaataaactatctgtgaagcttgttcaatttgcaaatctaattaaaggtggttcaccagttaagatgtctacaagaagtggagagttttactctctcgaggacttattaagtgatgttggctctgatgttgctagattttattatctttcaaaacaaactgatcagcatttagatttcgatctagacttagcagtctcaagcaagaaagaaaatatgtattactacattcaatacgcacacgctagaatatgctctcttgaaaaaaaagctggcttaaaagattttctagcagaagatatttctgaagaccatgtagatatttgctcaaatcttattcatgagatctcaaaatatccaaatgtacttgaaaaaacctgtaataatctctcaccacacttattaattttttatttaaaggatttagcttcaatttttcataatttttataacgataacaaaatattagacaagtcagga

SEQ ID NO: 300743 - DNA, 523 bp, Unknown
  Bacterial polypeptide expressing nucleotide sequence isolated from the Sargasso Sea
atgattgaattaccgtctggtattaatattaataatcttatcgatgatataagaattttcagctggcaagcagctgatattttgctttattactctaaattgttagaaaataaagatcataagattaatatactcaaaaataataatgaagacgatcctgttactttggcagatttaaaagttaatgaattaattattaaaagaataaatgaaaaatataaaaatattaattgggatattttaagtgaagaaaatgtaaaaatctcttcagaaattcttgatagtaagactgactggatttgggttcttgaccctcttgatggaacgaaggatttcatccaaggaacaggcaattatgcaatgcatttggcattgaacttcaaagaaaaaccctatattgggtttgttttaattcctgacaagaatcaattatggatttcagatggaaaaaaaacatggtgtgaaagaagagatgggtcaaaatatgaaaccattcttttaaaaaatagaaatcttaatgaaa

SEQ ID NO: 300744 - DNA, 769 bp, Unknown
  Bacterial polypeptide expressing nucleotide sequence isolated from the Sargasso Sea
atgattgaattaccgtccggtgttgatattaataatcttatcgatgatatacgtattttaagctggcaagcagccgatattttgctttattactctaaattgttagaaaattcagatgataagagaaatatactcaaaaataacaatgaagaagatcctgtcactttggctgatttaaaagttaatgaattaattattaaaagaataaatgaaaaatataaaaatattaactgggacattttgagcgaagaaaatgtgaaaatttcttcaaaaatttttgatagtaagagagactggatctgggttcttgatcctcttgatggaacaaaagatttcatccaaggcacaggtaattatgcaatgcatttggcattgaactttaaacaaaaaccatatataggttttgttttaattccagataaaaatcaattgtggattacagatggaaaaacaacttggtgtgaaaaaagagatggcacaaaatgtaaaccgactctattaaataataagaatcttcaagaaatgactttagtaacaagtaaaaatcatggaaatcaagttttgagaaatttaattcagaaaattaatttttgcaaagtacaaataatgggtagtattggatgcaaaatagcatctatagttcagggagaaagtgatatttatatatgtctaagtttgcccggtaaaagctcaccaaaagattgggattttgctgcccctgattcaattttgaaagcagtctggtggagcaattacaaatttagataat

SEQ ID NO: 300745 - DNA, 658 bp, Unknown
  Bacterial polypeptide expressing nucleotide sequence isolated from the Sargasso Sea
atgaagaaacgaatactaaccggcatcaggccaacaggtaaactccacctaggacactatgtaggagccttggaaaactggattcgactacaagatgaatacgactgtttcttcctaatagcagactaccaagcacttggtgaccatatagacgaaatggaaaatatcaaaactgctgttcgtgatgtagtccttgactggctaagtgttgggttaaatcctgagcagtcaaccttcgttgtgcaaagttatgtgccggaacatgccgagctcgccatgctactatctatgttgactccacttggaatgctagacagaaaccctacattgaaatccgagcgagagcgtatttcaaatactagtctgtctgttggattttacacttaccctgtaagccaagttgcagacatattgctgcccaaggcccatctagtacctgtaggagaagaccaattacctcatatagagatgacaagggaaatcgcaaggagatttaataaccgttacggggacgtctttcctgaaccagatagcctggttggacgagtagcaaggttaatgggaacagatggacaggcaaaaatgagcaaaagtataggcaatgtaatatacctatccgacgaaccggaaacagttacaaagaaaatcatgtcaatgt

SEQ ID NO: 300746 - DNA, 127 bp, Unknown
  Bacterial polypeptide expressing nucleotide sequence isolated from the Sargasso Sea
aatgataaaaaaaaacgaaaaattagctttttctggcgtacaacctactggaaatttacatattggaaattatttaggggctatgaaaaattttgttaacttacaaaacaaaatgtcttgtatatat

SEQ ID NO: 300747 - DNA, 733 bp, Unknown
  Bacterial polypeptide expressing nucleotide sequence isolated from the Sargasso Sea
aatgattgaattaccgtctggtgttgatattaataatcttatcgatgatataagaattttcagctggcaagcagcagatattttgctttattactctaaattgttagaaaattcagatgataagacaagtattcttaaaaataataatgaagaagatcctgttactttggctgatttaaaagttaatgaattaattattaaaagaattaatgaaaaatataaaaatattaactgggatattttgagcgaagaaaatgtaaaaatttcatcaaatatttttgatagtaggtcagactggatctgggttcttgatcctctcgatggaacaaaagatttcatccaaggtacgggcaactatgcaatgcatttggccttaaactttaaacaaaaaccttatcttgggtttgttttgattcctgataaaaatcaattatggatttcagacggtaaaaaaacatggtgtgaaaaaagagatggatcaaaatatgaaccaattcttttaaaaaatagaaatcttcatgaaatgactttagtaacaagtaaaaatcatggtaatgaaattttgaaaaatttaattcaagaaattaatttttgcaaagtacaagtaatgggtagcattggatgcaaaatagcatccatagtgcagggagaaagtgatatttatatatgtcttagtttgcctggtaaagctcaccaaaagattgggattttgctgcaccagagtctatcttga

SEQ ID NO: 300748 - DNA, 94 bp, Unknown
  Bacterial polypeptide expressing nucleotide sequence isolated from the Sargasso Sea
tatggctgcagatatcttactatatgatgctcaggttgttcctggttggaaaagaccagcttcaacatttagaaatcacccgaaatgttgctag

SEQ ID NO: 300749 - DNA, 430 bp, Unknown
  Bacterial polypeptide expressing nucleotide sequence isolated from the Sargasso Sea
atgattgaattaccagctggtgttgatattaataatcttatcgatgatataagaattttcagctggcaagcagcggatattttgctttattactctaaattgttagaaaattcaaatgataagaagatcatactcaaaaataataatgaagaggatcctgttactttggctgatttaaaagttaatgaattaattattaaaagaattaatgaaaaatataaaaatattaattgggatattttgagcgaagaaaatgtaaaaatttcttcaaaaatttttgatagtaagactaattggatctgggttcttgatcctcttgatggaacaaaagatttcatccaaggaacaggcaactatgcaatgcatttggcattgaactttaaacaaaaaccttatcttgggtttgttttgattcctaataaaaatcaac

SEQ ID NO: 300750 - DNA, 265 bp, Unknown
  Bacterial polypeptide expressing nucleotide sequence isolated from the Sargasso Sea
gccataaaaaattttgttagtcttcaaaaagaatacgaatgttttttttgtgttgttgatttacatgctattacagtttggcaagatccaaaagtgttagcaaataaaacacgagaagtaaccgctgcctttattgcttctggtattgatccaaatcaaaataatattttgtgttcaatcacaagttcctcaacatgcacaacttggatggttgttcaattgtgttgcgaggatgggatggttaaaccgtatgacgcaatttaaa

SEQ ID NO: 300751 - DNA, 154 bp, Unknown
  Bacterial polypeptide expressing nucleotide sequence isolated from the Sargasso Sea
atttcttcattttttcatcgtagatttacatgcaattacagtacctcaggaaccatcaaaacttaaatcttccactcatgaggttactgctgcaattattgcttcaggtatagatattgataagtcaattcttttcaatcaatcctcaggttaa

SEQ ID NO: 300752 - DNA, 536 bp, Unknown
  Bacterial polypeptide expressing nucleotide sequence isolated from the Sargasso Sea
cgctcagcagcgcatcaatgcgcgtttcggcggcaaggacacgccggtgctcaaagtgcccaaaccgctgatcctcaaggagggggcacgggtgatgagcctgacggatggtcgcagcaagatgagcaagagcgatcccaacgaggggagtcgcatcacgcttttggaccctccggagctgatcaccaaaaagatcaaacgcgccaagaccgatccagagcgtggtctcgaattcggcaaccccgatcgaccggaaaccgacaacctgcttgggctctacgcaatcctgaccggcaaggggcgggagcaggccgccactgaatgcgctgagatgggttggggacagttcaagccgctgctggccgaagccaccgtgagcgcgctggagcccatccaggctcgccaccgggagctgatgcaggaccccacagagctcgatcaggtgctgaaaacaggccgtgagaaggccgaaaccgtggccaacgccacgcttgaacgggttcgggatgccttgggtttctcccggccagcctgat

SEQ ID NO: 300753 - DNA, 600 bp, Unknown
  Bacterial polypeptide expressing nucleotide sequence isolated from the Sargasso Sea
gggatattttagcgtacaaggccactcatgttcctgtgggagaggatcaaaaacaacacttggagttgtgtagggaaatggctgcaaaatttaacaatgactttggtatagatttttttcctatagttgaacctctaattataggccctgctacgcgagtaatgtcgctgaaaaacggtttaaataaaatgagcaagtcagctgcatccgatgggtcaagaatttctcttacggatagcacagatgatatttcaaagaagatacgtaaagctaaaacggataatatagaaattcctgctgaggttcaaaatttagagggacgacccgaggtcaagaatctagttggtatttatgctgctttagcgggttgttcagtcgacaaagtactagaaatctttggtggtgggggccatgctgttttcaaaaaggaattagaagctttggtgataggtacgttgacaccgatcagggaagaaatgaaaaaattattggcagactcaagttttatagaccagactctgaaagagggagcaaccagagcaaaggagatggctcgccctataattgaggatgttcacaaaatcgtagggtttttataaa

SEQ ID NO: 300754 - DNA, 695 bp, Unknown
  Bacterial polypeptide expressing nucleotide sequence isolated from the Sargasso Sea
gatgattaaattaccttctggactagatattaataatcttatcgatgatataagaattttcagctggcaagcagcagatattttgctttattattctaaattgttagaagattcggatgataaaaaaaatatattaaaaaatgataatgaagacgatcctgtaactttagctgatttaaaagttaatgaaattattataaaaagaataaatgaaaaatataaaaatattaactgggatatattgagcgaagaaaatgttaaaacttcaaacaccttttttactaagaatgattgggtttgggttcttgatcctcttgatggaactaaagattttatccaaaggacaggtaattatgcaatgcatttggcattaaactttaaacaaaaaccatgtatcgggtttgttttaatcccagataaaaatcaattatggattacagatggaaaaaaaacatggtgtgaaaaaagagatggtacgcaatataaaccaaatcttttaaataaaaagaatctgcaagaaatgactttagtaacaagtaaaaatcatggaaatgaaattttgaagaatttaattcaaaaaattaattttcgcaaggtcgaaataatgggaagcattggctgcaaaattgcatccatagttagaggagacagtgatatttatatttgtctaagttttgcagggaaagctcaccaaa

SEQ ID NO: 300755 - DNA, 541 bp, Unknown
  Bacterial polypeptide expressing nucleotide sequence isolated from the Sargasso Sea
aatgaagaaacgaattctaacaggaattactacaactggtatacctcatattggaaactatgttggcgcaataagaccagctctttcaatggtaggagattcagacgaatctttcttttttttggctgattatcattcgattataaaaaataatgatccaactgatattttaaattcagttaaaagtattgcccttgcatggttatcctgtggtcttgatccaaataaatcctacttttataaacaatctgatgttccagaaattatggaattaagttggattttaaattgtgttactgccaagggtctgatgaatagggctcatgcatacaaatcagcaacttcactaaatgataatgatcctgataaaggaattacaatgggcttattttcatatcctgtattaatggcagctgatattttaatgtttgatagcacacatgtgccagttggattagaccaagttcaacacctggagatgacaagagatattgcagcaagatttaatcatttatataaatctgttcttactcttcctgaa

SEQ ID NO: 300756 - DNA, 130 bp, Unknown
  Bacterial polypeptide expressing nucleotide sequence isolated from the Sargasso Sea
aatgagtaaattaccttctggtttagatattaataatcttatcgatgatataagaattttcagctggcaagcagcagatattttactttattactctaaattgttagaagattcagatgataaaaaaaaa

SEQ ID NO: 300757 - DNA, 88 bp, Unknown
  Bacterial polypeptide expressing nucleotide sequence isolated from the Sargasso Sea
aattttttcaggtgttcagcctaccggaaatcttcatctcggaaattattttgggagcaatcaaaaattttgtaaaactcaacaatga

SEQ ID NO: 300758 - DNA, 405 bp, Unknown
  Bacterial polypeptide expressing nucleotide sequence isolated from the Sargasso Sea
aatgattgaattgccatctggtgttgatattaataatcttatcgatgatataagaattttcagctggcaagcagcggatattttgctttattactctaaattgttagaaaattcaaatgataagaagaatatactcaaaaataataatgaagacgatcctgttactttggctgatttaaaagttaatgaattaattattaaaagaattaatgaaaaatataaaaatattaattgggatattttgagcgaagaaaatgtaaaaatttcttcagaaatttttgatagtaagactgattggatttgggttcttgatcctcttgatggaacaaaagatttcatccaaggaacaggcaactatgcaatgcatttggcattgaactttcaacaaaaaccttatcttgggtt

SEQ ID NO: 300759 - DNA, 379 bp, Unknown
  Bacterial polypeptide expressing nucleotide sequence isolated from the Sargasso Sea
ttatgtagagatatagctcaaaaatttaataacgaatataaatgtacagatttcctgagacctcctgagcctctcatacaaaaaaatttttcaagaataatgagcttgaaagacggtacaaaaaaaatgagtaagtcagatattgctgagggtagtaggattaacttaacagatacagatgatcaaattattaataaaataaaaaaagcaaaaacagataatgatgctttgcctggaaaagaagaagaacttatgggcagacctgaagcagaaaatttgatgggtatttattctagcttaagtaatcaaaatattactgatacattaaacgaatttgagggaaaaaatttttctgatctaaaaaataaactatctgata

SEQ ID NO: 300760 - DNA, 541 bp, Unknown
  Bacterial polypeptide expressing nucleotide sequence isolated from the Sargasso Sea
ttagaactttgtagggatatagctcaaaaatttaataatgattttaaagctgaagatttttttaaaattccagaacctttaattcaaaaacaattttcacgaataatgagtcttaaagatggaaccaaaaaaatgagcaaatctgatttatcagatttgagtcgaattaatttaactgatgaaaaagatcaaattattaacaaaataaaaaaagcaaaaactgatcctttaccaatgccatcaagtgttgaagaattagaaaaaaggtttgaggctaaaaatttaataggtatttattcaagtatatctggatcaactttagaaaaaaccattgaaaaattttctggaaaaaacttttctgattttaaggaaaacttatttcaagttgtagttgataaaattactcccatttcaaccgaaataaaaaaattattaaatgaaaaagattatttagataaaattctcttagatggatgcaaaaaagctgacaatattgcctctaaaaagatcgaaaaaattcatgaaatagtgggtttttaaa

SEQ ID NO: 300761 - DNA, 572 bp, Unknown
  Bacterial polypeptide expressing nucleotide sequence isolated from the Sargasso Sea
aatgatcaagttaccttctggtgtagatattaataatcttatcgatgatataagaattttcagctggcaagcagcagatattttgctttattactctaaattattagaaaattcagatgataaaataaatatacttaaaaataataatgaagatgatcctgttactctggctgatttaaaagttaatgaaataattattaaacgaataaatgaaaaatataaaaatattaactgggatattttaagcgaagaaaatgtaaaaatttcttcaaaaaattttgatattgataatgattggatatggattcttgatcctcttgatggaactaaagatttcatccaaaaaacaggcaattatgcaatgcatttggcattgaattttaaacaaaaaccatatattggttttgttttgattccagataaaaatcaattatggattacagacggaaaaaaaacatggtgtgaaaaaagagacggatcaaaatatgaaccagtgctcttgaaaagtaaaaatcttaaagaaatgactttagtaacaagtaaaaatcatggaaatgaaattttgaaaaatt

SEQ ID NO: 300762 - DNA, 407 bp, Unknown
  Bacterial polypeptide expressing nucleotide sequence isolated from the Sargasso Sea
aatgaaaaatagaattttaacaggtattacaacttcaggcaccccacacttaggaaactatttcggtgctataagaccaagccttgaattagctaaagaatctaatgattctttcttttttttagcagattatcattcaattattaaagtaaataatccccaagaggtcacttcatccattgagaatattgctcttgcatggctttcgagtgggttagatactaaaaattcttatttttacaagcaatctgatattagagaaatattagaattaagttggatacttcattgtgtaacagcaaagggattaatgaatagggcgcatgcttacaaagcattaaaagaaaataatgatgacgacaaaggaataaatatgggtttattctcttatccaattttgatggctg

SEQ ID NO: 300763 - DNA, 307 bp, Unknown
  Bacterial polypeptide expressing nucleotide sequence isolated from the Sargasso Sea
aatgcggattctttcaggaatacagccttcaggaaacttacatattggaaactattttggtatgatgaagccagttattgatcttcaagatgaaaatgaaacatttctttttatagctaattatcatgcaatgacaactgttcacgattcttttattttaaagaatatgactatgtctacagctttagattttctagcctgtgggcttaatcctgaaaagactgctttttatagacaaagcgatattcctgaagtaaatgaattggcttggtttttatcaatattgactcctatgggattactagaa

SEQ ID NO: 300764 - DNA, 673 bp, Unknown
  Bacterial polypeptide expressing nucleotide sequence isolated from the Sargasso Sea
ctggcaagcggccgatattttgctttattactctaaattgttagaaaattcagacgataaaagtaaaatactcaaaaataatagtgaagaagatcctgttactatggctgatttaaaagttaacgaaataattattacaaaaataaatgaaaaatataaaaatattcactgggacattttaagtgaagaaaacgttaaaagttattcagaaaaatttgatagtaagaatgattggctctgggtgctcgatcctcttgacggaactaaagattttatccaagggacaggtaactatgcaatgcatttggcgttgaactttaaacaaaaaccttatctagggtttgttttgattccagataaaaatgaattatggattgcggatggaaaaaaaacatggtgtgaaaacagagatggatcaaagtatgaaccaattttcttaaataataagaatcttcaagaaatgactttggtaacaagcaaaaatcatggaaatgaaattttgcaaaatttaattaagaaaattaatttcaacaaagtcgaaatcatgggaagcattggttgcaaaattgcatctatagttagaggagatagtgatatttatatttgtttgagtttaccggggaaaagttcgccaaaagattgggactttgctgcaccagaatctattataaaa

SEQ ID NO: 300765 - DNA, 456 bp, Unknown
  Bacterial polypeptide expressing nucleotide sequence isolated from the Sargasso Sea
aaggtgctcgggtcatgagcctcaccgatgcccgcagcaagatgagcaagagcgatcccaatgaaggaagccgcatcacgcttctggatccgccggaggtgatcaacaagaagatcaagcgggcgaagacggatccccagcgaggtttggagttcggcaaccccgatcggcctgaaacggacaacctgctggggctctacgccatcctcagcggctgcggccgtgacgccgccgctgagcagtgtgccgagatgggatggggacagttcaagcctctgctagctgaagccaccgtggcggcactggaaccgattcagcagcgccaccgcgaactgatggcggatccagcggagctcgaccgcgtgctgagcagcggccgtgaacgcgcagaaaccgtggcgcagaacaccctcgaacgggtgcgttccgcgatgggattcgctcctcgagcctaat

SEQ ID NO: 300766 - DNA, 538 bp, Unknown
  Bacterial polypeptide expressing nucleotide sequence isolated from the Sargasso Sea
agaattatctagggatattgcacaaaaatttaatttagattttaatgttcgagattttcttaaagctccagagcccttaattcaaaagaatttttcaagaataatgagtctaaaagatggaaaaaataaaatgagcaaatctgacccatcagactcaagtagaataaatttaaatgatgataaagatcaaattgtaaataaaattaaaaaggcaaaaactgataatgaagttttgccgagcgatgataaaaatttaagtaataggcctgaagttgaaaacttattaggcatatattcaagcttaataggtcaaagtttaaaaaactcaataaatgaattcagtggaaaaaatttttccgaattcaaaaaaaagctagcagaaattgttgtggaaaaaatttcaccaatatctaatgaaattaataaattacaaaaagatattaattatattgataaaatccttcaagaaggtggtaatagagcagatttaattgcttcaaaaaaagttggagaaatgaagaaaataattggattttaa

SEQ ID NO: 300767 - DNA, 865 bp, Unknown
  Bacterial polypeptide expressing nucleotide sequence isolated from the Sargasso Sea
atcgatgatataagaattttcagctggcaagctgcagatattttgctttactactctaaattgttagaaaattcagattccaaaacaaatatacttaaaaataataatatagaagatcctgttactttggctgatttaaaagttaatgaattaattattaaaagaataaatgaaaaatataaaaatattaactgggatattttgagcgaagaaaatgtaaaaatttcttcaaagatttttgatagtaagtctgattggatttgggttcttgatcctcttgacgggacgaaggactttatccaaggaacaggtaactatgcaatgcatttagcattgaactttaaacaaaagccttatattggatttgttttaattccagataaaaatcaattatggatcactgatggagaaaaaacttggtgtgaaaaaagagacggatcaaaatataaaccaattgttttaaagagtaaaaatattcaagacatgaatttagtaacaagtaaaaatcatggaaatgaaattttgcaaaatttaattaagaaaattaatttcaacaaagtcgaaataatgggaagcattggctgcaaattagcatctatagtcaggggagatagtgatatttatatttgcctaagcttaccagagaaaagctcaccaaaagattgggattttgccgcaccagaatctattttgaagtcagctggcggtgcaattacaaatatagataatgaagaactaacctatggaaaaaattgtttcgaacatggaggcattatagtagctaccaatgataagaatactcatgggagtatttgtctagaaataaaaaaaattatagaggagaatgaaatttatcccctgtaat

SEQ ID NO: 300768 - DNA, 205 bp, Unknown
  Bacterial polypeptide expressing nucleotide sequence isolated from the Sargasso Sea
aatgattaaattaccttctggtgtagatattaataatcttatcgatgatataaggattttcagctggcaagcagcagatattttgctttattactctaaattgttagaaaattcggacgataaaaaaaatattttaaagaataataatgaagaagatcctgttactctagctgatttaaaagtgaatgaaattattatcaaaaga

SEQ ID NO: 300769 - DNA, 133 bp, Unknown
  Bacterial polypeptide expressing nucleotide sequence isolated from the Sargasso Sea
gatgccacaaaaaaatattttttctggagttcaacctacaggcaatcttcatttaggaaattatattggtgcaattaaaaattttgtaaaactacaatctgaaaatgactctaaatgtatttattgtgttgtc

SEQ ID NO: 300770 - DNA, 649 bp, Unknown
  Bacterial polypeptide expressing nucleotide sequence isolated from the Sargasso Sea
atgtcatcagatgaatttgtcgtaacgccatggaatgttgaaggcgacatagattatgacaaattaaccaaacaatttggcactcagaagatttcacctgaaattctatcaaaaataaagaaaatcacaggagaagatcatttcatgttaagaagaggaattttcttttctcatagagatctaaatgtaattttagataattttgaaaaaggtaagaaattcttcttgtatacaggacgaggtccttcaggtaatacacacataggtcacttagttccatgggtttttgcaaaatggttacaagaaaaatttgatgtgaatatctattttcagttaacagatgatgaaaaattttatacaaaatctgacttgacacttgaagacacaagtaaatttgcgttagaaaatgcgcttgactttattgcacttggatttaatccagaaaaaacaaaaattataatcaatactcgaaatatcaaaaaattataccctattgcagctcaagttgcaaaaaaaattaatttctcaaatacaaaagctgtgtttggttttacaaacgataccaacgtcggaatgattttctatacatctttacaatcagcaccatgtttcattgaggatttaccagtgttattccacttggagtaga

SEQ ID NO: 300771 - DNA, 997 bp, Unknown
  Bacterial polypeptide expressing nucleotide sequence isolated from the Sargasso Sea
aatgaaacggattttaacaggtataactccaagtggctatcctcacttaggaaattatataggagcaattaaaccatctctagagctattagatgaaaaatgtgaatcatttttatttatcgctgatttgcatgctcttataaaagtttcagatccagagcagttaaatcaactaacacatggcattgctttagcatggatggcatcaggattggatccacaaaagacttatttctataggcaatccgatgtgcctgaaataacagaattagcctggattctaagctgtgtgactgaaaaaggccttcttaatcgctcacatgcatataaagctgcgatagatattaataaagaaagtggtaaaaaagatactgatgaaggagtttcaatgggtcttttttcttacccactactaatggcttgtgatattttgactcctaatgctactcatgttccagtaggaaaagatcaaaaacaacatcttgaaatagcaagagatattgctgagaagtttaataaaaaatatggtgaggtttttaacatacctgaagctgtcataaatgaagagaaaactgtacttggtacagatggaagaaaaatgtctaaaagttataacaatatcgttcctattctttcttcggagaaggatttaaaaaaatcaattatgacaatagttaccaactcccaagaacctggagagaagaaggattgcaaagataatactcttttctcaatatacagttcttttgccacagatactcaaatagaagatatgaaaaataaatatcaagatggtattggttggggtgatgcaaagaatattgtctttaatgatttaaatgacttgattaagcccattagagacagatatctagagttagagtcaaataaatctgatacagaagagattctacaaaccaatgctaaagaagtaagaaaccatactcagcctcttattaaagaagtgaaagagcttgttggtatcaaaaaactttag

SEQ ID NO: 300772 - DNA, 1033 bp, Unknown
  Bacterial polypeptide expressing nucleotide sequence isolated from the Sargasso Sea
catgcaacaacattcatcactatccattcctgcccaaccagataaagtgctgactggcgatagagccacagggcctttgcatttaggtcattatgttggttcgctgaagcaacgaattgagttacagcatagatttgagcagactattctcgtcgccgatatgcaaggattgacggataacggtcatcagccacaaaaagtggctgcaaatatcttaaatgtggttgccgactatctcgcagtgggcatagatcctgcgaaaacaactatttgcttgcaatcttctatccccgcgttagctgagttgactatgtactatgcaaacttggtttcgattgccagattagaacgtaatcccactgttaaaaatgaaatcaatagcaaggcctttgggcgttcgattcccgcaggatttttgacttatccaattagccaagcggcggatatcacagcgttcaaagccacattgattcccgtcggggatgatcagttgccaatgttggaacagactaatgaaattgtcagaaaactgaaccagattgcgcaggatgaggtgctggttgaatgtcgaccgctgttaagtcatatgacacgtctaccgagtgtggatggaaaatgtaagatgtcaaaaacgatgggcaataccattatgcttggctcgagtgaacaagatatttcgaaggcggtgaaggctatgtataccgaccccacgcatataaatataaacgatcccggtcgagtcgaaggcaacgttgtatttacctatctcgacgcttttcatcctgatcttcaatatgttgctgaactaaagtcccattatcgtgcaggtggattaggggatggaaaaacgaaaacgattttagaggaatgcttacaaagcttacttgcccccattcgtgagcgtcgcgctttgctcttagccgataaggctcagttagtgtcgattcttaaggagggaaccgctaaggctcgcgaagagtcggatggggttttaaggcgagtcaaaactgcctttggtttaaatttattttga

SEQ ID NO: 300773 - DNA, 139 bp, Unknown
  Bacterial polypeptide expressing nucleotide sequence isolated from the Sargasso Sea
gatgtccaaaaaaatattttctggtgttcagcctactggcaatttacatctaggtaacttcctgggtgctataaaaaattttgtggacttaaataaggaaaaagaaaatgagtgtattttttgtgttgtggatttacat

SEQ ID NO: 300774 - DNA, 967 bp, Unknown
  Bacterial polypeptide expressing nucleotide sequence isolated from the Sargasso Sea
atgaaaaaaagaattttaagcggtgcacagccttctgggcaacttcatattggaaattattttggaatgatagaaaggatgattcaatttcaaaatgaatcagaattattctgctttgtagcaaattatcattcgatgacttcaattaatgataaagtcaaacttgaagcaaatactcgagaagcatttattgacctcttagctcttggaattgatccagatcaatcgacattttgggttcaatcacacgtccctgaagtaacggagcttgcttggattttgtcaaactttgcatcagttggtttgatgcagagatcaacctcttataaagacaaaatagccaatggtttgaaaccaaatatgggtctattttcatacccaattctaatggcatccgatattttattatttcaatctgaacttgtacctgttggtaaagatcaaaagcaacatttagaaatgacaagagatattgctatcaaatttaataactcattcggtgaaattttcactatccctgaaatagaaatagataaaagtaatgatattgtaattggaatagacaatcaaaaaatgagtaaatcatataataataccattcctatctttgctgataatgacactataaaagatcaagtaatgaatattgttactgattctgctggtttgaatgagcccaaagataaacatacacctttatttaagatctactcattatttctaaatgatgaatctaagaaagagcttgcagataggtatgatactcctggtttaaaatatattgagataaaaaatgagctaattgaaactatcatctccttttttgaattgcaaagatcaaaaagagagcaactgctcgcaaaccctgatgaggtaaatcaaaaaatgattttgggtcaaaataaagccaagaaaattgctcaaaagacacttcaagaagtgaaaagtgcaactggtttaatataaa

SEQ ID NO: 300775 - DNA, 967 bp, Unknown
  Bacterial polypeptide expressing nucleotide sequence isolated from the Sargasso Sea
atgaaaaaaagaattttaagcggtgcacagccttctgggcaactacacattggaaattactttggtatgatagaaagaatgattcgttttcaaagtgaatctgatttattttgttttgtagcgaattatcattccatgacatcaattaatgataaagctgaactagaagataatactagacaagcattcattgatttgttagctcttggtatagacccagataaatcaacattttgggtacaatctcatgttccagaagtgacagaacttgcttggattttatcaaactttgcatctgtgggtttgatgcaaagatcaacttcctataaagataaaatttcaaatggattaaaaccaaatatgggtcttttttcttatccaattttaatggcatcagatattttattatttcaatctgaaatggttccagtcggtaaagatcaaaagcaacatttagagatgactagagatattgctattaagttcaataacacttttggagaaatctttactatccctgacatcgaaattaatgaaagtaatgatgttgtaattggaatagacaatcaaaaaatgagcaagtcttataataacactattcctatttttgcaagcaacgatatcataaaagaccaagtgatgaatatagttactgattctgctggactgaatgatccaaaagatcaagataccccattatttaagatttattcattatttcttgatgatgaatcaaaaaaagagctttcagatagatataatacccctggtttgaagtatatggacatcaaaaaagaattaatcgagaccattattagtttttttgaatctcaaaaattaaaaagagagaaattagttcttgataatgatgaagtaaccaagaaaatgattttaggtcaaactaaagcaaaagaaattgctcaaaagacacttcaagaagttaaaagtgcaacaggtttaatttaaa

SEQ ID NO: 300776 - DNA, 633 bp, Unknown
  Bacterial polypeptide expressing nucleotide sequence isolated from the Sargasso Sea
aatgaaaagggttttaagcggtattcagccgtcaggtcagcttcatttaggtaactattttggaatgatgtcacggatgattaaatatcaaaatgaaaatgatttattttgttttatagttaattatcatgctttaacaacaattcaagataaaaaacttctgatgaaaaatacactcaatgcggcaatggattttatgtcattgggtttagacccaaaaaaatcaactttttggatccaaagcgatgtacctcaagtatgtgagtcaacttggttattatcaaatatagttaatctaggtttattagataggtcaacatcttataaagataaattggctaaaggtttgaccgcgaatcttggtctttattcttaccctgttttaatggcatctgatatacttttatttggcggtgaaattgtgccagtaggtcaagatcaaaagcaacacattgagattacaagggatattgctaaccgatttaataatatttatggagagatttttgttgaacctgtgccagatattgagaaaacttcaaaattgattccaggaatagatggacaaaaaatgagtaagtcttatggaaatactatcccgatatttggtgaagaaaaacaaatccgaaaaaa

SEQ ID NO: 300777 - DNA, 356 bp, Unknown
  Bacterial polypeptide expressing nucleotide sequence isolated from the Sargasso Sea
catggccaaaatactaactggcattcaatcaactggaacacctcaccttggcaatattcttggagctattattcctgcaataaaaatggcaaatgaatcaaatgaagagtcttatctttttattgcaaatatgcactcattaactcaaattaaagataaaaagagtttaagtgacaatacatttgcaactgcagctacatggttagcatttgatttagatccaaaaaaaagttgtttctacagacaaagtgatgttccagaggtaacggagctagcctggtatttaagctgtttttttccatatcaaaggttaaagctagcacattcatttaaggataaagcagaaaatttaaaag

SEQ ID NO: 300778 - DNA, 265 bp, Unknown
  Bacterial polypeptide expressing nucleotide sequence isolated from the Sargasso Sea
catggccaaaatactaactggcattcaatcaactggatcacctcaccttggcaatattctcggagctataattcctgcaataaaaatggcaaatgaatcaaacgaagagtcttatctctttattgccaatatgcactcattaactcaaattaaggataaaaagactttaaatgaaaatacacttgcaactgcagctacatggctagcatatgatttagatccaaaaaaaagttgtttctacagacaaagtgatgtccagaggtaa

SEQ ID NO: 300779 - DNA, 335 bp, Unknown
  Bacterial polypeptide expressing nucleotide sequence isolated from the Sargasso Sea
aatgagtaaaaaaatattttcaggagttcagccgacaggaaatcttcatttaggtaattatattggtgcgataaaaaattttgttgatttacaaaatcaacaaggaaatgagtgtgtttattgtgttgttgatttacatgcaataacaactaaacaagatccaaaaactctcaaaagcaatataagagaaaccactgctgctttcttggcaagtggaatagatcctaaaaaaagtattatatttaatcaatctttagtgtcagctcattctgaaggttcctggcttctgggatgcatagctcgtatgggctggttaaatagaatgacacaattta

SEQ ID NO: 300780 - DNA, 655 bp, Unknown
  Bacterial polypeptide expressing nucleotide sequence isolated from the Sargasso Sea
atggcttacaaagcattaaaagaaaataatgatgatgacaaaggaataaatatgggtttattctcttatcctattttgatggctgctgacatattaatgtttaattcaactcatgttcccgttggccctgaccagcttcaacatctagagatgacaagagatattgcaaacagatttaatcatatatttggcaatacttttgaaattccagaggcaattattaatgatgatgagtcaattccaggaatagatggaagaaaaatgagtaaatcttataacaatgtaattcctttgctttgtgatgaaaaaacattaagaaaatcaattatgaagatcgtaactaactcacttgagcctggtgagcccaaagattacaaaacctgtaatgtttttagtctttatacaaattttgcatcagatgaagaaatagctgagctaaaggaagaatataataatggcatatcttggggtgacgctaaaaacaagctttttgataaggctaatgattctctattaccaatacgtgaaagatattttgaattaaaagagcaaaaagacttagtaaaagatcatctttctgacggagcaaaaaaggttcgcccattagcgcaaggattcattgaagaaattcgttcaaaaataggtatctcttaat

SEQ ID NO: 300781 - DNA, 260 bp, Unknown
  Bacterial polypeptide expressing nucleotide sequence isolated from the Sargasso Sea
catggggagaccgagggttctctctggagtgcagccgaccggtgccctgcacctcggcaactggcttggagcgattcgcaactgggttgatctccaggagagccacgacacctttgtctgcgtcgtggatcttcacgccatcaccgttccccacgacccggcacagcttgctgaagacaccctcaacaccgcggcgctgtatctgggctgcggcatggatccggaccgctgctccatcttcatccaaagccaggttgctg

SEQ ID NO: 300782 - DNA, 946 bp, Unknown
  Bacterial polypeptide expressing nucleotide sequence isolated from the Sargasso Sea
ataaagaaaatcacaggagaagatcatttcatgttaagaagaggaattttcttttctcatagagatctaaatgtaattttagataattttgaaaaaggtaagaaattcttcttgtatacaggacgaggtccttcaggtaatacacacataggtcacttagttccatgggtttttgcaaaatggttacaagaaaaatttgatgtgaatatctattttcagttaacagatgatgaaaaattttatacaaaatctgacttgacacttgaagacacaagtaaatttgcgttagaaaatgcgcttgactttattgcacttggattcaatccggaaaaaacaaaaattataatcaatactaaaaatatcaagagactctaccctattgcagctcaagttgcaaaaaaaattaatttctcaaatacaaaagctgtgtttggttttacaaacgataccaacgttggaatgattttctatacatctttacaatcagcaccatgtttcattgaggatttaccagtgttaattccacttggagtagaccaagatcctcatttcagaattacacgtgatgttgcaccaaaaataaacaaaccaaaaccagcattgatacacaacatcatgattccagcattgacaggacctggtggaaaaatgtctgcttctgatgaaaaatcaaccatttacacaacggattctccagaagtagtaaaaaagaagattaacaaatatggattttcaggaggacaggttgatattgaaaaacacagagagcttggaggaaacccagacattgatgtctcttttcaatatttgagaatattttttgaacaagatgatgaaaaattaaagaaaatttatgaagattacaaatcaggcaaaatgttaactggagaattaaaagcaatcttaattgaaaagattaattcatttttgaagatacatcaacaaa

SEQ ID NO: 300783 - DNA, 471 bp, Unknown
  Bacterial polypeptide expressing nucleotide sequence isolated from the Sargasso Sea
catgccgaataaaaatagtttacgtgttttaagtggtatacagccatcgggctcattgcacctcggaaactattttggaatgatgtccaggatgataaaatatcaatcccaaaatgaattattttgttttatcgcaaattatcatgctctaacaaccttacctgattcaaaatcattatcttcaaatactttcaacgctgcttgtgattttcttgcgctgggtctagatccagaaaaatccaccttctgggttcaatccgatgttcctgaagtagcagaattaacatggattctttcatctcaggtgggtgtcggtttaatggatcgtgcgacatcttataaagataaaatttcacaaggcttaaaacccaatatgggtttgtatagttacccaatactaatggcggcagatatattactttttgatactgaaatagtgccggttggtaaagaccaaaaacaacacctgaa

SEQ ID NO: 300784 - DNA, 337 bp, Unknown
  Bacterial polypeptide expressing nucleotide sequence isolated from the Sargasso Sea
atgagcagtttccaaaaaagagttttttctggtgttcaaccaacaggaaccctgcatttaggtaactatcttggtgcgataaaaaactttgtagagcttcaaaaagaatttgaatgtatttattgtgttgtagaccaacacgccattactgttgagcaaaatccagctgagcttcgctcaaacacacttgaggtattagcatcgtttattgcagcaggagtggactataaaaaacaaattatatttcaacaatcaagtgtagcagaacactctcagcttgcttgggtatttaattgtgtcagtcgaattggttggcttaatagaatgacacaattta

SEQ ID NO: 300785 - DNA, 169 bp, Unknown
  Bacterial polypeptide expressing nucleotide sequence isolated from the Sargasso Sea
aatgactagtttccaaaaaagagttttttctggcgttcaaccaacagggacactgcacttaggtaattaccttggtgctataaaaaactttgtggaacttcaaaaagaatttgaatgtatttattgtgtggtagaccaacacgcccaatcaccgttgagcaaaaaatcc

SEQ ID NO: 300786 - DNA, 289 bp, Unknown
  Bacterial polypeptide expressing nucleotide sequence isolated from the Sargasso Sea
tatgacaaaaaatagaattttatcaggcgttcaaccatcaggcgatttgcatcttggtaattacttgggagcaattaaaaattttgtgtcccttcaaaaagattatgaatgttttttttgtgttgttgatttacatgcaatcacagtatggcaagatccaaaagaattagcacaaaaaacaagagaagtaactgcagcgtttatagctagcggcattgatcctaatgaaaatattttatttgcacaatcacaagtccccacacattctcaattagcttggatatttaat

SEQ ID NO: 300787 - DNA, 337 bp, Unknown
  Bacterial polypeptide expressing nucleotide sequence isolated from the Sargasso Sea
atggaaaaaccaacaaaaagaattctatccggcgttcaaccatctggtgatttgcatttaggaaattatcttggtgcgataaagaattttgtttctcttcaaaaagaatacgaatgttttttttgtgttgttgatttacatgctattacagtttggcaagatccaaaagtgttagcaaataaaacaagagaagtaacagctgcctttattgcttctggtattgacccaaagaaaaataatatttttgttcaatcacaagttcctcaacatgcacagcttggatggttgttcaattgtgttgcgagaatgggatggttaaaccgtatgacgcaattta

SEQ ID NO: 300788 - DNA, 481 bp, Unknown
  Bacterial polypeptide expressing nucleotide sequence isolated from the Sargasso Sea
atgaccctaaaaaagcgttccttatccgggatcaaacccaccggtactccgcatcttggaaactatctgggcatgatcaagcccgcgatcaagatgcaggagacccaccagactttttattttattgccgattatcatgctctgaccagcatccgcgaaccggaaagtcttaaggaacatagctatgatctgacggcaaccttcgcttcccttggcatggatttcgaggagcatgcttttttccgccaatcagacatcccggaagttacggaactgacctggttcctggcctgcctgacaagcaagggactgatggaacgggcccatgcattcaaagatgcgcagtccaaagggcaggatgtgaacatgggattgttttcatacccgatcctgatggcggcggatattttgatttatgattcccatgttgtgccggttgggaaggaccagaaacaacatctggaaatcacccgcgatctgg

SEQ ID NO: 300789 - DNA, 550 bp, Unknown
  Bacterial polypeptide expressing nucleotide sequence isolated from the Sargasso Sea
aaacaacatttagaacttacaagggatatcgcccaaaaatttaatacagattttaaagctcaagatttttttaaaattcctgagcctcttatacaagaaaaattctctcgtattatgagtctaaaagatgcaaaaaataaaatgagtaaatctgatccttctgatgctagtcgtataaatcttactgacacagatgaacaaattcataataaaattaaaaaagcaaaaactgatacaaaatcttttcctactaatgaaaaagatttgaccaaaagaccagagatacaaaatctgattggtatatattcaagtttaaaatctcaaaaaattacaaatacacttaaagagtttcagggaaaaaatttttcaaattttaaagaaaaactatcagaggttgtgacagaaaatatctctcctatttcaaaagaaataaacaaattaaaatcagataaaggacatattcttcaggtactaaaagatggaagtgaaaaagccgaaataattgcatcagaaaaagtaaaaaaaattaaagaaattattggcttttaaa

SEQ ID NO: 300790 - DNA, 269 bp, Unknown
  Bacterial polypeptide expressing nucleotide sequence isolated from the Sargasso Sea
tatgtctaaaaaaattttttcaggagtgcaaccaacaggaaatttacatcttggcaactatataggtgcaataaaaaattttgtagatttacaaaataataaagaaaatagctgcattttttgtgtcgttgatcttcacgccattacggtaatgcaggatccgatagagttaaaaaataatattagagagacagcagcagcatttattgcaagcggtattgattcaaaaaatagcataatattcaatcaatctttagtttctgcacatt

SEQ ID NO: 300791 - DNA, 508 bp, Unknown
  Bacterial polypeptide expressing nucleotide sequence isolated from the Sargasso Sea
atgacccaaaaaaagcgttccttatccgggatcaaacccaccggtactccacatcttggaaactatctgggcatgatcaagcccgcgatcaagatgcaggagactcaccagaccttttattttattgccgattatcatgctctgaccagtatccgcgaaccgaaaagtcttaaggaacatagctatgatctgacggcaacattcgcttcccttggcatggatttcgaggagcatgcttttttccgccaatcagacatccctgaagttacggaactgacctggttcctggcctgcctgacaagcaaggggttgatggaacgggcacatgcattcaaagatgcacagtccaaagggcaggatgtgaacatgggattgttttcatacccgatcctgatggcggcagatattctgatttatgattcccatgttgtgcctgttggaaaggaccagaaacaacatctggaaatcacccgggatctggctctgcgtttcaatcatctttacggag

SEQ ID NO: 300792 - DNA, 139 bp, Unknown
  Bacterial polypeptide expressing nucleotide sequence isolated from the Sargasso Sea
atgagtaaaaaaatattttcaggtgttcagccgactggtaatttgcatttaggaaattacctaggtgctataaaaaattttgttgaacttaataatgacaataaaaatgagtgcattttttgtgttgttgatttacatg

SEQ ID NO: 300793 - DNA, 222 bp, Unknown
  Bacterial polypeptide expressing nucleotide sequence isolated from the Sargasso Sea
aatgactagtttccaaaaaagagttttttctggcgttcaaccaacagggacactgcacttaggtaattaccttggtgctataaaaaactttgtggaacttcaaaaagaatttgaatgtatttattgtgtggtggaccaacacgcaatcacagttgagcaaaatccaaaggagcttcgctcgaacactctagaggtattagcgtcgtttattgctgcaggggt

SEQ ID NO: 300794 - DNA, 492 bp, Unknown
  Bacterial polypeptide expressing nucleotide sequence isolated from the Sargasso Sea
ttttaaagatccctcaaccaatcatcatgaagaatggttcaaaaataatgagtttaattgatggttcaaaaaagatgagcaaaagtgatcctaatgagggcagtcgcattaacttattagatccacctgaaataatcacaaaaaaaattaaaagagcaaaaagtgatagttctattggaattgaatttaacaaccctgagagaccagaatctaaaaatcttttgatgatttattcaatattatctggcaaagaaatttctcaatgtgaaaaggaattctcagaaactggatgggggacatttaaaaaattaattaccgaacaacttattgaatcactagaacctattcagaaaaaatataaattattaattaatgatccctatcaactaaataaaatccttaatgaagggaaggaaaaagctgaagatttagcgaatcagactttaagaagagttaaatcaaaattgggattttttgaaatggagaaataaa

SEQ ID NO: 300795 - DNA, 577 bp, Unknown
  Bacterial polypeptide expressing nucleotide sequence isolated from the Sargasso Sea
gatacttcatctaatttatacaagaatttttggccagcagatttacatattataggaaaagatattttaaggtttcatgctatttattggcctgcttttttaatggcagcagacatacctttacccaagagagtgtttggtcacggctggatactttcagacgaaaaaaaaatgtcaaaatctattggtaatattttagaccctatagaaataattaaatcttatggaatagatcaattgagatattatctcattaaagaagtttcattgggcaatgatgggaatatttcattagaaaatttaaaaaactgtataaacaatgatcttgcaaataattacggaaatctgtgtcaaagagtttttgcttttttaaaaaaaaattgtgcaaataagattcctaaaagtgataatttttcaaaagctgataaaaatttaacagacagacttaaaaatgatttaaagaaattgaatgaactcattgataatcaagatcttaataactatataaaacaagtaattgagtattcttttgattcaaacaaatattttaatgactcgaaaccatggtccctaaaaa

SEQ ID NO: 300796 - DNA, 404 bp, Unknown
  Bacterial polypeptide expressing nucleotide sequence isolated from the Sargasso Sea
tatggacaaagttactaaaagaattttatcaggtgttcaaccttccggtgatttgcatttaggcaattatttgggtgcaattaaaaactttgtatctcttcaaaaagaatttgaatgttttttctgtgttgttgacttgcatgctattacagtttggcaagatccaaaactattgaaacaaaaaacaagagaggtagcagctgcgtttattgcctctggtattgatccagaaaaaaatacattatttgtacagtcacaagttccacaacatgctcaattggcatggatctttaattgtgttgcacgtatgggatggctgaaccggatgacaccatttaaagataaagcaggaaagaatagtgaaaatgtatcggtaggattattttcttacccaactttaatgg

SEQ ID NO: 300797 - DNA, 130 bp, Unknown
  Bacterial polypeptide expressing nucleotide sequence isolated from the Sargasso Sea
atgtcaaaaaaaatcttttctggggtacaaccaaccggtaacttgcacctaggaaattatttaggagctataaaaaattttgtaagtttacagaaagataagcaaaataattgtatatattgtgtcgtag

SEQ ID NO: 300798 - DNA, 466 bp, Unknown
  Bacterial polypeptide expressing nucleotide sequence isolated from the Sargasso Sea
gttattggaggaccagctgctcgagtaatgagcttgcgtgacggtacaaaaaaaatgtctaagtctgacccttcagatttaagtcggataaatatgacagacaattcagatatgattgcaaataaaattagaaaagcaaaaacagatcaatatggccttccgtccgaaccaaaagggcttgaagggagagcggaagcacagaatttagtagcaatatacgctgcgctcggagatcaaagtttggaaggcgttttaagcgaaattgggggcaaacaattttcagattttaaacctatgttggtagaaagagctaccgaagtgctatcaccgatttcaagtgaaatgagtcgaataatgcaggatattcctcagttggacaaagtattggatgatggcgcacttaaagctaaatccatagccaagccaattttgcaaaaaacttttgatattataggtatggcttaga

SEQ ID NO: 300799 - DNA, 547 bp, Unknown
  Bacterial polypeptide expressing nucleotide sequence isolated from the Sargasso Sea
aacatcttgagcttactaggggagattgcaaataaatttaatttagattttaaagcaaaagattttctaaaagcacctgagccgcttattaagcaaaatttctcacgaataatgagtcttaaagacggaacaaaaaaaatgagcaaatcagatccttcagacttaagtagaataaatttaaacgatactggggataaaattataaataaaataaaaaaagctaaaactgacgccttagagatgccaactagtcaaaatgatcttggtaaaagaccagaaatagaaaatctctttggtatatactctagcctaaataataaaaaaatagatgattcaattaatgagtttaaggatagaaatttctcagagtttaaagaaaaattatctgatttaattgttgagaagatttccccagtatcatcagaaatcaccaagttacaaaatgatataaaatatttagatgatatccttaaagcaggaagcgaaaaagctaatgaaatttcgtcaaaaaaagttgaggatatgaagaaaattataggtttttaaa

SEQ ID NO: 300800 - DNA, 224 bp, Unknown
  Bacterial polypeptide expressing nucleotide sequence isolated from the Sargasso Sea
gttgagcggggtgcaacccacggggtcgatccacctggggaactatttcggcgccattcgaaattacgtgaaattgcaggatgatttcgatgcgttttactgcgtggttgatttacacgccatcacggccggtggacacgatcccgcgagtcttgaggcgtcgacgaggacgagcgcggcgatttatttagccgccggggtggacccggacaaggcgaacgtct

SEQ ID NO: 300801 - DNA, 484 bp, Unknown
  Bacterial polypeptide expressing nucleotide sequence isolated from the Sargasso Sea
atgaaaaagcgtattctaacaggaattaccacaacagggactccacacataggaaactatattggtgcaataaggcctgcggtagaattgtcgtccaacaatgatgaatcttttttctttttagcagactatcactcgataattaaaaatcaagattcattattgataaaagactccgtcaaagatattgctttagcgtggctctcatgtggattagatccaaaaaaaacatgtttttatagacagtccgatgtacccgaaattattgaattaacttggatacttaattgtgtgacagccaaaggtttaatgaatagagctcatgcgtataaagcagctaccgctttaaatgatagtgatccggataagggtataacaatggggctattttcatatcctattttaatggccgctgacatacttatgtttgattcaactcatgtgccagtaggctctgatcaaatacaacatctgaaagacaaga

SEQ ID NO: 300802 - DNA, 442 bp, Unknown
  Bacterial polypeptide expressing nucleotide sequence isolated from the Sargasso Sea
atgaccgagaccactttcacgccgcgtgtcttttccggcatccagccctcgggcaacctgcaccttggcaactaccttggcgctctcaaacggtttgtagactggcaggacaaggacatggagaccatctattgcatggtcgacctgcacgcgatcaccgtctggcaggatcccaacgatctgaagaaagccacccgcgaactttgcgccgggttcattgccgccgggcttgatccggagaaatccattctcatcaaccagagccaggtgcctgaacatgcgcaactggcctgggttttcaactgtgtcgcccgcatgggctggatgcagcggatgacccagtggaaagacaaggcgggcaagaaccagcagaacgcctcgctgggtcttctggcctatccgtcgctgatggcggcagacatcctgatctaccacgccacgc

SEQ ID NO: 300803 - DNA, 358 bp, Unknown
  Bacterial polypeptide expressing nucleotide sequence isolated from the Sargasso Sea
aatggaaaaacctactaaaagaattttatctggagtgcagccctcaggagatttacaccttggtaattatttaggtgcaataaaaaatttcgtttctttacaacacgaatacgaatgttttttttgtgttgttgatctacatgctatcacagtgtggcaagatccatcaactttagcacaaaagacacgtgaagtgactgctgcatttatagcatcaggtatcgatccaaagaagaatactttatttgttcagtcaccagttccacaacattcacaattagcttggggctttagttgtattgcgagaatgggatggtttaaacgtatgactcattttaaagataagctggaaaaatag

SEQ ID NO: 300804 - DNA, 286 bp, Unknown
  Bacterial polypeptide expressing nucleotide sequence isolated from the Sargasso Sea
atggcagttaaaaaaatcttttcaggcgttcaacccactggtaatttacacttaggtaattatatcggagcgattaaaaattttgtagacttgcagaatgataacaatgaatgcatattttgtgttgttgatttacatgcagttactgttaagcaagatccagaggttttaaagcaaaatatacgtgagactgctgcaacttttattgctagtggtattgatccaaaaaaaagtataatttttaatcaatcatcagtatctgcacatgcagagggctcatggctac

SEQ ID NO: 300805 - DNA, 96 bp, Unknown
  Bacterial polypeptide expressing nucleotide sequence isolated from the Sargasso Sea
aatgaaaaaaaaaattttttctggtgttcaaccaactggaaatttacatttaggaaattatttaggtgcgattaaaaattttgttgcattacaaaa

SEQ ID NO: 300806 - DNA, 280 bp, Unknown
  Bacterial polypeptide expressing nucleotide sequence isolated from the Sargasso Sea
atgccacaaaaaaatatattttcgggagttcaacctacaggcaatcttcatttaggaaattatattggtgcaattaaaaattttgtaaaactacaatctgaaaatgactctaaatgtatttattgtgttgttgatttacatgcaattactacaaaacaagacccccaaaaattaaaagagaatatccttgagacgactgcagtttttttagcaagcggaattgatccaagcaaaagtataatttttaatcaatctatggtacctgctcattcagagggaa

SEQ ID NO: 300807 - DNA, 700 bp, Unknown
  Bacterial polypeptide expressing nucleotide sequence isolated from the Sargasso Sea
atggcaagaattttaacaggtgttcaaagtacaggtactcctcaccttggaaacattttaggagccattatccctgcaattgaattgtcaaaaaaacacagtgattcatttttatttatagctgatctccattctctcacacaaattaaaaattcaactgagttgaaacaaaacacatattcgaccgcagctacatggctatcatttggattaaatcccaaaaaaacagttttttataaacagtcagatatcccaataactactgaacttgcctggattctatcatcctatttcccatatcagagattaactcttgcacattcttttaaggataaatcaaaggatttaaaaaatgttaatgcagcattatttacttacccaatgcttatggcagcagacattctactttatgatgccaactatgttcctgttggaaaagatcaaatgcaacacctagaaatcactagaaatgtagcatcaaagtttaataatttacatggtgatactttaattattcccgaagctatagtcaacgaggatactaaattaattataggaactgatggtcaaaaaatgagtaaatcaaaaaataatatcataaatatttttcttccgaacaataaattgaaaaaacaaataatgtcaataaagacagatagtttgtcggttgaatcccccaaaaaatccagatacatgtaat

SEQ ID NO: 300808 - DNA, 273 bp, Unknown
  Bacterial polypeptide expressing nucleotide sequence isolated from the Sargasso Sea
aatgagtaatgctatgcaatctgaacctacaggtaagttcaagaagcgagttttttctggagtgcaaccatctggaggattgacccttggtaactacttgggtgcaatcaaacgatttgttcagatgcagaatgacgattacgaaacaatttattgtgtagttgacttacacgcgattacggtttggcaagatccaaaaatgcttaggcaaaatataagggagttagcggcttcctttattgcatcagggctcaatccaaataaatctatctt

SEQ ID NO: 300809 - DNA, 490 bp, Unknown
  Bacterial polypeptide expressing nucleotide sequence isolated from the Sargasso Sea
tgatttttttccagtgactgagcctgttattggaggaccggcagctcgagtaatgagtctgcgtgacggtacaaaaaaaatgtctaagtctgatccgtcagatttaagccgtataaatatgacagacaattcagatatgattgcaaataaaattagaaaagcaaaaacggatcaatatggtcttccgtccgaaccaaaaggcttggaaggcagagcggaggcggagaatctggtatcgatatacgcagcacttggagatgatagtgttgaaggtgtcttgagcgaaattggcggtaagcaattttcagattttaaacctatgttggtggaaagagctgttgaggtactctcaccgatttcaagtgaaatgggtcgaataatgcaggatatccctcagttagacaaagtactagatgatggtgcaagtaaagctagattaatagccgaaccaattttacaaaaaacttatgatataataggtatggtatag

SEQ ID NO: 300810 - DNA, 436 bp, Unknown
  Bacterial polypeptide expressing nucleotide sequence isolated from the Sargasso Sea
atgaaaaagcgtattctaacaggaattaccacaacggggactccacacataggaaactatattggtgcaataagacctgcggtagagttgtcgtccaacaatgatgaatctttcttctttttagcagactatcattcgataattaagaaccaaaattcattatcaataaaagaatctgtcaaagatattgctttagcctggctttcgtgtggattagatccaaaaaaaacttgtttttatagacagtccgacgtacctgaaattatggaattaacttggatacttaattgtgtgacagcaaaagggttaatgaatagagctcatgcatataaagcagctacagctttaaatgataatgatctggataagggtataacaatgggattattctcatatcctgttttaatggctgctgacatacttatgtttgattcaa

SEQ ID NO: 300811 - DNA, 493 bp, Unknown
  Bacterial polypeptide expressing nucleotide sequence isolated from the Sargasso Sea
atggccaaaatattaactggcattcaatccacaggaacacctcaccttggaaacatacttggagcaattattcctgctgtagatatggcgaattcaactaatgatgaatcgtatctttttattgccaatatgcattctcttactcaaattaaagatgaaaagattctaaaagagaatacattttcaactgcagcaacttggttagcatttggattagatccagaaaaaacatgtttttacagacaaagtgatgtaccagaagtaacagaattagcatggtatttaagctgttttttcccatatcagagattaaaattggcccactcatttaaagacaaatctgataatttaaaagatgttaattcaggattattctcttatccaatgttaatgtctgcagatattcttctttatgacgctaacatagtccctgttggaaaagatcaacaacaacatcttgaaatgactagagatgtagcatcaagaatttaat

SEQ ID NO: 300812 - DNA, 418 bp, Unknown
  Bacterial polypeptide expressing nucleotide sequence isolated from the Sargasso Sea
aatgaaaaatagaattttaacaggtattactacttcaggcaccccacacttaggaaactattttggtgctataaagccaagccttgaattagctaaagaatcttcagattcattcttttttttagcagattatcattcaattattaaagtaaataatccccaagaagtcacttcatctattgagaacattgctcttgcatggctttcgagtggattagatactaaaagcagttatttttataagcaatctgatattagagaaatattagaattaagttggatacttcattgtgttacagcaaagggattaatgaatagggcacatgcttacaaagcattaaaagaaaataatgatgacgacaaaggaataaatatgggtctattctcttatccaattttaatggctgctgacatatta

SEQ ID NO: 300813 - DNA, 328 bp, Unknown
  Bacterial polypeptide expressing nucleotide sequence isolated from the Sargasso Sea
catgtcaaaaaaaattttttcaggtgttcaaccaactggaaatttgcatcttggtaattatcttggggcaataaaaaattttacaaaattacaaaatgatattgaaaatagttgtattttttgtgttgttgatttgcattctataactgtacatcaggatccaaaacaattaagaaaaaatgtgagagaaacagttgcaacttttatagcctgtgggatcgatccttctaaaagtatcattttcaatcaatcttctgtaccagcacattatgaaggggcttggatattgggatgtatttcaagaatggggatggtaaacaggagacac

SEQ ID NO: 300814 - DNA, 307 bp, Unknown
  Bacterial polypeptide expressing nucleotide sequence isolated from the Sargasso Sea
aatgaataactcaaagaataaaattgttttttcaggtgtgcaaccttcaggagatttgcacattggaaattatttgggtgcaattaaaaactttatttcaatgcaacatgaatatgactgtttgttctgtgtagtagatttgcatgctataactgttaagcaagatccaaatgaattaaaaaataatacttatgaagttgtggctacatatatagcaagtggaatagatcctaaaaaaagtattattttcaatcaaagccacgtttcatctcatacagagcttgcatggattcttaattgtgtttgc

SEQ ID NO: 300815 - DNA, 802 bp, Unknown
  Bacterial polypeptide expressing nucleotide sequence isolated from the Sargasso Sea
taatcaatattcatacgagcttacagcaatttttgctgctctaggaatggattttgataatcatgctttttttctacaatcagatattcctgaagttaccgagttgacttggattctctcatgtattactcctaaaggtttaatggaaagagcccatgccttcaaagatgctctttccaataatcaagaaattaatatgggcttgtattgttatccgatactaatggcttgtgatattttgatttacgactcaaattttgttcctgtaggtaaagatcaaagacaacatcttgaaataactcgcgacctcgcaattagattcaatcatctatatggtgaatcttttgtgatccctgaagcaattattcaaaaaaatgtggccattattccaggaattgatggaagaaagatgagtaagtcatatactaatgttatcccattgttttcttcagaaaaaatatttagaaaatcaattatgaagataaaaactgactcaaaatctgttaatgaacccaaagatcctaaagaatgcaatgttttttcactatatcaaagttttgctaacaaagaagaaaagaatgatttaaccaaactttatctcaaaggtggaataggctatggtgacgcaaaacaactatgttttgaaaaattaaatgctgtactgaaggaacctagagatatttataatgaaattattaatgacaaaataaaattaagaggtatcttagaggctggaagagacaaagctcgtccaatcgctaaaaaggttaatgctcgaatacgtgataaagttggtatttga

SEQ ID NO: 300816 - DNA, 248 bp, Unknown
  Bacterial polypeptide expressing nucleotide sequence isolated from the Sargasso Sea
gatgaagcgaattttctcaggcatccaaccatcgggtaatttgcaacttggtaattacctgggtgcaattaggaattgggcaaaaatgcaaaatgactatgaatgcattttttgcgtggtagacttgcatgccattaccctccctcaggatccattgacgatgcggaatgctactcgcgaagttgctgccggagtgattgcagggggggtgaaccctgagacatgcattattttcaatcagagccagg

SEQ ID NO: 300817 - DNA, 514 bp, Unknown
  Bacterial polypeptide expressing nucleotide sequence isolated from the Sargasso Sea
aaatttaatttagattttaataaaccaaattttcttaaggtacctaatccattaattcaaaaaaaatttgcaagaattatgagtttaaaagatggtacaaaaaaaatgagtaaatctgatccttccgatttgagtagaataaatttaacagatagtgaagatgaaattattaacaaaataagaaaagccaaaactgatactgagtccttaccagataatgaaatagatttatcaaaaagaccagaagctgaaaatttattaggaatatattcaagtttaactaatcaaagtttgcaaaattcaattaatgagttttcaggaaaaaatttttctgatttcaaaaaaaatttaaccgatttaattgttgcaaaaattattcctatatcaaatgaaattaataaactaaaaaaagaaaaaaattttatagataatgttcttagcgaaggttctgtaaaagctgataaaatttcatcaaataaagttaaagaaattaaaaaaattattggtttttaag

SEQ ID NO: 300818 - DNA, 205 bp, Unknown
  Bacterial polypeptide expressing nucleotide sequence isolated from the Sargasso Sea
atggctaaatttaggcataagcctagagttttttcgggggtgcaacctaccggtgaaattcatttaggaaattacttgggtgctttaaaaaactttgtcaacttacaagatgagaattttgagacgatttattgtctagtagatttacacgcaatcacggtttggcaagaccctaatgagttaagaaactctaccagagagtaac

SEQ ID NO: 300819 - DNA, 103 bp, Unknown
  Bacterial polypeptide expressing nucleotide sequence isolated from the Sargasso Sea
atgactaaaaaaattttttcaggggttcaacctacaggtaatctacatttaggtaactatttaggagcaattaaaaattttgtagagctcaataatgataaag

SEQ ID NO: 300820 - DNA, 567 bp, Unknown
  Bacterial polypeptide expressing nucleotide sequence isolated from the Sargasso Sea
tatggctagaattttaacaggtgttcaaagtacgggcactccacatttaggaaatgtattaggagcgattaaacctgcggtaaaaatggccaatgaatcaaataacgaatcttttttgtttattgctgatcttcactcattaacccagattaagaatccaaaagagctaaaaaaaaacacttactctactgctgcagcttggctggcttgtggtcttgatattgaaaaaactgttttctataaacaaagtgatgttgcaattgctacagagttggcatggattttatcatgtcattttccttatcaaagattaactttggctcattcattcaaagataagtccgatagactaaaagatgtgaatgcaggaatttttacttatcctatgcttatggctgctgatattttattgtatgatgcagagtttgtacctgtaggtaaagatcaacaacaacatctcgagatgactcgtgatgttgcgtcaagattcaataatttatatggtgaaacctttgtcttaccaagtccaaaaattgataatgaaactaagtatgttattggcacaaa

SEQ ID NO: 300821 - DNA, 784 bp, Unknown
  Bacterial polypeptide expressing nucleotide sequence isolated from the Sargasso Sea
ctagaccccaaaaaatcttgtttttatcttcaatctatgattccagaaatttctgaacttacaattctcatgtctatgctttgttctgtgccaagattacaaagaataccaacattgaaagaaaaaatttctgatttaaatcttaatgaaaattactccctaggtttattgtcttatccagttctaatgtcctgtgatattctcattttcaatgcttcaaaagttcctgtaggagaggatcaattaagccatgtggagctttccagagaattggcacggaaatttaattctacctataaagaagtttttaaagagccagaacctttaatcagcagtcattctagactagttggtattgacggccaaagtaaaatgagtaaatctttaaacaattgtatttaccttgttgattctaagaaggatgttgaaaaaaaagttatgaagatgtttacagatccaaataggacaagcgcggatgtaccaggaaaagttgaaggaaaccccgtatttatatatcacgatatttttaataacaacaaagaagaattagaagattttaaagacagatacaaaaaaggcaagattggcgacgtcgaagtaaaaaaatctctgtcgaaacatataaacgcttttcttgaacctattagagaaaaaagatccgaagttgtaaagaataaagatgaaatcttagatataatttttgaaggtagtaaaacagcaagagaagtaacaaaaataaatcttgaaattataaaagaagctatgagcttgaaatttgactaaa

SEQ ID NO: 300822 - DNA, 604 bp, Unknown
  Bacterial polypeptide expressing nucleotide sequence isolated from the Sargasso Sea
catggccaaaatactaactggcattcaatcaactggaacaccccaccttgggaatattcttggagctattattcctgcaataaaaatggcaaatgaatcaaatgaagaatcttatctctttattgccaatatgcactcattaactcagattaaagataaaaagactttaaatgacaatacatttgcaactgcagctacatggctagcatttgatttagatccaaaaaaaagttgtttctacagacaaagtgatgttccagaagtaacagaactggcctggtatttaagctgtttttttccataccaacggttaaagcttgcacattcatttaaggataaagcagaaaatttaaaagatataaactctggtcttttttcatatcctatgcttatgtctgcagatattttaatctatgacgcaaatatagttcctgtaggcaaagaccaacttcaacatcttgagatgacaagagatgttgcggcaagatttaacaaccttatgggtgaaacgtttataatacctgaggctaagattcaagatgatagtaattatgtaactggtactgatggtcaaaaaatgagtaagtccaagggtaatacaatt

SEQ ID NO: 300823 - DNA, 176 bp, Unknown
  Bacterial polypeptide expressing nucleotide sequence isolated from the Sargasso Sea
tatgtctaaaaaaattttttctggagttcaaccaacgggaaatttgcatcttggtaattatataggtgctataaaaaactttgtagatttacaaaatagtcaagaaaacaattgtatcttttgtgttgttgatcttcatgccatcactgtaatgcaagatccgatagagttaaaaa

SEQ ID NO: 300824 - DNA, 241 bp, Unknown
  Bacterial polypeptide expressing nucleotide sequence isolated from the Sargasso Sea
tatggaaaaaccaacaaaaagaatactgtccggtgtccaaccatctggtgatttgcatttaggaaattatcttggtgcgatcaaaaattttgttagtcttcaaaaagaatacgaatgttttttttgtgttgttgatttacatgctattaccgtttggcaagatcctaaagttttagcaaataaaacacgagaagaaactgctgcttttattgcttctggaattgatccaaatcaaaataat

SEQ ID NO: 300825 - DNA, 163 bp, Unknown
  Bacterial polypeptide expressing nucleotide sequence isolated from the Sargasso Sea
aatgaataatacaaaaaataaaatagttttttcaggtgttcagccctcaggtggtttacatattggaaattatttaggtgcaattaaaaactttattaaaatgcaacatgaatatgactgtttattttgcgtggttgatttacatgcgattacagttaaacaa

SEQ ID NO: 300826 - DNA, 787 bp, Unknown
  Bacterial polypeptide expressing nucleotide sequence isolated from the Sargasso Sea
tgatctgacggcaaccttcgcctcccttggcatggatttcgaggagcatgcttttttccgccaatcagacatcccggaagttacagaactgacctggttcctggcctgcctgacaagcaaggggttcatggaaagggcccatgcattcaaagatgcgcagtctaaagggcaggatgtgaacatgggattgttttcatacccgatcctgatggcggcggatattttgatttatgattcccatgttgtgccggttgggaaggaccagaaacaacatttggaaatcacccgggatctggccctgcgtttcaatcatctttacggagagactctagtggtcccggaagccatcattgaggatcaggttgcagtcataccgggattggacgggcagaagatgagtaaatcctataacaacgtgattcctctttttgcgcctgaaaaacaactgcgcaaggccatcatgaagatcgagaccgattccaaaaccgtggaagaagtcaaggatccggaaagttgtaatgtcttccaacttttccaatgttttgctgatcaaacagcccagcaggatttggcggagcagtaccgtgccggggggatgggttatggaacggcaaaacagatttgttttgaagcgattcgtgacgaactcaaagacgcatcggaacactatcgtcaaatccgggaggatcatgcccatctcgaaggaatccttgaaggcggcaaggacagggcccgcaaggttgcaagggatgtggttgatcgggtgcgtaacaaggtcggtctttaa

SEQ ID NO: 300827 - DNA, 505 bp, Unknown
  Bacterial polypeptide expressing nucleotide sequence isolated from the Sargasso Sea
ttagattatgaagcaccaaattttttaaaagttcctgaacctctaatacaaaaaaaattttcaagaatcatgagtttaaaagatggaactaaaaaaatgagtaaatccgacccttcagatctaagtagaattaacatgactgatacgaaagaccagatcgttaataaaattaaaaaagcaaaaactgatcctcatttattaccaagtactgataaagattttcaaaaaagaccagaattggaaaatcttttgggtatatattcaagtatgaaaagtcaatctttattagaaagtgttaatgaatttagtggaaaaaatttttcagatcttaaagagaagttaactgagataattgttgaaaatatttcaccaatatctaatgaaataaataaattgcaaaaagattccaagtttattgataacgtgttgtatgaaggtgcacaaaaagcagaagagatagctaataaaaaagttaaagaaataaaaaaaattattggtttttagt

SEQ ID NO: 300828 - DNA, 675 bp, Unknown
  Bacterial polypeptide expressing nucleotide sequence isolated from the Sargasso Sea
aatttaaagaaaaagtaggtaaagacaaagaaaaagcaagtattggtctttattcttatccaattttaatgtcagcagatattttattatatgatgctagtcatgttcctgtaggagaagaccagaaacaacatttagaaatttgtagagatatagcacaaaaatttaataatgattttggtgtagatgatttttttaaagttccagagcctctaattcaaaatgaatttgccagaattatgagtctaaaagatggaacaaaaaaaatgagcaaatcagaattatcagatttaagcagaattaatcttacagacagcaaagatgaaattattaataagataaaaaaagcaaagactgatcctttacctctaccttctgttatcaaagaactagaaaaaagaccggaggccaaaaatttattagggatttattcaagtttaaccaactccacattagaaaatacaattgaaatttttggaggaaaaaatttttcagaatttaaagaaaaactttctcaagttttaattgaaaaaattgatccaatttccattgaaataaaaaaattagtcaatgaaaaagaatttttggataaaattcttttagagggcaataataaggccgaaaatattgcgtctaaaaaaattaagaaaatgcaagaaataataggtttttgaa

SEQ ID NO: 300829 - DNA, 601 bp, Unknown
  Bacterial polypeptide expressing nucleotide sequence isolated from the Sargasso Sea
taattatcctattctaatggctgcagatattctaatgtttaacgcagatgaggtgccagtaggccaggatcaaaaacagcatttagaaatgaccagggatatagcaaatagatttaatcatcattacggtgaagtatttacaatacctgaagcagttataagtgacgaaacaggaatacttccaggaattgatggacaaaaaatgagtaagtcttatgacaatacaattccagcttttatagatactacgaaattaaaaaaactagtgaataaaataaaaactaattctttagaacccggagagcctaaagatacagaaggctgtacagtttttagtctgtataaagcatttgcttctactgaacagatcttaagtatgcaagaagcatataaaaatggtatttcttggggggaagctaaaaatcaactccatgttcttttagaagaatttatttctccatacagagaagagtatctaagaatttctaaagacagaggttatgttgagcaaactttgaaagagggggcagaaaaagccatgcaggtttccagtccaattttagagagtgtaagaaaaaaagtaggcataaagggtttttag

SEQ ID NO: 300830 - DNA, 520 bp, Unknown
  Bacterial polypeptide expressing nucleotide sequence isolated from the Sargasso Sea
gcacaaaaatttaatttgggattatgaagtaccaaattttttaaaagttcctgagcctttgatacaaaaaaaatttgcgagaattatgagtttaaaagatggaactaaaaaaatgagtaaatctgatccttcagatttaagtagaattaacatgactgatacgaaagatcagattattaacaaaattaaaaaagcaaaaactgatactgatttattaccaagtactgataaagattttcaaaaaagaccagaattagaaaatcttttaggtatttactcaagcatgaaaagtcagtctttattagaaagtattaatgaatttagtggaaaaaatttttcaaatctcaaagagaatttgacagatataattgttgaaaaaattacaccaatatctaatgaaataaataaattgaaaaaagattctaagtttattgatgatgtattatatgaaggtgcacaaaaagcagaagagatagctagtaaaaaagttaatgaaataaaaaaaattattggtttttaa

SEQ ID NO: 300831 - DNA, 823 bp, Unknown
  Bacterial polypeptide expressing nucleotide sequence isolated from the Sargasso Sea
ttttttttagcagattaccattcgattattaaagttaataatccgcaagaggtaacttcatccattgagaacattgctcttgcatggctctcgagtggattagatactaagagctcatatttctacaaacaatctgatatcagagaaatcctagaattaagttggatactccattgtgtaactgcaaagggattaatgaatagggcacatgcttacaaagcattaaaagaaaataatgatgatgataagggaattaacatgggtttattctcttatccaattcttatggctgctgatatattaatgtttaattcaacccatgtacctgttggtcctgaccagctccagcatcttgagatgacaagagatattgcaaatagatttaatcatatttttggtgtcacttttgagatccccgaggcaattattaatgatgatgaatcgattccaggaatagatggaagaaaaatgagtaaatcatataacaatgtgattcctttgctttgtgatgaaaaaacattaaaaaaatcaattatgaaaattatcactaactcactcgagccaggtgagcctaaggatcatcagacctgcaatgtttttaatctttatcaaaattttgcatcagatgaagaaatagctgagtttaaagaagaatatgaaaatggcatatcttggggtgatgctaaaaataagcttttttataaagctaatgattctcttttacctattcgtgaaagatattttgaattaaaagagcaaaaagacttagttaaagactatctctcagatggagcaaaaaaagttcgtccattagcgcaagaat

SEQ ID NO: 300832 - DNA, 195 bp, Unknown
  Bacterial polypeptide expressing nucleotide sequence isolated from the Sargasso Sea
aatgggaaaaaaaattttttcaggagttcagcctacgggaaatcttcacttgggtaattatattggagcaataaaaaattttgttgatctgcaaaatcaaaaagataatgagtgcgtctattgcgttgttgatttacatgcaataactacaaatcaagatccacaaattcttaaaagtaatataagagagacgac

SEQ ID NO: 300833 - DNA, 562 bp, Unknown
  Bacterial polypeptide expressing nucleotide sequence isolated from the Sargasso Sea
aatgaaaaatagaattttaacaggtattactacttcaggcaccccacacttaggaaactattttggtgctattagaccaagccttgaattagctaaagaatcaacagattctttcttttttttagcagattatcattcaatcattaaagtaaataatccccaagaggttacctcatccattgagaacattgctcttgcatggctttcgagtggattggatactaaaagctcttatttttataagcaatctgatattagagaaatattagaattaagttggatacttcactgtgtaacagcgaagggattaatgaatagggcacatgcttacaaagcattaaaagaaaataatgatgatgacaaaggaataaatatgggtttattctcttatcctattttgatggctgctgacatattaatgtttaattcaactcatgttcccgttggccctgaccagcttcaacatctagagatgacaagagatattgcaaacagatttaatcatatatttggcaatacttttgaattccagaggcaattattaatgatgatgagtcaattc

SEQ ID NO: 300834 - DNA, 895 bp, Unknown
  Bacterial polypeptide expressing nucleotide sequence isolated from the Sargasso Sea
ggcaactatctgggcatgattaaaccggcgatacaaatgcagcaaacgcacgagacgttttattttatcgctgattatcatgctctcacctccactcatgatcccaatcaactcagggagaacgcatatgatcttacagccattttcgcggcgttgggaatggattttgagaatcatgctttttttcggcaatcagatattcctgaagttacagaactgacttggattctttcctgtattactccaaaggggctgatggaaagggcacatgcatttaaggacgcgatttcgaagaaacaggaagttaatatgggattattcagttatcctgttctgatggcttgtgacatattgatttatgactcgaattttgtgccagtaggacaggaccagcgtcaacatttggaaattacaagagacctggccatccgctttaatcacctttttggggaagtatttgttatcccggaggcaattatacaaaaagatgtttctacaataccgggacttgacggaaggaaaatgagcaaatcatatggaaatgtggtcccgttgatggctccagaaaaacagttccggaaggcaatcatgaagatcacaacagattcaaaaactgttgaagaacccaaggaccctgacacatgcaacgtgttttctctttataagtgtttctcaacagaaacagaccagaaagaattggcttcacgttaccgatcagggggtatgggctacggtgaagcaaaacagctttgctttgaagcattaaacgctgaactcagagagccgagggaaaattatcaaaatattagaaaagacattcctcaattgaacggaatactggaatctggtcgagacaaggcacatgctgttgcaaggcaagtcaccgaaagagtgc

SEQ ID NO: 300835 - DNA, 460 bp, Unknown
  Bacterial polypeptide expressing nucleotide sequence isolated from the Sargasso Sea
ataaaaaaagatttttcaagaatcatgagtttaaaagacggtttaaaaaaaatgagtaaatcagatccatcagatcttagtagaattaatttaaccgatacaaaagacgaaattataaataaaattaaaaaagctaaaacagactctttttctcttcccaatgaagaacacaaattaaaagataggccagaagctgaaaatttacttggaatatattctagtgttttaaatcaaactttagataaaaccttagatgaatttggtggaaaaaatttttcagatctaaaaagtcaattagcagaagttttatcaagtaaaatttccccaatttccaacgagataaaaaaattagtcaatgatcgaaattatttagataaagttcttgtagaaggagcaaataaggctgaagaaatcgcaggaaaaaaaataaaagaaatgaagaaaataataggattttaaa

SEQ ID NO: 300836 - DNA, 238 bp, Unknown
  Bacterial polypeptide expressing nucleotide sequence isolated from the Sargasso Sea
atgagcaaaaaaatattttctggagtacaaccaaccggaaatttacatttaggtaattatattggagcaattaaaaattttgtaaatttacaaagagaccagagtaacgagtgtatatattgtgtagttgacttacatgcaattacctcaaaacaagatccaaaaatattaaaagaaaatattagagaaactacagcagtatttcttgcaagcgggttagacccaaaaaaaagtatta

SEQ ID NO: 300837 - DNA, 148 bp, Unknown
  Bacterial polypeptide expressing nucleotide sequence isolated from the Sargasso Sea
tatgggaaaaaaaattttttcaggtgtccagcctaccggaaatctccatcttggaaattatttgggtgcgattaaaaattttgttaagctaaataacgaagaccaaaatgagtgtatattttgtattgtcgatcttcatgctatcaca

SEQ ID NO: 300838 - DNA, 165 bp, Unknown
  Bacterial polypeptide expressing nucleotide sequence isolated from the Sargasso Sea
tatgcataaaaaaagagtattttccggtgttcaacctacaggaaatttacatataggaaactatttaggagcactaaaaaattttgttgatttgcaaaataaatttgaatgtgtttattgtatagttgacttgcatgccattactaatcgacaggatccaaaagt

SEQ ID NO: 300839 - DNA, 337 bp, Unknown
  Bacterial polypeptide expressing nucleotide sequence isolated from the Sargasso Sea
atgcaaaaaccaacaaaaagaattttatccggcgttcaaccatctggtgatctccatttaggaaattatcttggcgcaataaaaaattttgttagtcttcaaaaagaatatgaatgttttttttgtgttgtcgatttgcatgccattactgtttggcaagatcctaaagttttagcaaataaaacaagagaagttactgcagcatttattgcttctggcattgatccaaatcaaaataatatttttgttcaatcacaagttcctcaacatgcacagcttggatggttgttcaattgtgttgcccgaatgggatggttaaatcgcatgacacaattta

SEQ ID NO: 300840 - DNA, 433 bp, Unknown
  Bacterial polypeptide expressing nucleotide sequence isolated from the Sargasso Sea
agtcttaaagatggtttaaaaaaaatgagtaaatcagacccatcagatttaagcagaatcaatctgacagactcagaggatgaaattattaacaaaattaaaaaggcaaaaactgattccttcccaattccaaatgaggatcaaaagttaattaacaggccagaagctctaaatcttcttggtatttattcaagtatttcaaatcaaaacttgaacaaaactttagatgaattcggaggaaaaaatttttccgatttaaaagttaaattagcagaaattttgtctagtaaaatttctccaatttcaaatgaaataaaaaaattaattagtgataaacaatatttggataagcttcttttagaaggtgcgaataaagccgaagctattgcgggaaagaagattaaagaaatgaagaaaataataggtttttaaa

SEQ ID NO: 300841 - DNA, 268 bp, Unknown
  Bacterial polypeptide expressing nucleotide sequence isolated from the Sargasso Sea
aatgagtaaaaaaaaattagtattttctggagtacaaccaactggtaatttacatttgggcaattcccttggagctctaaaaaattttgtttcacttcaaaaagaaatggaatgtatttactgtgtcgtagatttacatgccattacaccctttcaaaagcctgatgaattacaaaataatgtcttagaaaccgtcgctagttttatagcccctggtttagatccaagtaacagaaaaatatttaatcaatcatcagttccagggcct

SEQ ID NO: 300842 - DNA, 583 bp, Unknown
  Bacterial polypeptide expressing nucleotide sequence isolated from the Sargasso Sea
gctacacacgttccagtcggagctgatcaaaaacaacatctagaattgtctagggatattgctcaaaaatttaataatgattttaaatgcgaaaacttttttccactacctgagccattaatacctaaaaatgtatcaagaattatgagtttaagagacggaacaaaaaaaatgagcaaatcagaagagtcagatttttctagaataaatttaaaagatagcgctgatgaaataaaaaaaaaaattaaaaaggctaaatctgactccgagccaattccagataatttaaaaaaattagaaaaaaaacctgaagcacttaatctagtttctatttactcagaaatatcaaataataatttagaaaaagtacttaatgaaatgtctggtaaggaatattcttttttaaagagtaaattgacagaccttttaataagtgaaataacccccgttggaatagaaatcaaaaaactaatggaagataagtcgcacttaaaaaaaattatgaaaaaaggcactgaaaaagctaatataatagctgaggaaaaccttaaaattatacgtgaaaaagtaggtttgatataat

SEQ ID NO: 300843 - DNA, 283 bp, Unknown
  Bacterial polypeptide expressing nucleotide sequence isolated from the Sargasso Sea
atgaataaaaaaattttttcaggtgtacaaccaacagggaatcttcatttaggtaattatttgggagcaataaaaaattttgttgaattacaaaatgataaaaaaaatgagtgtgtttattgcgttgttgatcttcattccattactgttaagcaagatgctaaaattttaaaaaaaaatattagggaaacagtagcaacttttattgcaagcggtcttaatcctgacaagagtattatatttaatcaatcagctgtttctgcccatgccgaggcagcatgga

SEQ ID NO: 300844 - DNA, 538 bp, Unknown
  Bacterial polypeptide expressing nucleotide sequence isolated from the Sargasso Sea
atgaaacgcattttaacaggtattacaccaagtggctatcctcatttaggaaattatgttggtgcaattaaaccttccctagacttggcaaaagaagataataagtcatttttatttattgcagatttacatgccattataaaaattagcgatgccaagcaacttaaagagctaaccaaaggaattgcattagcatggttggcttcaggattagatccagaaaaaacttatttttacagacaatctgatattcctgaagtgagtgaactcgcatggatattatcttgtgtagctgaaaaaggtcttttaaacagatctcatgcctacaaagcggcaactgatttaaataaagaaaatggtaaaaaagatgttgaagagggaatatcagctggactattttcttatccaatacttatggctagtgatattttatgtccaaatgctactcatgttccagttggaaaagatcagcagcagcacttagaaataacaagagacattgcagaaaagtttaataaaaaatttggaaatatcttta

SEQ ID NO: 300845 - DNA, 804 bp, Unknown
  Bacterial polypeptide expressing nucleotide sequence isolated from the Sargasso Sea
catggccaaaattctaactggcattcaatcaactggaactcctcacttaggaaatattcttggagctattatccccgctataaaaatggcaaatgaatcaaatgaagagtcttatctgtttattgcaaatatgcactcactaactcaaattaaaaataaagagattctagagaataatacatttacaactgcggctgcctggctagcatttgacttagatccaaataaaagttgtttttacagacaaagtgatattccagaagttacagagttagcatggtatttaagttgtttttttccataccaaagattaaagctggcacattcatttaaagacaaatcagaaaacttaaaagatgtaaattctggacttttctcatatccaatgcttatgtctgctgacatattaatttatgatgcaaatatagtccctgttggtaaggatcaacttcaacatcttgaaatgacaagagatgttgcagcaagattcaataaccttatgggagatacatttataataccggaagcaaaaatccaagataatagtaattatgttacggggacagatggtcaaaaaatgagtaaatccaagaataatataattgacatttttttagatgacaaatctctaaaaaaacagataatgaaaattcagaccaagtcattatcagttgatgaacaaaaagatccagatgactgtaatgttttcaaattatataaaataattgcagaagaagaaaatattaaaaatctggcctcaagatataggaaaggtggaattggatatggggaaatcaaaggaaa

SEQ ID NO: 300846 - DNA, 565 bp, Unknown
  Bacterial polypeptide expressing nucleotide sequence isolated from the Sargasso Sea
aaacaacatcttgaacttgccagagatattgcacaacagagaattaatgccagatttagtaaggataaaaatattttaaaaatccctcaaccaatcataatgaagaatggttcaaaaataatgagtttaattgatggttcaaaaaagatgagcaaaagtgatcctaacgagggcagtcgcattaacttattagatcctcctgaaataatcacaaaaaaaataaaaagagcaaaaagtgacagttctattggaattgaatttaacaaccctgagagaccagaatctaaaaatcttttgatgatttattcaatattatctggcaaagaaatttctcaatgtgaaaatgaattttcagagactggatgggggacatttaaaaaatttattactgaacaacttattgaatcactagaacctattcagaaaaaatataaattattaattaatgatccatatcaattaaataaaatccttgatgaagggaaggaaaaagctgaagatttagcaaatcagactttaaaaagagttaaatcaaaattgggattctttgcaatggagaaataaa

SEQ ID NO: 300847 - DNA, 148 bp, Unknown
  Bacterial polypeptide expressing nucleotide sequence isolated from the Sargasso Sea
aatgactaagcccatcgtttttagtggcgcacagccctcaggtgaattgaccattggcaactatatgggtgcgctgcgtcagtgggtgagcatgcaggatgactaccattgcatctactgcatcgttgaccacatggcatcaccgttt

SEQ ID NO: 300848 - DNA, 430 bp, Unknown
  Bacterial polypeptide expressing nucleotide sequence isolated from the Sargasso Sea
atgaaaaatagaattttaacaggtattactacttcaggcaccccacacttaggaaactattttggtgctataaggccaagccttgaattagctaaagaatcgacagattctttcttttttttagcagattatcattcgattattaaagtaaataatccccaagaagttacttcatccattgagaacattgctcttgcatggctttcgagtggattagatactaaaagctcttatttttacaagcaatttgatattagagagatattagaattaagttggatacttcattgtgtaacagcaaagggattaatgaatagggcacatgcttacaaagcattaaaagaaaataatgatgacgacaaaggaataaatatgggtttattctcttatccaattttgatggctgctgacatattaatgtttaattcaa

SEQ ID NO: 300849 - DNA, 533 bp, Unknown
  Bacterial polypeptide expressing nucleotide sequence isolated from the Sargasso Sea
acaacagagaattaatgccagatttagtaaggataaaaatattttaaagatccctcaaccaatcatcatgaagaatggttcaaaaataatgagtttaattgatggttcaaaaaagatgagcaaaagtgatcctaatgagggcagccgaattaacttattagatcctcctgaaataatcacaaaaaaaattaaaagagcaaaaagtgacagttctattggaattgaatttaacaaccctgagagaccagaatctaaaaatcttttgatgatttattcaatattatctggcaaagaaatttctcaatgtgaaaatgaattcttagagactggatgggggacatttaaaaaattaattaccgaacaacttattgaatcactagaacctattcagaaaaaatataaattattaattaatgatccctatcaattaaataaaatccttaatgaagggaaggaaaaagctgaagatttagcgaatcagactttaaaaagagttaaatcaaaattgggattttttgaaatggagaaataaa

SEQ ID NO: 300850 - DNA, 592 bp, Unknown
  Bacterial polypeptide expressing nucleotide sequence isolated from the Sargasso Sea
cttttgtatgatgctactcatgtacctgtaggtgatgaccaaaagcaacatttagaattatgtagagatatagctcaaaaatttaataacgactttgagatagaaaattttttgcaagtacccgaaccattaatacaaaaagagttttccagaataatgagtttaaaagatggttcaaaaaaaatgagtaagtccgaattatcagatttaagcagaataaatttatcagatgatagagataaaataataaataaaattaaaaaagcaaaaactgatcctttgccaatgccagaagacattaaggaactagatggaagattagaagcaagaaatctactgggaatttattcaagcataaataactcaagtttacaaaattcagttgaaatttttgcgggtaaaaatttttctgattttaaagaaaaattagcagaggaacttgtaaataaaattgaacctattggtaaagaaattaaaaaacttttatctgataaaaaatatcttgatgaaattcttctagatggagttgaaaaagccaatttaattgcatctaaaaagattgaaagaattaaagaaatagtgggtttttaat

SEQ ID NO: 300851 - DNA, 221 bp, Unknown
  Bacterial polypeptide expressing nucleotide sequence isolated from the Sargasso Sea
tatgtctaaaaaaattttttcaggagttcagccaacaggaaatttacatcttggcaattacataggtgcaataaaaaattttgtagatttacaaaatgataaagataacaagtgcattttttgtgttgttgatctacatgcaattactgtaatgcaagatccgacagagttaaaaaataatattagagagacagcagcagcatttattgcaagcggtattg

SEQ ID NO: 300852 - DNA, 124 bp, Unknown
  Bacterial polypeptide expressing nucleotide sequence isolated from the Sargasso Sea
aatgagtagtagaaaattagtattttcaggagttcaaccaacaggtaatttgcatttgggaaattatttgggagctttaaaaaattttgtatcactccaaaaaaatacagagtgtatatattgc

SEQ ID NO: 300853 - DNA, 862 bp, Unknown
  Bacterial polypeptide expressing nucleotide sequence isolated from the Sargasso Sea
ttgactgtttatcaagatcctaataatcttaatcatcaaataaagtctttagcagcaattttattcgctgctggtttagatcctgctaaatgttctgtatttatacaaagtcatgttaaggaacattcagaattatgttggctgctcaattgtattactccaattggctggttagaaagaatgacacaatataaagataaatcttcaggacaagaaagtgtatctactggtttattggattatcctgtattaatggcaagtgatattcttttatatgatgcagtagaggtgcctgttggagatgatcaaaaacaacatgttgaattggctagagatatttgccaaaggtttaacaatatatatggagatacctttgcattgcctgaaccagttatacctaatattggtgctagagtaatgggttttgataatcctttaataaaaatgtcaaagagttattcacatattagaggccatgctattagaataattgatacagaagatgaaattttaagaacagttaaaagagctgttacagattcaggaaatgagattaaattttctgataatccagacaatgctggagttaataatttacttggtatatacaaagttattacaggggaatcaacaaaagatgttgagtctaactttataaattctagaggttatggagatttaaagattaaagtagctgaagtaattatagaagaacttcaacctattcggaaacgttatagagatttgatggaaaacccagatcatttagataaactattatcagatggtgctgaaaaagctagatcattggctgagaagaaaatggaaatagtaaaaaataaaattggtttagtaagccgat

SEQ ID NO: 300854 - DNA, 238 bp, Unknown
  Bacterial polypeptide expressing nucleotide sequence isolated from the Sargasso Sea
tatggaaaaaccaacaaaaagaattttatccggcgtccaaccatctggcgatcttcatttaggaaattatcttggtgccataaaaaattttgttagtcttcaaaaagaatacgagtgttttttttgtgttgtcgatttgcatgctattaccgtttggcaagatccaaaagttttagcaaataaaacacgagaagtaactgctgcttttattgcttctggaattgatccaaatcaaaat

SEQ ID NO: 300855 - DNA, 160 bp, Unknown
  Bacterial polypeptide expressing nucleotide sequence isolated from the Sargasso Sea
aatggataagccaaataaaagaattttatcaggggtacaaccttccggtgatctccatttaggaaattatcttggtgccataaaaaattttgttacgcttcaaaaagaatatgaatgttttttttgtgttgttgatttacatgccattacagtatggcaa

SEQ ID NO: 300856 - DNA, 403 bp, Unknown
  Bacterial polypeptide expressing nucleotide sequence isolated from the Sargasso Sea
ccgcgctgtggcggcaccgttcctggccgagctgcgtgaagcggtgggcctgcgttcgttcgtcaaccaggcggcggtgccggtcgtcaccaagaaaaaagcagcgaaggctgcacggtttgtgagcttccgtgaagacgatggcagcttccgcttccgcctgttggcgcctaacggtgaacagcttctagtttcgcgcaaattttctgatggtaagttggcaggcgctgcaactaaagatcttcagtcgggtaaggcactggatattcgcgaagaaggaaccaccttcagcgtctggctggaaggctactgcatcgcagatgggcctttcttcgaagagatttcatctcgcgatgccgccatcgccgctttgcgcgctgcgttaaccccaatcgaggattaa

SEQ ID NO: 300857 - DNA, 529 bp, Unknown
  Bacterial polypeptide expressing nucleotide sequence isolated from the Sargasso Sea
agggatattgcacaaaaatttaatttagactttaatgttccagattttcttagagctccagaaccattaattcaaaagaatttttcaagaataatgagtttaaaagatggaaaaaataaaatgagcaaatctgacccatcagatttaagtagaataaatttaactgatgataaagatcaaattgtaaataaaattaaaaaagcaaaaactgataatgatcctttgcctagtgatgataaaaatttaagtaatagacctgaagttgaaaacttattaggcatatattcaagcttaactggtcaaagtttaaaaaactcaataaatgaattcagtggaaaaaatttttctgaatttaaaaaaaagctagcagaaattgttgtggaaaaaatttcaccaatctctattgaaattaataaattacaaagagatattaattatattgataaaattcttaaagaaggtggtaaaagagcagatttaattgcttcaaaaaaagttcgagaaatgaagaaaataattggattttaat

SEQ ID NO: 300858 - DNA, 163 bp, Unknown
  Bacterial polypeptide expressing nucleotide sequence isolated from the Sargasso Sea
atgagcagtttccaaaaaagagttttttctggtgttcaaccaacaggaaccctgcatttaggtaactatcttggtgcgataaaaaactttgtagagcttcaaaaagaatttgaatgtatttattgtgttgtagaccaacacgcaatcaccgttgagcaaaatc

SEQ ID NO: 300859 - DNA, 160 bp, Unknown
  Bacterial polypeptide expressing nucleotide sequence isolated from the Sargasso Sea
atgtctaaagatacagttttttcaggcgtacaacctacaggtgatatccacttaggaaattacctcggtgccataaaacaatttcttaattttcaaaatgactctgactctattttttgtatagtagatcaacacgctataactgtctttcaagagccag

SEQ ID NO: 300860 - DNA, 828 bp, Unknown
  Bacterial polypeptide expressing nucleotide sequence isolated from the Sargasso Sea
taccattcgattattaaagttaataatccccaagaagtcacttcatctattgagaacattgctcttgcatggctctcgagtggattagatacaaaaagctcctatttttacaagcaatctgatataagagaaatcctagaattaagttggatacttcattgtgtaactgcaaagggattaatgaatagggcgcacgcttacaaagcattaaaagaaaataatgatgatgataaaggaattaacatgggtttattctcttatccaattcttatggctgctgacatattaatgtttaattcaacacatgttcctgttggtcctgaccaactccaacatctagagatgacaagggatattgcaagtagatttaatcacatatttggtgatacttttgtggtcccagatgcaattattaatgacgatgaatcaattccaggaatagatggaagaaaaatgagtaaatcatataacaatgtgattcctttgctttgtgacgaaaaaacattaaaaaaatcaattatgaagattattactaactcacttgagccaggtgagcctaaggatcatgaatcctgtaatgtctttagtctttatcaaaatttcgcatcagatgaagagatagctgaatttaaagaagaatatgaaaatggtatatcttggggtgatgctaaaaataagctttttaataaagctaatgattctcttttacctattcgtgaaagatattttgaattaaaagagcaaaaagatttagtaaatgaccatctttcagacggagcaaagaaggttcgtccattagcgcaagaattcattgaagaaattcgttca

SEQ ID NO: 300861 - DNA, 607 bp, Unknown
  Bacterial polypeptide expressing nucleotide sequence isolated from the Sargasso Sea
ttatttaattatcctatattgatggctgcagatatattgatgtttagcgcagacatagtaccggttggacaagaccagaaacagcatattgaaatgactagggatatcgcacttaggttcaatcatcactacggagacttattaacacctcctgaagcgaagataagtaaactaactggagtattacctggaatagatggcagaaagatgagtaagtcatataacaatacgattccaatttttgctgatgaaggttccttgaaaaagacgattatgaaaatcaagactaattcccttaaaccaggagttccaaaagatattacagattgcaatatttttgcgatctttaaatctattgcgaatgaaaatgatataaagagctttcagcaaatgtacgaggagggtattggctggggagatgcaaagacttatctttttgataacctttcttcatttctttcttcttataaaaaagaatatctaaagataataaaagatagagattatgttgagtcggttttaaaagaaggagccaataaagcattggaggtctcaacaccacttattgagaatataaggaattctgtaggcattaaagggttttaat

SEQ ID NO: 300862 - DNA, 553 bp, Unknown
  Bacterial polypeptide expressing nucleotide sequence isolated from the Sargasso Sea
tcaaaaacaacatttagaactatctagagatattgcgcaaaaatttaatttggattatgaagcaccaaattttttaaaagttcctgaacctttaatacaaaaaaaattttcaagaattatgagtctaaaagatggaacaaaaaaaatgagtaaatctgatccatcagacttaagtagaattaacatgactgatgtgaaggatcagatagttaataaaattaaaaaagcaaaaactgatactgatttattaccaagtactgataaagattttaaaaaaagaccagaattagaaaatcttttaggcatatattcaagcatgaaaagtcagtctttattagaaagtattaatgaatttagtggaaaaaatttttcagatcttaaaaagaaattaactgagataattgttgaaaaaatcacaccaatatctaatgaaataaataaattgcaaaaagatcccaagttcattgatgatgtgttatatgaaggtgcacaaaaagcagaagaaatagctagtaaaaaagttaaagaaataaaaaaaattattggtttttaa

SEQ ID NO: 300863 - DNA, 511 bp, Unknown
  Bacterial polypeptide expressing nucleotide sequence isolated from the Sargasso Sea
aatgaaaaaacgaattctaacaggaattaccacaacaggagtacctcatataggtaattatatcggggcaatcaaaccagcactagagcttgcaaaagattctgatgaatcttttttctttttagctgactaccatgcaattataaaaaatcaaaactctaatgaaataagtgattctgttaaagatgttgctctggcttggttatcctgtggacttaatacagattcttcatatttctatagacaatctgatgttccagaaattttagaattaagttggatactaaactgtgttactgcaaaaggattaatgaatagggcacatgcatataaagctgcaacagcattaaacaagaatgatcttgataaaggtatttcaatgggattattttcttatccagtattaatggcagcagacatattgatgtttaattctacgcatgtcccagttggatcagatcaaatacagcatttagaaatgaccagagatattgcaataagatttaatcat

SEQ ID NO: 300864 - DNA, 973 bp, Unknown
  Bacterial polypeptide expressing nucleotide sequence isolated from the Sargasso Sea
catgacccaaaaaaagcgttccttatccgggatcaaacccaccggtactccgcatcttggaaactatctgggcatgatcaaacccgcgatcaagatgcaggagacccaccagactttttattttattgccgattatcatgctctgaccagcatccgcgaaccggaaagtctaaaggaacatagctatgatctgacggcaaccttcgcttcccttggcatggatttcgaggagcatgcttttttccgccaatcagacatcccggaagttacagaactgacctggttcctggcctgcctgacaagcaaggggctgatggaacgggcccatgcattcaaagatgcgcagtccaaagggcaggatgtgaacatgggattgttttcatacccgatcctgatggcggcggatattttgatttatgattcccatgttgtgcctgttgggaaggaccagaaacaacatttggaaatcacccgggatctggccctgcgtttcaatcatctttacggagagacactggtggtcccggaagccatcattgaagatcaggtggcggtcataccaggattggacgggcagaagatgagcaaatcttataacaacgtgattcctctttttgcgcctgaaaaacaactgcgcaaggccatcatgaagatcgagaccgattccaaaaccgtggaagaagtcaaggatccggaaagttgtaatgtcttccaacttttccaatgttttgcggatcaatcagcccagcaggatttggccgagcagtatcgtgccggggggatgggttatggaaccgcgaaacagatctgttttgaagcgatccgtgacgaactcaaagacgcatcggaacactatcatcaaatccggggggatcatgcccatcttgaaggaatccttgaaggcggcaaggacaaggcccgcaaggttgcccgggatgtggttgaccgggtgcgtaacaaggtcggtctttaa

SEQ ID NO: 300865 - DNA, 1114 bp, Unknown
  Bacterial polypeptide expressing nucleotide sequence isolated from the Sargasso Sea
aatgtcatcagatgaatttgtcgttactccatggaatgttgaaggtaacatagattatgagaaattaatcaaacagtttggaactcagaagatttctccagaaattctatcaaaaatgcagcaaattacaggagaggatcatttcatgttaagacgaggaattttcttttcacatagggatctaaatttgatattggataattttgaaaaagggaaaaaattctttttgtatacaggcagaggtccatcaggtaacacacacattggtcatctggtaccatgggtttttgcaaaatggttacaagaaaaatttgatgttaacatctactttcagttaactgatgatgagaaattttttacaaaatcagatttgactttagaagatacaaataattttgcattagaaaatgcattagatttcattgcacttggttttaatccagagaaaacaaaaattattatcaatacacaaaatatcaaaaaattatatccaattgcggcacaggttgcaaaaaagattaatttttctaatactaaagcagtatttggatttacaaatgatacaaatgttgggatgattttttacacatcattacaatctgcgccttgttttattgaagatttacctgtgttaattccattaggtgttgatcaagatccacactttagaataacacgcgatattgcaccaaagataaacaaaccaaaaccagctttaattcataacattatgattccatctttaacaggtccaggtggaaagatgtctgcatcagaccaaaaaagtacaatttacactacagattctcctgaagaagtaaaaaagaaaatcaacaagtatggtttttctggtggacaggtggatattgaaaaacatagagagttgggaggaaatccagatatcgacgtatcatttcagtatctaagaatattctttgagccagatgatgagaaattaaagaagatttatgatgattacaaatcaggaaaaatgttaacaggagaattaaaagcaattctaatagaaaaaattaattcatttttgaaaattcatcaacagaaaagagaagaggctaaaaagagcttatcaaaatttttgttatcagatgaatag

SEQ ID NO: 300866 - DNA, 994 bp, Unknown
  Bacterial polypeptide expressing nucleotide sequence isolated from the Sargasso Sea
atgaaaaaacgaattctaactggaataacaacaactggcactccacatattggtaattatataggagctattagaccagctcttgaaatggcaaaagattcaagtgagtcctttttctttcttgcagattatcattctattattaaaaataataattcagaagatattaaaaattccgttaaaaatatagccttggcttggcttgcatgcggactcaatcctaataaaactattttttataaacagtcggatgtacctgagatacttgaattaacttggattcttaactgtgtaaccgcaaaagggcttatgaatagggctcatgcatataaagcggcaatttcactaaataaagaagatcctgacaaaggaattaatatgggtcttttttcatatccagtattaatgtctgctgatattttaatgtttgattcaacacatgttccagttggatcagatcaaattcagcacctagaaatgaccagagatattgctcagagatttaatcatttatataaacctatattaactatccctgagcctatgattcaagacagtgaaaatactgtacctggccttgatggaaggaaaatgagtaaatcatataacaatgtcattcctctattaggaagtgagaaagagttacgcaagtcagtaatgaaaatagttacaaattcattagaacctggtgaaccaaaagatattaacgattgcactgtttttgcattatatgaatattttgcttcagaaggtcagattgatgatttaaaaaaatcctataaagatggcataagctggggtgatgctaagggaatattatttgaattaatcaatgaagaactgaatccaataagagctaaatttgaagagcttaaaaataataatgattatttaaacgacgtattacacgagggggctaaaaaagcacgtgtgcttgctcaagaaaaaatcctagcaattaaagaaattattggtatatcaaaaattaattaat

SEQ ID NO: 300867 - DNA, 976 bp, Unknown
  Bacterial polypeptide expressing nucleotide sequence isolated from the Sargasso Sea
atgaaaaatagaattttaacaggtattactacttcaggcaccccacacttaggaaactattttggtgctataaggccaagccttgaattagctaaagaatcgacagattctttcttttttttagcagattatcattcgattattaaagtaaataatccccaagaagttacttcatccattgagaacattgctcttgcatggctttcgagtggattagatactaaaagctcttatttttacaagcaatctgatattagagagatattagaattaagttggatacttcattgtgtaacagcaaagggattaatgaatagggcacatgcttacaaagcattaaaagaaaataatgatgacgacaaaggaataaatatgggtttattctcttatccaattttgatggctgctgacatattaatgtttaattcaacacatgttcccgtcggtcctgaccagcttcaacatctagagatgacaagagatattgcaaatagatttaatcacatatttggtaatacttttgaaattccagaggcaattataaatgatgatgaatcaattccaggaatagatggaagaaaaatgagtaaatcttataacaatgtaattcctctgctttgtgatgaaaaaacattaaaaaaatcaattatgaagattgttactaactcacttgagcctggtgagcccaaagatcacaaaacctgtaatgtttttaatctttatacgaattttgcatcagatgaagaaatagctgaatttaagaaagaatataataatggcatatcttggggtgacgctaaaaacaagctttttgataaggctaatgattctctattaccaatacgtgaaagatattttgaattaaaagagcaaaaaaacttagtaaaagatcatctttccgacggagcaaaaaaagttcgtccattagcgcaagaattcattgaagaaattcgttcaaaaaataggtatatcttaa

SEQ ID NO: 300868 - DNA, 1186 bp, Unknown
  Bacterial polypeptide expressing nucleotide sequence isolated from the Sargasso Sea
gctgtcagggatgcgtccgagcggtcgtcttcacctcgggcactatcacggcgtgctgaagaactgggtcaagttgcagcacgagtacgactgcttcttctgtatcgtcgactggcacgccctgaccaccgaatacgccgaatgcggccagctctcccagcacgtcatggatatggcggtggactggctggctgctggcgtcagccccagctccgcgacgctgttcgtgcagtcgcaggtgccggaacacgccgagctgcacctgttgttgtcgatgatctgcccactaagctggcttgagcgcgtgccgtcctacaaggagcagcaggagcaccagggcagcaaggatctctccacctacgggtttctcggttacccgctgctgcaggctgcggatatcctgctgtaccgagccggacaggtgccggtgggcgccgatcagctcccccatatcgagtttgcccgtgaagtggcgcgccgcttcaaccacctgtacggcagcgagccggatttcgagcgcaaggctgaagctgccatcggcaagctgggcaagaagctcggtaagctctacagcaacctgcgcaaggcttatcaggagcagggtgacgcacaggccctggagacggcgcgggccttgctcaaggagcagaccagcatcaccctcggcgaccaggagcgcctgtacggctatctcgaaggtggcggcaaggtgattctgagtgagccgcagccgattcttgccgagttttcgcgggtacctggcctggacggacagaaaatggccaagtccagcggcaacgcgatattcctgcgcgatagcgatgccgagctcgaggaaaaactgcggcgcatgcccaccgatccggcccgcgtacaccgtgacgatccaggtgagccgcagcgttgccctgtgtggtcgctgcaccagctgtattccagcgccgagcaattgcattgggtgatcgagggttgtcgtagcgcctcgattggttgcctcgactgcaagagcacgctgtgctcctctctgcaggccgagcttgcgccgctgcagcagcgcgccatcgactacgaggaaagcccggacctggtgcgcagcattctcgccgagggcgccgagcgcgcgcgtgacgaggcgcgtgaaaccctggccgaagtgcgcatggccatgggcctgaattaccgttga

SEQ ID NO: 300869 - DNA, 976 bp, Unknown
  Bacterial polypeptide expressing nucleotide sequence isolated from the Sargasso Sea
aatgaaaaatagaattttaacaggtattactacttcaggcaccccacacttaggaaactattttggtgctattagaccaagccttgaattagctaaagaatcaacagattctttcttttttttagcagattatcattcaatcattaaagtaaataatccccaagaggttacctcatccattgagaacattgctcttgcatggctttcgagtggattggatactaaaagctcttatttttataagcaatctgatattagagaaatattagaattaagttggatacttcactgcgtaacagcgaagggattaatgaatagggcacatgcttacaaagcattaaaagaaaataatgatgatgacaaaggaataaatatgggtttattctcttatcctattttgatggctgctgacatattaatgtttaattcaacacatgttcccgttggccctgaccagcttcaacatctagagatgacaagagatattgcaaacagatttaatcatatatttggtaatacttttgaaattccagaggcaattattaatgatgatgagtcaattccagggatagatggaagaaaaatgagtaaatcttataacaatgtaattcctttgctttgtgatgaaaaaacattaagaaaatcaattatgaagattgtaactaactcacttgagcctggtgagcccaaagattacaaaacctgtaatgtttttagtctttatacaaattttgcatcagatgaagaaatagctgagcttaaggaagaatataataatggcatatcttggggtgacgctaaaaacaagctttttgataaggctaatgattctctattaccaatacgtgaaagatattttgaattaaaagagcaaaaagacttagtaaaagatcatctttctgacggagcaaaaaaggttcgtccattagcgaaagaattcattgaagaaattcgttcaaaaataggtatctcttaa

SEQ ID NO: 300870 - DNA, 493 bp, Unknown
  Bacterial polypeptide expressing nucleotide sequence isolated from the Sargasso Sea
tattttaaaaatccctcaaccaatcatcatgaagaatggttcaaaaataatgagtttaattgatggttcaaaaaagatgagtaaaagtgatcccaatgaaggcagtcgcattaacttattagatactcctgaaaaaatcacaaaaaaaataaaaagagcaaaaagtgacagttctattggaattgaatttaacaaccctgagagaccagaatctaaaaatcttttgatgatttattcaatattatctggcaaagaaatttctcaatgtgaaaatgaattctcagagactggatgggggacatttaaaaaattaattactgaacaacttattgaatcacttgaacctattcagaaaaaatataaattattaattaatgatccctatcaactaaataaaatccttgatgaaggaaaagaaaaagctgaagatttagcaaatcagactttaaaaagagttaaatcaaaattaggattctttgaaatggagcaataa

SEQ ID NO: 300871 - DNA, 976 bp, Unknown
  Bacterial polypeptide expressing nucleotide sequence isolated from the Sargasso Sea
atgaaaaatagaattttaacaggtattactacttcaggcaccccacacttaggaaactattttggtgctataaggccaagtcttgaattagcgaaagattcaaaagattctttcttttttttagcagattaccattcgattattaaagttaataatccgcaagaggtcacttcatctattgagaacattgctcttgcatggctctcgagtggattagatactaagagctcgtatttctacaaacaatctgatatcagagaaatcctagaattaagttggatactccattgtgtaactgcaaagggattaatgaatagggcacatgcttacaaagcattaaaagaaaataatgatgatgataagggaattaacatgggtttattctcttatccaattcttatggctgctgatatattaatgtttaattcaacccatgtacctgttggccctgaccagcttcagcatctagagatgacaagagatattgcaaatagatttaatcatatatttggtgacacttttgaggtccctgaggcaattattaatgatgatgaatcaattccaggaatagatggaagaaaaatgagtaaatcatataacaatgtaattcctttgctttgtgatgaaaaaacattaaaaaaatcaattatgaaaattatcactaactcactcgagccaggtgagcctaaagaccacgaatcctgtaatgtctttagtctttatcaaaatttcgcatcagatgaagagatagctgagtttaaagaagaatatgaaaatggcatatcttggggtgatgctaaaaataagctttttaataaagctaatgattctcttttacctattcgtgaaagatatttcgaattaaaagagcaaaaagatttagtaaatgactatctttcagatggagcaaaaaaggttcgtccattagcgcaagaattcattgaagaaattcgttcaaaaataggtatctcttaat

SEQ ID NO: 300872 - DNA, 372 bp, Unknown
  Bacterial polypeptide expressing nucleotide sequence isolated from the Sargasso Sea
tatgaaaacagttttttcaggaattcaacctactggaaaagttcatcttggtaatttactaggtgcgatcaataattgggttgagttgtctaatgaagaaaataaaaattatttttgtgttgtagaccttcattcgttgactacacatccaaatcctgaaacaatggaggaaaatatatttgaaactataaaagtgcttgttgcttctggaattaatttaaaaaattccaatatttatattcaaagtaatgtttcagaacatgtgcaactctcttggatattatcaaatttttgccaaattggggagttgcaaaggatgactcaatttaaagagaaagcagatcaattaggcaaccatgctggaatcctaac

SEQ ID NO: 300873 - DNA, 838 bp, Unknown
  Bacterial polypeptide expressing nucleotide sequence isolated from the Sargasso Sea
tatggctacaattctcactggagtacagtcaaccggaacccctcatttaggaaatttgctgggtgcaataattccctcaatcgaaatggcaaacaggtcaagtgaggaatcttatctttttattgcaaatcttcattctcttacacaaatcaaagatcctgaagttttgcaaaaaaacacattttctactgcagcggcatggctctcatttggtctagatacaaataaagcatgtttctttaaacaaagtgatgtaactgaggttactgaactagcatggtatttaagttgtttctatccataccaaagattaacattagcacactcattcaaagacaagtcggataatcttaaagacattaatgctggcttattttcatatccaatgcttatggcagcagatattttaatttatgatgccaatattgttcctgttggtaaggatcaactgcagcatcttgaaatgactagagatgtagcctctaaatttaataacctaatgggagatacattagtagtacctgaacctaaattacaagaagcttcaaaatatgttatcgggacaaatggcgaaaaaatgagcaaatcaaaaaacaacacaattgatatctttttaccagataaagagctaagaaagcaaataatgagaataaagacccaaagcctttcagttgaagatagaaaagacccagaagaatgtaatgtgttcaaaatttattctttaatagcgcctaatgaaaaaacagaagagttaaaacaacgatatatctctggtggtttcggatatggggaggcaaaggaaattctctttaatgaaataatagaaaaatttcacaaa

SEQ ID NO: 300874 - DNA, 1012 bp, Unknown
  Bacterial polypeptide expressing nucleotide sequence isolated from the Sargasso Sea
atggataaaaagaaaagaatattaactggaataagaccaactggagcacttcatctcgggcattacgttggcgcattagagacatggctagagtttcaagactcttatgaatctttctttcttatagcagactaccaagctcttggggataattttgatgatatagataaaataactgattctgttagacaggttgcaattgactggctttcagttggattggacccaaataaaagtaactttgttattcaaagctatgttcctgaacacgctgaacttactatgctactaagttttgtaactccactagggatgctcgagagaaatccaactttaaaaagtgaaatagatcaacttgcagtagagaaaagaactgtaggattttttaattaccctatgagtcaagtagctgatattttacttcctagagctgatttagttcctgtaggagaggatcaggccccacatatagaaatgactagagaagttgtaagaaaatttaatagaatctttgaaccaatatttagtgagcctggtataaaaattggaagggtgccaagactcaaagggactgatggtgacaataaaatgagtaaatcgaaaggtaacgtcatagagcttaggttttcagaagaccaagtaaataaagctgttatgtcaatgtacactgaccctaacagattgaaggcaactgaccctggaacagtagaagggaatcctgtttttgaatatcatgacgcctttaatgacgataaagaaaaagtagaagattttaaaacaagatacagagaaggaaaagttggtgatgtggaagttaaaaaagatttagctattgcaataaataattttctgcgaccaattagagaaaagagagactattatgaaaaaaatcctaaattggttgaagaagcattaatggcagggacagataatgctagaaaaattgctgatgaaacgatgagaatggttaggtctgcaatgaaaatagattcatatacttcaagatggtaga

SEQ ID NO: 300875 - DNA, 224 bp, Unknown
  Bacterial polypeptide expressing nucleotide sequence isolated from the Sargasso Sea
aatgaataaggccgtgcaatctgaatcagcaggtaaattcaaaaagcgcgttttttctggagtacagccttcaggtggattgaccctaggtaactacttgggcgcaattaaaagatttgttgagatgcaaaatgataattatgagacaatttattgtgtagttgacctccacgctattaccgtttggcaaaatccaagtatactcaggcaaaatacacgagaat

SEQ ID NO: 300876 - DNA, 506 bp, Unknown
  Bacterial polypeptide expressing nucleotide sequence isolated from the Sargasso Sea
aatgaagaaaagaattttaacaggtattacaacaactggtactcctcatataggaaattatttaggggctattaagcctgcgcttgatttagtagagccagataatgattcatatttttttcttgcagattatcatgctttgataaaacaaaataatcctaacgaaattgagaaaagtgttaaaaatgttgctctagcttggctttcatcaggcttagatcctgagatttctaatttttataggcagtctgatatcccagaagttcatgaattaacatggattttaaattgtagtgcatccaaaggactgctaaatagggctcatgcctataaatcaatgacggctgaaaatactcaagctggaaatgatgaggataaagctattaatatggggttattttcatatccagtattgatggcatcagatattttgatatttaatgcaacacatgtacctgttggacctgatcaagctcagcatatggaaatgactcgagatatagctg

SEQ ID NO: 300877 - DNA, 895 bp, Unknown
  Bacterial polypeptide expressing nucleotide sequence isolated from the Sargasso Sea
aatgaagagtcctttttctttttagcagactatcattcaattattaagaatcaaaattctaaattaattcaagattctgttagagatgtagctctagcatggctttcttgtggcttagatccaaataagacatatttttataagcaatctgatgttcctgaaattttagaactaacctggatacttaattgtgttactgcaaaaggtttaatgaatagggcgcatgcttataaggcagcaacatcgataaatgaaactgatcttgataaaggtatcacaatgggattattttcatatccagttttaatgtctgcagatatacttatgttcgattcaactcatgttccagtaggttcagatcagatacaacatcttgaaatgacaagagacatcgctgcaagatttaatcatttatataaatcattatttattttgcctgaaccaataataaatacccaagataaggttgtgcctggtcttgatggaagaaaaatgagcaaatcttatgacaatgtaatacctttattaggaagtgaaaaaaagcttaagaaatcaattatgaaaatagtcactaactctttagagccgggagtcgcaaaagatcatacaaattgtacagtatttgaactataccaatattttgccaatgcaaatgatatagatgaatttaaaaaagcatatgaagatggtatttcttggggtgaggcgaaggaaaaactttttaacatcataaattctgaacttctgcctattagggctaaatatgaagaattaataaatgataaagattatttaaacgatgttttgagtgaaggcgctaaaaaggcaagaattctggctattgaaaaaattaaagaagtaaaagaagttattggacttacaaaaatctcttaat

SEQ ID NO: 300878 - DNA, 652 bp, Unknown
  Bacterial polypeptide expressing nucleotide sequence isolated from the Sargasso Sea
aatggctaacaaaaataaatatcgtgttctaagcgggatacaaccatcgggttcccttcatctaggaaattattttggtatgatgtcacggatgataaaatatcaatctaaaaatgagttattctgctttatagcaaactatcatgctttgacgactttacctgattcaaaagaaatatcagccaacacctttaatgcggcttgtgattttttagcacttgggttagatccagaaaaatctactttttggattcaatcagatgtgcctgaggttacagaattaacttggatcctttcctctcaagctggggttggcttaatggatcgagcaacatcctataaggataagatagcgcaaggattaaaaccaaacatgggtttatatagttatccaattttaatggcagcagatattctactttttgatactgaaatagtccctgttggtaaagatcagaaacaacatcttgaaatgacaagagatattgctacaagatttaataatacttttggtgaagccttagtaatacctaaaccagatattcaagaagaaacaaagctgattcctggtatagatggacaaaaaatgagtaaatcatacaataacacgattccgatttttgcttctgaaaaaatatcagaaaaagaataa

SEQ ID NO: 300879 - DNA, 973 bp, Unknown
  Bacterial polypeptide expressing nucleotide sequence isolated from the Sargasso Sea
tatgaaaacagttttttcaggaattcaacctactggcaaagttcatttgggtaactttttaggtgcaattaataattgggtcgaaatgtctaataataaaaataaaaattatttttgtgtcgtagatttacattcattaactacacatccagatccgaaaacaatggaagagaatatattatctacagttaaggttttgattgctgcaggtataaatctgaataactcaacaatttatgtacagagcaaggtgcctgagcacgcacaattatcttgggtactatctaatttttgtcagataggagagttacaaagaatgactcagtttaaagaaaaatcatctgaattaggaaatcatgcaggaatactaacatatccaatattaatgacttcagatattctaattcataaagccaatgaagttcctgtgggtgacgatcaaactcaacatttagaattaactagaaatattgcggaaagatttaataacaaatatggagacatttttcctgttcctgagaaaacatctggaaaagttggagcaaggcttatgtccctcaggcatcctgaaaataaaatgtctaaaagtgcggatgatataaatggaacaatatattttgatgatactaaagataagattatgaaaaaatttaaatcatcagttacagattctgaagatgaaattagatatgatttagagtcaaaaataggaataagtaatttaattgatatatattcatcagtaaaaggaattagtcataaagaagtagagaaaaaattttcaagttctaaatatggagaatttaaaattgaagttggagaagcagtatcaaattatcttgaacctatattttctaaatatgattctttgagtgacaaagaaattatgtcactaatggacactaatctaaatgtagcaaaaagttctgcaaagaaaacaatggaagaagtaaatagtcttttaggtatctaa

SEQ ID NO: 300880 - DNA, 997 bp, Unknown
  Bacterial polypeptide expressing nucleotide sequence isolated from the Sargasso Sea
tatgaaacgcattttaacaggtattacaccaagtggctatcctcatttaggaaattatgttggtgcaattaagccctctttagacttagcaaaaaaagataatgagtcatttttattcatcgcagatttgcatgccattataaaaattagtgatgctaaacaacttaaagagcttaccaaaggaattgcattagcatggttagcttcaggattagatccagaaaaaacttatttttacagacaatctgatattcctgaagtgagtgaactcgcatggatattatcttgtgtcgcagaaaaaggtcttttaaacagatctcatgcctacaaagctgcaactgatttaaataaagaaaatggtaaaaaagatgttgaagaaggaatatcagctggactattttcttatccaatactaatggctagtgatattttatgtccaaatgctactcatgttccagttggaaaagatcagcagcagcacttagaaataacaagagacattgcagaaaagtttaataaaaaatttggaaatatctttaacattcctgaagctgtaataaatgaagagaaaacagttttaggtactgatggaaggaaaatgtccaaaagctacaacaacataattccattactttcaggcgaagatgaattaaaaaaatcagttatgaagataataacaaactcccaagaaccaggagaaaaaaaagaatgggaggataatattttatcttcgatatactcctcatttgcagacgaacagtccataaaagaactgcaaaacaaatttagcgatggaatagggtggggagatgcaaaaaaaattgttttcgaagacttaaacaagcttttaactcctatacgtgaaaaacatgctgaactaaaatctaaagaaaattatcttgaggaaattcttcaatctaatgcaaaaaaagtaagggcatttacaaagccattactagaagaagttaaaagttcaattggtatttctaaattctaa

SEQ ID NO: 300881 - DNA, 997 bp, Unknown
  Bacterial polypeptide expressing nucleotide sequence isolated from the Sargasso Sea
aatgaaacggattttaacaggtataacgccaagtggctatccccatttaggaaattatataggtgcaattaaaccttctctagatcttttggatgaaaaatgtgaatcatttttatttatagcagacctgcatgctgtcataaaagtttctgacccaaataaacttgaagaattgagcaccgctattgcaatggcttggctagcatctggattggatcccaatactactagtttttaccgtcaatctgatgttcctgaaattacagaactagcttggctgctgagttgtattaccgagaaggggcttttaaatagagcacatgcctataaagccgctgtggatcagaataatgaaagtggaaaaaaagaaatggatgaaggcatatccctagggcttttttcttatccactgttgatggcttccgacattttgacaccaaatgcaacacatgtaccagtaggtaaagatcaacaacaacatcttgaaataacaagagacattgctgaaaaatttaatagtaaatacggaaaattttttaatgtgccggaggcagtaattcaaaatgaaaaaacagttcttggtacagatgggagaaaaatgtcaaaaagctacaataatataattcctctactgtccaacgaaaaagaattgagaaaatcggtcatgaaaatagtcacaaactctcaagaacccggtgaaaagaaagagtggaaagataatacattatttgcaatttactcaagttttgcatcagttgaaaaacaagaaaacatgaaaaatctttttgaagatggaatcggttggggagacgcaaaacaaaaggtatttgaggacctaaatcaaatgttgctaccaataagagagaaatttatggagctcagtaacaataagaaatttatcgaggaaattctaaaatcaggagctgaaaaggttagattgcaaactgtaccagctctgaaagaagtaaaaaaattagtaggtattagtagactttaa

SEQ ID NO: 300882 - DNA, 1114 bp, Unknown
  Bacterial polypeptide expressing nucleotide sequence isolated from the Sargasso Sea
atgtcatcagatgaatttgtcgtaacgccatggaatgttgaaggcgacatagattatgacaaattaaccaaacaatttggcactcagaagatttcacctgaaattctatcaaaaataaagaaaatcacaggagaagatcatttcatgttaagaagaggaattttcttttctcatagagatctaaatgtaatcttagataattttcaaaaaggtaagaaattcttcttgtatacaggacgaggtccttcaggtaatacacacataggtcacttagttccatgggtttttgcaaaatggttacaagaaaaatttgatgtgaatatctattttcagttaacagatgatgaaaaattttatacgaaatctgacttgacgcttgaagacacaagtaaatttgcgttagaaaatgcgcttgactttattgcacttggattcaatccagaaaaaacaaaaattataatcaatactcgaaatatcaaaaaattataccctattgcagctcaagttgcaaaaaaaattaatttctcaaatacaaaagctgtgtttggttttacaaacgataccaacgtcggaatgattttctatacatctttacaatcagcaccatgtttcattgaagatttaccagtgttaattccacttggagtagaccaagatcctcatttcagaattacacgtgatgttgcaccaaaaataggcaaaccaaaaccagcattgatacacaacatcatgattccagcattgacaggacctggtggaaaaatgtctgcttctgatgaaaaatcaaccatttacacaacagattctccagaagtagtaaaaaagaagattaacaaatatggattttcaggaggacaggttgatattgaaaaacacagagaacttggaggaaacccagacattgatgtctcttttcaatacttgagaatatttttcgaacaagatgatgaaaaattaaagaaaatttatgaagattacaaatcaggcaaaatgttaactggagaattaaaagcaatcttaattgaaaagattaattcatttttgaagatacatcaacaaaagcgggaagaggcaaaaaagaatttatcaaaattcttactatcagatgaataaa

SEQ ID NO: 300883 - DNA, 997 bp, Unknown
  Bacterial polypeptide expressing nucleotide sequence isolated from the Sargasso Sea
aatgaaacggattttaacaggtataacgccaagtggctatcctcacttaggaaattatataggagcaattaaaccttctctagagctattggatgaaaaatgtgaatcatttttgtttattgctgatttgcatgctcttattaaagtttcagatcctgagcaattaaatcaattgacacatggcatagcactggcatggatggcatcaggcctagatcctgaaaaaacatatttctataggcaatctgacgtgccagaaataactgaattagcctggattttaagctgtgtaacagagaaaggtcttcttaaccgagcgcatgcatataaagctgcaactgatgttaataaagaaagtggcaagaaagacactgatgaaggaatctcaatgggacttttttcttacccactgctcatggcttgcgatatcctgactccaaatgcaactcacgtaccggtaggaaaagatcaaaagcaacatcttgagatagcgcgtgatattgctgagaaatttaataaaaaatatggtgaggttttcaatatacctgaagctgttataaacgaagaaaaaacagtgcttggtacagatgggcgaaaaatgtctaaaagttacaataatatcgttcctattctttcttcagaaaaggatctaaagaaatcgattatgtcgatagtcacaaattctcaagagcccggagaaaagaaagattggaaagataacactcttttctcaatatatagttcttttgctgctgataaccaaataaaggatatgaagcataagtatgaagatggtattggttggggcgatgcaaagaatattgtatttaatgatttaaatgacttgattaagcctattagagacaaatatctagaattagaatcaagaaaatctgatacagaagagattctacaaaccaatgctaaagaagttagaactcacactcaatctcttattaaaaaagtaaaagagtttgttggaataaagaagctttag

SEQ ID NO: 300884 - DNA, 970 bp, Unknown
  Bacterial polypeptide expressing nucleotide sequence isolated from the Sargasso Sea
atggctaaaattctcacaggagttcaatcaacgggaacccctcatttaggaaatttgcttggtgcaataattccctcaattaaaatggcaaataagtctaatgaagagtcatatttctttattgctaaccttcattcattaacacaaattaaagatgcaaaagtattacaggacaatacattttctactgcagctgcgtggcttgcatttggtttagatacaaataaagcttgttttttcagacaaagtgatgtctcagaagtaactgaattagcttggcatttaagttgtttcttcccatatcaaagattaacattggcgcactcctttaaagataaatcagacaatctaaaagatgtgaatgcagggttattttcatacccaatgcttatggcagcagatattctaatttatgatgcaaatattgttcctgttggtaaagaccaattacagcatcttgaaattactagagatgtagctgctcgatttaataatcaaatgggagaaacattggtaatcccagaaccaaaattacaagaagaatcaaaatatgttattgggacagatggagagaaaatgagcaagtccaaagggaataccatagatatctttctttcagatgaaaagctaaagaaacaaattatgaaaatacaaactcaaagcctttctattgaagataaaaaaaatcctaacgagtgtaatgtctataatatttactcattaattgcttctaaagaaaaaaaagaagcgcttaaaaaaagatatacaacaggaggtctaggatatggagaagcaaaagaaatcctatttaatgagattcttgaaagatttcaaaaagaacgagatttatataacacttaccatagtaacaagagtaaagtagaaggtgttttaaaggacggtgctaaaaaagcaagaaaacaggcacaaattgttcttaaaagagttagaagtaaggttggattttaat

SEQ ID NO: 300885 - DNA, 158 bp, Unknown
  Bacterial polypeptide expressing nucleotide sequence isolated from the Sargasso Sea
aatggataagccaactaaaagaattttatcaggagtacagccttcaggtgatcttcatttaggaaattatcttggtgcgataaaaaattttgttacacttcaaaaagaatatgaatgttttttttgtgttgttgatttacatgccattaccgttggca

SEQ ID NO: 300886 - DNA, 877 bp, Unknown
  Bacterial polypeptide expressing nucleotide sequence isolated from the Sargasso Sea
caagatgaatcagatttattctgctttgtagcaaattatcattcaatgacttcaattaatgataaagtcaaacttgaagaaaatacccgagaagcatttattgacctcttagctcttggaattgatccagatcaatcaacattttgggttcaatcacacgtacctgaagtaacggagctagcttggattttgtcaaactttgcatcagtaggcttgatgcagagatcaacttcctttaaagataaaatagccaatggtttgaaaccaaatatgggtctattttcatacccaattctaatggcagccgatattttattatttcaatctgaaattgtacctgttggtaaagatcaaaagcaacatctagaaatgacaagagatattgccataaaatttaataactcattcggtgaaattttcactatccctgaaatagaaatagataaaagtaatgatgttgtaattggaatagacaatcaaaaaatgagtaaatcatataataatactattcctatttttgctgataatgacactataaaagatcaagtaatgaatattgttactgattctgctggattgaatgaacccaaagataaacatacacctttatttaggatctactcattatttctaaatgatgaatctaagaaagagcttgcagataggtacgatactccaggtttaaaatatatggacataaaaaatgaactaatcgaaactatcatctccttttttgaattgcaaagatcaaaaagagagcaactacttgcaaaccctgataaggtaaatcaaaaaatgattttgggtcaaaataaagccaagaaaattgctcaaaagacacttcaagaagtgaaaagtgcaactggtttactataaa

SEQ ID NO: 300887 - DNA, 415 bp, Unknown
  Bacterial polypeptide expressing nucleotide sequence isolated from the Sargasso Sea
tatgacaaaaaatagaattttatcaggcgttcaaccatcaggcgatttgcatcttggtaattacttgggggcaattaaaaattttgtttcccttcaaaaagattatgaatgttttttttgtgttgttgatttacatgcaatcacggtatggcaagatccaaaagaattagcacaaaaaacaagagaagtaactgcagcgtttatagctagtggcattgatcctaatgaaaatattttatttgcacaatcacaagtgccacaacattctcaattagcttggatatttaattgtgttgctcgcatgggatggttaaatcgtatgacacagtttaaggacaaagcgggaaaagacagagaaaatgtttctgtgggtttattttcttatcccaaatttaatggcagccgaatatattaa

SEQ ID NO: 300888 - DNA, 886 bp, Unknown
  Bacterial polypeptide expressing nucleotide sequence isolated from the Sargasso Sea
aatgagtaataaacccgttgtattaagtggctgtcagccttcaggacaacttacccttggcaattacatgggtgcacttaaacagtgggtttccatgcaagacgaccacgactgcttatatatgatagtggatttgcatgctattactgtacgacaagaccctaagctgcttgctgaagcttgtctagacggtctttctctttaccttgcttgcggtattgatccacaaaaaagtactctgtttttgcaatcccatgtgcctgaacatgcacagctatcttgggtattgaattgttacgcccaaatgggtgagcttaatcgcatgactcaattcaaagataagtctgcgaagaacgaaaataacattaatgtaggcttatacagctaccctgtactccaagcagcagatattttgctataccaagcagataaagtaccggtaggtgaagatcagaagcagcaccttgaattgactcgtgacattgctacacgtgttaacaatctatacggcgatgtatttcgtctacctgacccatatatcccagactttggcgcgcgcatcatgagccttcaagagcctgaaaagaagatgtctaagtctgacaacaacccgaataacttcatcggcttattagaagatcctaagaagttagccaagaaaatcaaacgtgccgtgaccgactctgacgagcaagctaatatctactttaacccaactgaaaaaccaggcgtgtctaacttactgaccctactttcacttgcgacgggtaaatcaattaaagagcttgagcctgaatataccgacaaaatgtatggccaccttaaaggcgatgttgcagacgctgtgggtgctctacttgagccccattcaggcccgctatgctga

SEQ ID NO: 300889 - DNA, 668 bp, Unknown
  Bacterial polypeptide expressing nucleotide sequence isolated from the Sargasso Sea
gatggcaaataaaaaaagaattctttcgggagttcaaccaactggtgatttacatattgggaattggcttggggccataaataattgggttaatcttcaagagcaatatgaaacatttctttgtgtagttgatttgcacgcaatcacagcttcatataatcccaaagaattatctcagaacactatctctactgcggctttgtatgtcgcttgtggaatagatcctaatatatgctcaatttttgtccaaagtcagatttctgcacattcagaactttgttggatattaaattgtatgacccctataaattggatggaaagaatgattcaattcaaagaaaaatccattcaacaaggaaataatgtatccattggattatttgactatccgatcctaatggctgcagacattcttctatatgacgcagactttgtaccagtaggggaggatcaaaaacaacatcttgaacttgccagagatattgcacaacaaagaattaatgccagatttagtaaggataaaaatattttaaaaatccctcaaccaataatcatgaagaatgggtcaaaaataatgagtttaattgatggttcaaaaaagatgagcaaaagtgatcctaatgagggcagtcgcattaacttattagatcctcctgaaataatcacaa

SEQ ID NO: 300890 - DNA, 883 bp, Unknown
  Bacterial polypeptide expressing nucleotide sequence isolated from the Sargasso Sea
tgtgtagttgatcttcatgcaataactgtgagccaaaatccaaaagatctaaaatcaaatatacatgagacagtcgctacatttgttgctagcggaatagatcctaaaaaaagtataatttttaatcagtctcgggtgagcgctcactcacagtcagcgtggattttaagctgtgttgcgagaatgggatggttaaataggatgacacaatttaaggaaaaagctgggaaagataaagagaaagcaagtatcggtctttattcttatcctgttttaatggcagctgacattttattgtacgactcgactcatgtacctgttggagatgatcaaaaacaacatttggagttatgtcgtgatatagctcaaaaatttaacaatgattataaaatcgaaaatttttttgtagttcctgaacctttaatcaaaaaagaattttctagaattatgagtcttaaagacggtctcaaaaagatgagtaaatctgaggtatcagacctaagcagaataaatttaactgatgataaagatcaaataataaataaaattaaaaaagcaaaaactgatactctacctttgccttatacaattgaagaattagaaaaaagacctgaggctaaaaatctaattggtatttattcaagtttgatgaataactcacttcaaaaatcgattgatgaatttgcaggaaaaaatttttcagaatttaaagaaaaattatcagatgtagttgttaaagaaatcaatccgatttcattaaaaattaaagagttattagatgacaaagtctttttggaaaaaatacttaaaggtggatacgagaaagcgaatgaaattgcctctaaaaaaattaaaaaaattcacgaaattgtgggtttttgag

SEQ ID NO: 300891 - DNA, 856 bp, Unknown
  Bacterial polypeptide expressing nucleotide sequence isolated from the Sargasso Sea
ttttcaaatcctaaagaattaaagaataacgtattagaaacagtagcaagttttcttgctacaggtcttaatcctgaaaaaagcgttatatttaatcaatcttctgtatctggtcatgcagagctagcgtggatctttaattgtgtctcaagaattggatggcttaataggatgactcaatttaaagataaagctggttcagataaagaaaaagcaagtgtgggcctttatatttatccaaatttaatggcatccgatatacttctttataaagcaacccatgttcctgtgggagctgatcaaaagcagcatctagaattgtccagggatattgctcaaaaatttaataatgattttaattgtaaagacttttttcctcttccggaacctttaatcccaaaaaatgtttctagaataatgagcttaagagatggaacaaagaagatgagcaaatcagaagagtccgattattcaagaattaatctaaaagataatgctgatgaaattagtaaaaagataaaaaaagctaaatctgacactgagcaaataccagacaatttaaaacttttggaaaacaaacctgaagctttaaacttaataaatatctattctgaaatttcaaaaactagcatagaaaaagttttaaatgaaatgtcaggtaaagaatactcattcttaaaaacaaaattaacagaacttttaattagcgagataactccagttggaaaagagataacaaaacttttgggagataagccgcacttactgaaaatattggtaaaaggtagagaaaaagccaatattattgctgaggaaaacctaaaaaatatacgtgaaaaagttggattgatataat

SEQ ID NO: 300892 - DNA, 556 bp, Unknown
  Bacterial polypeptide expressing nucleotide sequence isolated from the Sargasso Sea
atggcaaataaaaaaagaattctttcgggagttcaaccaactggtgatttacatattgggaactggcttggggccataaataattgggttacgcttcaagagcaatatgaaacatttctatgcgttgttgatttgcacgcaataacagcctcatataatcccaaagaattatccaagaacactatctctactgcggctttatacgtcgcctgtgggatagatcccaatatagcctcaatttttgtccaaagtcagatttcagcacattcagaactttgttggatattaaattgtatgaccccaataaattggatggaaagaatgattcaattcaaagaaaaatccatacaacaagggaataatgtatctattggattatttgactatccaatactgatggctgcagacattcttttatatgatgctgactttgtaccagtaggagaagatcaaaaacaacatcttgaacttgccagagatattgcacaacagagaattaatgccagatttagtaaggataaaaatattttaaaaatccctcaaccaatcatcatga

SEQ ID NO: 300893 - DNA, 368 bp, Unknown
  Bacterial polypeptide expressing nucleotide sequence isolated from the Sargasso Sea
aatgaatgagattaaaaaaaataccgtcttatctggtgtgcaaccctcaggaaatcttcatataggtaattatcttggtgcaatcaagaattttgtaagcatgcaaagtgattataactgttttttttgtatagttgatttacatgctattacagtaaagcaagatccgaagatacttaaaagaaataccttagaagttgcagcgtcctacattgcatcaggtattgatccaaaaaaaagtgttgtatttaatcaaagcagtgtatccgcacattcagagctagcatggatatttaattgtgtaacaagaatgggttggttaaatcgcatgacacaatttaaagacaaagctggtaaagataaagaga

SEQ ID NO: 300894 - DNA, 818 bp, Unknown
  Bacterial polypeptide expressing nucleotide sequence isolated from the Sargasso Sea
tatgggtaaaaaaatattttctggtgttcaaccaactggcaatctacatttgggcaattatttaggtgcaatcaaaaactttgtagacctaaacaatgacgcggagaatgattgtatattctgtgtggttgatcttcacgcaattacagttaaacaagatccaaaagtgttaaaaaataatattcgagagacagtagctacttttatcgctagtggaattaaccctaaaaaaagtattatttttaatcaatctggtgtagcagctcattcagaaggagcttggattttgagctgtgttgctagaatgggttggttaaatagaatgacgcaatttaaggaaaaagcaggaaaagataaagaaaaagcaagcgttgggctttactcataccctgttttaatggcagcagatattcttttgtacgatgcaactcatgttcctgttggcgatgatcaaaaacaacatcttgagctatgtagagatattgctcaaaagtttaataacgattttgatcaaaacaactttttgaaagtacctgaacctttaattcaaaaagaattttctagaattatgagtttaaaagatggatcaaaaaaaatgagtaaatctgaattatcagatttcagtagaattaatttaacagatgataaagattcaatagttaataaaataaaaaaagcaaaaaccgatccgctaccgatgccaagtagcgttgaagaattaaatgaaagattagaagccagaaatcttcttggtatttattctagcttaaataattcaagtttaaaaaaaacagtcgaaactttttcaggtaaaaact

SEQ ID NO: 300895 - DNA, 871 bp, Unknown
  Bacterial polypeptide expressing nucleotide sequence isolated from the Sargasso Sea
gccatcaccgttcgtcaggatgctcagcagctgcgtaaagcaacgctcgatacgctggcgctgtacctggcatgcggtatcgatcctgaaaaaagtacaattttcgtgcagtctcacgtaccggagcatgcacagttaggttgggcactgaactgctacacctacttcggcgagctgagccgtatgacccagttcaaagataaatccgcacgctatgcggagaacatcaacgccggcctgtttgattatccggtactgatggcggcagacattctgctgtatcagaccaaccaggtaccggttggcgaagatcagaaacagcatctggaactgagccgcgatatcgcccagcgcttcaacgccctgtatggcgagatcttcaaagtgcctgagccgttcatccctaaatccggcgcgcgcgtaatgtcgctgctggagccgacgaagaaaatgtccaagtcggatgacaaccgcaacaacgtgatcggcctgctggaagatccgaaatctgtggttaagaaaatcaaacgcgcgatgaccgactctgaagagccgcctgttgtacgctacgacgtgcagaacaaagcgggcgtttccaacctgctggatatcctctctgcggttaccggccagagcattccggagctggaacagcacttcgaaggcaaaatgtatggtcatctgaaaggtgaagtcgcagaggccgtttccggtatgctgaccgagcttcaggagcgttatcaccgtttccgtaacgatgaagctttcctgcagaaagtgatgaaagacggtgcggaaaaagccagcgcacgtgcgtctgttacgctgaaagccgtttacgaagcgattggttttgtcgccaagccgtaat

SEQ ID NO: 300896 - DNA, 690 bp, Unknown
  Bacterial polypeptide expressing nucleotide sequence isolated from the Sargasso Sea
aatgagtactaattccaaacaaacagttttttcaggggtacagccaactggaaatttgcatttaggcaattatcttggagctatcaaaaattttgtagagcttcaaaagaaaatggaatgcatatattgcgtagtagaccttcatgcaattactgtttttcaggatccaaaacaattaaaaaaaagtatgctcgacacaaccgcaacattcattgcatgtggattagactttaaaaaaagtattatatttaatcaatcatcagtgagtgaacatgcagaacttgcgtgggtcttgaattgtgtttctagaattggctggatgaatagaatgactcaatttaaagaaaaggcgggaaaaaatagggaaaatgctagtgttggactttatgtttacccaaatctaatggctgcagatattctattgtataaggcaacacatgtacctgttggagatgaccaaaaacaacatttagaacttgtaagggatattgctcaaaaatttaataatgattttaaatcgaataattttttccctattcctgaaccattaattcaaaaaaaattatcaagagttatgagtttaagggatggaaaaaataagatgagtaaatcagatgagtctgagtattctagaattaatctccaagataccgaagatgaaatcagtaaaaaaataaaaaaagccaaaac

SEQ ID NO: 300897 - DNA, 841 bp, Unknown
  Bacterial polypeptide expressing nucleotide sequence isolated from the Sargasso Sea
atgcccaaaaaaatattttcaggtgttcagcccacaggtaatcttcatttaggtaactatcttggagctatcaaaaattttgttgatttaaataatgatgaccaaaatgaatgtattttttgtgtagtagatttacatgctataactattaagcaagataaagatgaattaaagaataatattcgagaaacagctgcaacatttatagcaagtggtatcgatccaagtaaaagtgttatttttaatcaatcaaaagttcatgcacatgcagaaggttcctggatgttaagttgtatggctccaatgggatggttaaatagaatgacacaatttaaagaaaaagctggcaaagataaggaaaaggcatctgttggtctgtatatttatcctatattaatggctagtgatatattgctttatgatgctacgcatgtacctgttggagaagaccagaaacaacacttagaattaactagagatattgctcaaaaatttaataaagattttgattgtgacgattttttaaaagttccacaaccattaataaaaaaaaatttttcaagaataatgagtttaaaagatggattaaaaaaaatgagtaaatcagatccatcagatcttagtagaattaatcttacagataataaagatcaaattatcaataaaataaaaaaagctaaaaccgactctttcccaattcctaatgaagagaaaaaattaaaagatagacctgaagcagagaatcttcttggtatctattcaagcaccttagatcaaactttggataaaaccttagaagaatttgggggtaaaaacttttcagatcttaaaagtcaattag

SEQ ID NO: 300898 - DNA, 878 bp, Unknown
  Bacterial polypeptide expressing nucleotide sequence isolated from the Sargasso Sea
cactatttaggtgctattaaaaattttgttgaacttcaaaacgaaaaaaatactgaatgcatctattgcattgtcgatttacatgcaattacagtaaagcaagatccaaaagaattaagaaaaaacataagagaaactttggcgactttcatcgcaagtggattaaatgaaaaaaaatctgtaatttttaatcaatcatcagtatctgctcattctgagggtgcgtggattttaagttgtgtagcaagaatgggttggttaaatagaatgactcagtttaaagaaaaagcaggtaaggacaaagaaaaagctagtgtagggctttacgcttacccaattttaatggcagctgatatattactttatgatacaactcatgtaccagttggagatgatcaaaaacaacatctagaattatgtagagatattgctcaaagatttaataatgattttcaagcacctaactttttaaaagtaccagagccgttaattcaaaaatatttttcaagaattatgagtcttaaagatggaaaaaaaaagatgagcaagtcggatccctctgatttgagtagaataaatcttacagatgataaagataaaatcataaataaaattaaaaaatcaaaaactgatacaatgccgatgccaagtgaagaggaaaatttaaaaaatagacctgaggtattgaacttactagaaatctattcaagtttgtcagacgaaagtgttgaaaaatcaaaaaaggaattcagtggaaaaaatttttcggtttttaaagaaaaactatctaatttattagttgaaaaaattgaaccaatttcaaaagaaataaaaagattgttaagcgatgaaaaaaatttagatgagattttgttaga

SEQ ID NO: 300899 - DNA, 862 bp, Unknown
  Bacterial polypeptide expressing nucleotide sequence isolated from the Sargasso Sea
tgttgacttacatgctatcacggtatggcaagatccaactttattagcacagaaaacacgtgaagtaactgcagcatttatagctgctggtattgatccaaaaaaaaatgtattgtttgttcaatcacaagttcctcagcatgcacaattagcatggatttttaattgtgttgcacgaatgggttgggttaatcgaatgactcaatttaaagacaaagctggaaaagatcgggaaaatgtttctgttggattattctcttatccaacattaatggcagcagatatcctaatttaccttgcaacacatgttcctgtaggagatgatcaaaaacaacacttagaactaacaagagacatcgctcaaaaatttaatgctgatttcgaaactgattttttccctattcctgaaccattaatatttggagaagctacaagagttatgagtttacgggatggtactaaaaaaatgagtaagtctgatccatcggattattcacgtataatgttaaatgatgatgaagattctatagttcaaaaaattagaaaagcaaaaacagatcccaatccattgccagataatttaacagatgcacagaaaagaccagaagcaataaatttactttctatctttgcagcattaagtgaaaaagacactgaagaaataattagcatttatgctggaaaagaattttctattttcaaaaatgatttatcagatttgacctcaagtatattatctcctatttcaaaagagatgaaaaaacttctagcagataagcaatatttagattcaataattatagaaggaagagacaaagcaattagtgtgcagaaccagttttgtcgaaagtatacaaaatta

SEQ ID NO: 300900 - DNA, 868 bp, Unknown
  Bacterial polypeptide expressing nucleotide sequence isolated from the Sargasso Sea
catgctataactgttaagcaagataaaaatgaattaaagaataatattcgagaaacagctgcaacatttatagccagtggtatcgatccaagtaaaagtattatttttaatcaatcaaaagttcatgcacatgcagaaggttcttggatgttaagttgtatggctccaatgggctggttaaatagaatgacacaatttaaagaaaaagccggtaaagataaggaaaaggcttctgttggtctatatatttatcctatattaatggctagtgatatattgctttatgatgctacacatgtacctgttggagaagaccagaaacaacacttagaattaactagagatattgctcaaaaatttaataaagattttgattgtgacgattttttaaaagctccacaaccattaataaaaaaaaatttctcaagaataatgagtttaaaagatggattaaaaaaaatgagtaaatcagatccatcagatcttagtagaattaacctaacagatactaaagatgaaattatcaataaaataaaaaaagctaaaactgactcttttccaattcctaatgaagacaataaattaaaagaaagacctgaagcagagaatcttcttggtatctattcaagtattttagatcaaacttttgataaaaccctagaagaatttggaggtaaaaatttttcagatcttaaaattaaattagccgaagtgttatcaagtaaaatttccccaatttctgatgaaattaaaaaattaattaatgattatcaatatttagacaaaattcttgcagaaggagctggtaaagctgaggaaattgcaggaaaaaagatagtagaaatgaagaaaattataggtttttaaa

SEQ ID NO: 300901 - DNA, 879 bp, Unknown
  Bacterial polypeptide expressing nucleotide sequence isolated from the Sargasso Sea
atttgttcagatgcagaatgacgagtacgaaacaatttattgtgtagttgacctgcacgcgattacagtttggcaaaatccaaaaatgctcaggcaaaatataagggagttagcggcttcctttatcgcatcagggctcgatccagataaatctgtcttatttaatcaatcagcagtacctgaacatgcccagttaggctgggtctttaattgcgtggctcgcatgggctggatgcaaagaatgacacagtttaaagataaagcgggaaaaaatgctcagaatgcatcgctaggtttatttggttatcctgcgctaatggcagctgatattttagcctatcatgcaactcatgttccagttggcgatgatcagaagcagcaccttgaacttaccagagatatagccataaaattcaatcatgattatgaaattgatttttttccagtgactgagcctgttattggaggaccagcagctcgagtaatgagcctgcgtgacggtacaaaaaaaatgtctaagtctgacccttcagatttaagtcggataaacatgacagataactcagatatgattgcaaataaaattagaaaagcaaaaacagatcaatatggccttccgtccgaaccaaaaggtctggaagggagagctgaagcacagaatttagtatcaatatacgcggcactcgcagaccaaagcgtggaaagcgttttaagcgaaattggcgggaaacagttttcagattttaaacctatgttgatagaaagagctaccgaagtactgtcaccaatttccaatgaaatgggtcgcataatgcaggatatacctcagttagataaagtattgaatgatggcgcacttaaagctaaatccatagccga

SEQ ID NO: 300902 - DNA, 850 bp, Unknown
  Bacterial polypeptide expressing nucleotide sequence isolated from the Sargasso Sea
tatgagcaaaaaaattttttctggagttcaaccaacaggaaatcttcatttaggaaattatattggtgcaattaaaaattttgtagatttacaaaatgatccaaataacttttgtatttattgtgttgtagaccttcacgcaatcactgttaaacaaaatccagaagagttgaaaaaaaatattagagaaactacagctgcttttattgcaagcggactagattataaaaaaagtataatttttaaccaatctttagtcccggctcactcagaaggatcttggatattaagctgtatagctagaatgggttggttaaatagaatgacacaatttaaggaaaaagctggtaaagataaagaaaaagcaagtgttgggctatatatttatcctatcctaatggctgctgatattcttttatatgatgcaacacatgttccagtaggtggtgatcaaaaacaacacctagaactatcaagagatatagcaaacaaatttaatttagattttaattcaccagattttttaattgcaccagaacctttaatacaaaagaattttgcaagaataatgagtttgaaagatggaaataaaaaaatgagtaaatcagatccttctgagttaagcagaataaatttaaatgatagtactgatgaaatttttaataaaataaaaaaagcaaaaacagatactcaaccacttccagaaaatgaaaatgacttggctactcgcccagaggcagaaaatttattagggatttattctagtttaaatgatcaatctataaaaaatacgattaatgaattttcaggaaaaaatttttcagagttcaaagaaaaattagctagctta

SEQ ID NO: 300903 - DNA, 517 bp, Unknown
  Bacterial polypeptide expressing nucleotide sequence isolated from the Sargasso Sea
tatgaaaaaagaattagtattttctggagttcaacctacaggtaatttgcatttaggaaattatttaggagctttaaaaaattttgtttcacttcaaaattcaatgaattgtttgtattgtgtagtagacttacatgcaattacaacgttccaaaatccaaatgaattaaaatcgaatattttagagacaacggcaggctttttggcctctgggttagactcaaataaaagtattatttttaaccaatcatcagttagtggtcacgctgaattagcttggatcctaaattgtgtttgtagattaggatggttaaatcgtatgacacaattcaaagacaaagctggtaaagacaaagaaaaagcaagtgttggtctatacatttacccaaatttgatggcagcagatattttactgtataaagccacacatgttcctgtaggtgcagatcagaagcaacacttagaactatcaagagatattgcccaaaaatttaataatgactttaaaataaaagac

SEQ ID NO: 300904 - DNA, 358 bp, Unknown
  Bacterial polypeptide expressing nucleotide sequence isolated from the Sargasso Sea
tatgggcaaaaaaattttttcaggtgttcaacctacaggaaatcttcatttaggaaattatttaggagctataaaaaactttgtaaatttaaataatgataatgaaaataaatgtattttttgtgttgttgatttacatgctattacaataagacaaaatccaaaagaattaaaaaataatattaatgaaaccgttgccacatttattgcaagtggaatagatcataaaaaaagtataatttttaatcaatcaaaagtaccagctcatgctgagggtgcttggatattaggttgcgtttgctcgatgggttggctgaatagaatgacacaatttaaagagaaagctggcaaagataag

SEQ ID NO: 300905 - DNA, 658 bp, Unknown
  Bacterial polypeptide expressing nucleotide sequence isolated from the Sargasso Sea
gatggcaaataaaaaaagaattctttcgggagttcaaccaactggtgatttacatattgggaattggcttggggccataaataattgggttacgcttcaagagcaatatgaaacatttctatgtgtagttgatttgcacgcaataacagcctcatataatcccaaagaattatctaataacactatttctacagctgctttatacgtcgcttgtgggatagatccaaatatatgttcaatttttgtccaaagtcagatttcagcgcattcagaactttgttggatattaaattgcatgaccccaataaattggatggaaagaatgattcaattcaaagaaaaatccatacaacaaggtaataatgtatctattggattatttgactatccaatacttatggctgcagacatccttctttatgatgctgacttcgtaccagtaggtgaggatcaaaaacaacaccttgaacttgcgagagatattgcacaacagagaattaatgccagatttagtaaggataaaaatattttaaagatccctcaaccaatcatcatgaagaatggttcaaaaataatgagtttaattgatggttcaaaaaagatgagcaaaagtgatcctaatgagggcagtcgcattaacttattagatccaccctga

SEQ ID NO: 300906 - DNA, 592 bp, Unknown
  Bacterial polypeptide expressing nucleotide sequence isolated from the Sargasso Sea
tactttacgacgcaacacatggttccagtggggagaggatcaaaagcaacatttagaattatcaagagatatagctcaaaaatttaattcagattattcttgtcataactttttaaaagttcctgaaccattgattcagaaaagtttttcaagaataatgagtttaaaagatggaaaaaaaaaaatgagcaaatcagatccatcagacctgagtagaattaatttgacagataataaagatgaaataataaacaaaattaaaaaagcaaaaacagataatttttctatgccagataaatcaaatggattggataaaagacctgaggtggaaaatttattaggaatttatgcaagtttaaataatcaaagtttggaaaactcaattaaagagtttagtggaaataatttctctgattttaaaaataaattagcagaattggttgcagaaaaaatatcaccaatatctaaagaaataaataaactattaaaagaaactactctaatagataaaatattgctagaaggtagtgaaaaagctcaagatatcgcctccaaaaaagttaaagaaatgaagaaaatcattggattttaa

SEQ ID NO: 300907 - DNA, 856 bp, Unknown
  Bacterial polypeptide expressing nucleotide sequence isolated from the Sargasso Sea
acccaaacaagatccaaaagaacttaaaaataatataagagaaacagtagcaacatttgttgcaagtggtatcgatccaaaaagaagtattatttttaatcaatcccaagtgaaagcacattctgaaacagcatggatattgagttgtgttgcaagaatgggatggttaaatagaatgacacaatttaaggaaaaagctggaaaagataaagagaaagctagcgtgggattatattcatatccagttttaatggcagcagacatattactttatgatacaagtcatgttccagttggagaggatcaaaagcaacatttggagctttgtagagatatagctcaaaaatttaacaatgattttgaagtaatagatttttttaaaatacctgagcctttgatacaaaaagaattttcaagaattatgagccttaaagatggttcaagaaaaatgagtaaatctgaaccttcggatttgagcagaataaatttaactgatgataaagatcaaattataaataaaattaaaaaagccaaaactgatacacttcctttgccttctaatgaggaagaattgaaagatagaccagaagcaaagaatttattaggaatttattctagtttaactaatacttctttagaaaaaaatataaataatttttcaggtaaaaatttttcagaatttaaagaagatttatcacaagctctagttgataaaatattgcctatttcaagggaaattaaaaagcttttaaaagaaaaaaagtatttagacgaaattcttttgaatggttacgaaaaagctaatgaaattgcatcaaaaaaagtaaataagatacatgaaattgtgggtttttag

SEQ ID NO: 300908 - DNA, 841 bp, Unknown
  Bacterial polypeptide expressing nucleotide sequence isolated from the Sargasso Sea
tatgaaaaaaaaaaaaatagtattttctggagtccaaccttctggaaatttacacttagggaattatattggagcaattaaaaattttgtttcacttcaaaatgaaaataagtgtatttactgcgtagttgatctccatgctataacagtttttcaaaaccctgaaaaattaaaaaataacactttagagacaacagctgcttttcttgcctcaggtttggatgaaaataactgtattattttcaatcaatcttctgtgaagggtcatactgaacttgcatggataatgagttgcgtatcaagaattggatggttaaacagaatgactcaattcaaagataaagcaggtaaagataaagaaaaagccagtgtcggtctatatatttatcccaacttgatggctgcagatattctattgtataaagctactcatgttcctgttggagctgatcaaaaacaacatttggaattatccagagatattgcacaaaaatttaataacgactttaaagttcctgatttttttccaataccagaacctttaattcaaaaaaaagtttctaaagtaatgagtttaagagatggaaaaaaaaagatgagtaaatcagaaacttcagattattctagaataaatcttacagataatgctgacgaaataaaacttaagataaaaaaagctaaaacagatagtggtgttatgccaaacaatgtagatgatttaaataagaggccagaagcattaaatctaattacaatattttctgacctaaatggcaatacaattgataagacactttcacagtttagaggaaaggaattttcccactttaaaaataattta

SEQ ID NO: 300909 - DNA, 849 bp, Unknown
  Bacterial polypeptide expressing nucleotide sequence isolated from the Sargasso Sea
aaatcccaaaagatttaaaatcaaatatacatgagacagtagctacatttgttgctagtggaatagatccgaaaaaaagtatcatttttaatcaatctcaagtgagtgctcactcagaggcagcgtggattttaagctgtgttgcaagaatgggatggttaaatagaatgacccaatttaaagaaaaagcaggaaaagataaagaaaaagcaagtatcggtttatattcgtatcctgttttaatggcagctgacattttattatatgactcaactcatgtaccagttggagatgaccaaaaacaacatttggagttatgtcgtgatattgcacaaaaatttaacaatgattatgaaattgaaaatttttttatagttcctgaacctttgattaaaaaagaattttctagaattatgagccttaaagacggtctcaaaaaaatgagtaaatcagaaatatcagatctgagtagaataaatttaactgatgataaagatcaaataattaacaaaattaaaaaagcaaaaactgatactttacctttaccttccactattgatgaattagaaaaaagacctgaagctaaaaatttaattggtatctattcgagtttaatgaacaatactttccaaaaaacaatagatgaatttgccggaaaaaatttttcagaattcaaaaaaaaactatcagatatagtggttaatgaaatcagtccaatttcattaagaattaaagaattattaaatgataaagtttttttggaaaaaatacttaaagagggatacgagaaagcgaatgaaattgcctcaaaaaaaataaaaaaaattcatgaaatagtaggtttttgag

SEQ ID NO: 300910 - DNA, 442 bp, Unknown
  Bacterial polypeptide expressing nucleotide sequence isolated from the Sargasso Sea
atggcaaataaaaaaagaattctttcgggagttcaaccaactggtgatttacatattgggaattggcttggggccataaataattgggttacgcttcaagagcaatatgaaacatttctatgtgtagttgatttgcacgcaataacagcctcatataatcccaaagaattatctaaaaacactatctctacagcggctttgtacgtcgcttgtgggatagatcccaatatatgctcaatttttgtccaaagtcagatttcagcgcattcagaactttgttggatattaaattgcatgaccccaataaattggatggaaagaatgattcaatttaaagaaaaatccatacaacaaggtaataatgtatctattggattatttgactatccaatacttatggctgcagacatccttctttatgatgctgacttcgtacccagta

SEQ ID NO: 300911 - DNA, 196 bp, Unknown
  Bacterial polypeptide expressing nucleotide sequence isolated from the Sargasso Sea
atggtggaaaaaaaattagataaaggcttagttttttctggggtacagccaacaggtaatctacaccttggtaattatttaggtgcaattaaaaattgggttaatttgcaaaaagaaaaatcctgcattttttgtatagtagatctacatgctatcacagttgcagagaatagattcaaattaaaagagaatacat

SEQ ID NO: 300912 - DNA, 880 bp, Unknown
  Bacterial polypeptide expressing nucleotide sequence isolated from the Sargasso Sea
atgactaaacctatcgtattgagcggggcccaaccgtcgggccagctgaccatcggcaactacatgggggccctgcgtcagtgggtcaacatgcaggatgacttcgactgcctctactgcatcgtcgatctgcacgccatcaccacccgccaggagccggccgccctgcgcaaggcctgcctggacgccgctgccctctatctggcggtcggcatcgatccggccaagagcaccgtgttcatccagtcccacgtaccgcagcatgccgagcttggctggatcctgaactgctacacccagatgggcgagctgtcgcgcatgacccagttcaaggacaagtccgctcgcttcgagaacaacgtcaacgtcggcctgttcggttatccggtgctgatggcggccgacatcctgctctatcaggccaatcaggtgccggtgggcaacgatcagaagcagcatctggagctgacccgcgacatctgcacccgcttcaacaacctctacggtgaggtgttcaccctgccggagcccttcattccgaccgagggcgcccgggtgatgagcctgcaggatccgaccaagaagatgtccaagtcggacgacaatgaggccaacttcatcggcctgctggaagatcccaagcagatcgtcaagaagatcaagcgcgcggtgaccgactccgacgagccggcggtggtgcgtttcgatccggagaacaaaccgggggtctccaacctgctgaccctgatgtccggggtgaccggccgttccatccccgagctggagcagcatttcgaaggcaagatgtacggtcacctcaagaccgaaaccgccgaggcagtggttgccctgctggagccgattcaggcccgcttccacg

SEQ ID NO: 300913 - DNA, 728 bp, Unknown
  Bacterial polypeptide expressing nucleotide sequence isolated from the Sargasso Sea
ttgcattgcgagaataggttggttaaataggatgacacaatttaaagaaaaagctgggaaaaaaaaagataatgcttcagttggtctatttagctatcctgtattaatggcggcagacattttgctttatagggcaacccatgtcccagttggagatgaccaaaaacaacatttagaattaacaagagatattgcaatttcatttaataatttttttaaaaacaaaattaatgcagatttttttaccttacctgatccaataatcacgggacctgcaaaaagaattatgagtttacgtgatggtgaaaaaaaaatgagtaaatcagatatttcagatgcatccaggattaatttgactgatgaagatgacattatacaaaaaaaaattcaaaaagctaaaactgattcgctacctattcctgacactgaggaagagctttccggaaggtcagaagctataaacttgataaatatttattcagcattaagtgatatcaaggtaagcgaggttttaaaaaatttttctggcaagggcttttcaattttcaaaaaagatttaacagatttaatgatacagaaagttaatccgatatctcatgaaatgaagaaaatgttgaatgacaaagaagaaataaaaaaaatattagcagacggaaagctaagagctaaggaaatcgctgttccggtaatgaaagatataaaaaatattattggctttatttattaaa

SEQ ID NO: 300914 - DNA, 776 bp, Unknown
  Bacterial polypeptide expressing nucleotide sequence isolated from the Sargasso Sea
aatgattgaaaccaatagccgtacaattttatcaggtgttcaaccttcaggagatttgcacataggaaattatttgggcgctataaagaactttgtaaaaatgcaaaacgatttcaaatgctttttttgtgttgtagatcttcacgctattactgtaaaacaaaatccagagcttttatcacgcaacactcttgaagttgttgcgacatatattgcatctggtattaatccagaaaaaagcgtcatctttaaccagagtagcgtctctgctcatgctgaattatcgtggatatttaattgtgttactagaatggggtggttaagtagaatgacacagtttaaagataaagctggtaaagatagagaaaatgctagttctggattatttatatatccaaacttgatggctgcagacattctcttatataaagctacacatgtaccagtaggtaatgaccaaaaacagcatcttgaattaaccagagatattgcacaaaaatttaatagagattttaattgtgaaaaattttttccaatacctgagccgattatagaggataacacttcaagaataatgtctttaaaagatggaaatcaaaaaatgagtaaatctgatttatcggataattctcgaattagtatgacagatgagactgactcaattgtaaaaaaaattaaaaaagccaaaacagcagatgtaaatatgccaagtaccatgaatgaaattttaaaattaagtgagataaataatttactcaacatatattctggatttt

SEQ ID NO: 300915 - DNA, 466 bp, Unknown
  Bacterial polypeptide expressing nucleotide sequence isolated from the Sargasso Sea
tatgggaaaaaaaattttttctggcgttcaaccaacgggcaatcttcacttaggtaattatttaggagcaattaaaaactttgtccaattaaataatgacaatgaaaatgaatgtgttttttgtgtagtggatcttcatgcgattacagtaagtcaagatccaaaagtattaaaaaataacattaatgaaacagtggcaacttttgtagctagcggaattgatccaaaaaaaagtattatttttaatcaatcccaagttagtgcacatgcagaagctgcttggatactcagttgtgttgcaagaatgggctggttaaataggatgacacaatttaaagaaaaagcaggaaaggataaagaaaaggcaagtattggactttattcttatccagttttgatggccgctgatatattattatatgatgccacgcatgttcctgtaggtgatgatcaaaaacaacatttg

SEQ ID NO: 300916 - DNA, 631 bp, Unknown
  Bacterial polypeptide expressing nucleotide sequence isolated from the Sargasso Sea
atgaaaaaaaaaattttttctggagttcaaccaactggaaatttacatttaggaaattatttaggagcaataaaaaattttgttgcactacaaaatgaaaaagaaaatgaatgtgtatattgtgttgtagatttacatgcaattactgttaaacaagatccaaatattttaaaggataacataagagaaacaacagctgcctttttagctagtggattagattataaaaaaagtataatttttaatcagtctctagtacccgcccatgcagaaggttcttggattttaggatgtattgcaagaatgggatggttaaatcgtatgacacaatttaaagaaaaagctggcaaagataaagaaaaagcaagtgtcggtttatatatatatccaatacttatggctgctgatattttgctatatgattcaactcatgtccctgttggagaagatcaaaaacaacatttagagttatctagagatattgctcaaaaatttaatttagattttaattctccagatttccttaaagcacctgagccattaatacaaaaaaaatttgcaagaattatgagtttaaaagatggaacaaaaaaaatgagcaagtctgacccttcagacttaagtagaatta

SEQ ID NO: 300917 - DNA, 732 bp, Unknown
  Bacterial polypeptide expressing nucleotide sequence isolated from the Sargasso Sea
aaggtgcctggattttaagctgtgtggctcgtatgggatggctaaatagaatgacgcaatttaaagaaaaagcaggaaaggataaggaaaaagccagcgttggattatattcttatcctgttcttatggcagctgacatcttgttatatgatgccacccacgttcctgttggggatgatcaaaagcaacatcttgagttgtgcagagatatagctcaaaaatttaataatgattttggtgtggaggattttttaaaagttcctgagcctttaattcagaaagaattttctaggattatgagtttaaaggatggatcaaaaaaaatgagtaaatctgagttatcagatttaagtagaataaacttaacagatgataaagatcaaataataaataaaataaaaaaagctaaaacagatactttaccaatgccaaaagatattaaagaacttgagggaaggctggaggcacaaaatttattaggaatttttgctagcttgagtaattcaactttagaaacttccatagaaaaatttgctggtaagaatttttcagaatttaaacaacagctatctgaattattagttaataaaattatcccaatatctgaggagataaaaaaattacttcaagaccaatcatatctcgattctatccttctagatggagttgaaaaggctaacaaaattgcgtcaaaaaagatcaaaaatttaaaagaaactgtaggtttttaac

SEQ ID NO: 300918 - DNA, 622 bp, Unknown
  Bacterial polypeptide expressing nucleotide sequence isolated from the Sargasso Sea
atggcgagaattttaacaggcatacaatctactggcactccacacttagggaacttgttaggtgcagtaattccagctattaaattagccaaagcttcaaatgatgattcattcctttttatagccgatttacattctcttactcaaattaaaaaaggagaaaaacttagagacaacacattttccactgctgctacatggctagcttgtgggctagatattgaaaaaacccacttttatagacaaagtgatgttactgaagttacagaattagcatggtttttaaactgtttttttccttatcagcgtttaactttagcacactcttttaaagataaatcaaacaatctttctgatattaacactggactatttacttaccctatgctgatggctgctgatatccttctttacgatgccgaaattgttccagtaggaagagatcaacttcaacatttagaaataacgcgtgatgtcgcatctcgttttaatcatcaaatgggaaaaacctttgttattccagaaggtaaggttcaagaaaacacccaacatattcctgggacaaatggtgaaaaaatgagtaagtcaaaaaacaacattatcaatgttttctccaaaagaa

SEQ ID NO: 300919 - DNA, 742 bp, Unknown
  Bacterial polypeptide expressing nucleotide sequence isolated from the Sargasso Sea
tcccaattagcatgggcgtttagctgtattgcaagaatgggatggttaaaccgcatgacacaatttaaagataaggctggaaaaaatagcgagaacgtctctgttggcttatattcttatccaacactaatggcagcagacatattaatataccttgcaacacacgttcctgtgggagaagatcaaaagcagcatttagaattaactagagatatcgcacaaaaatttaataacgattttaagaatgatttatttccaattcctgaaccattaattttaggagaggctaaacgggtaatgagtttgcgagatggaactaaaaagatgagtaaatcagatccctcagattattctcgtataatgttatctgatactcaagatgaaattatacaaaaaattaaaaaagcaaaaactgacccactacctcttccagataatttagttgcagcaaaaaacagacctgaggctctaaatttattgacattatatgcggctttaagcgatgcagatactgaaacagttattaaaaattatgcaggaaaagatttttcgcaatttaaaaaagatttaggagatttagcatcatcaaaacttgcaccgatatctttagaaattaataaattgatgaatgacaaggattttctcgattctataattaatacaggcaaggaaaaagctatctcagtagcagagcctgttttaaagaaagtgtatgaaattattggttttttatctagataat

SEQ ID NO: 300920 - DNA, 731 bp, Unknown
  Bacterial polypeptide expressing nucleotide sequence isolated from the Sargasso Sea
gggttcttggattttgggatgcatagctagaatgggttggttgaatagaatgactcaatttaaagagaaagctggaaaagataaagaaaaagctagtgttggactatatatatatccggtattaatgacagccgatattttattgtacgacgcaacccatgttcccgtaggtgaagaccaaaaacaacatttagagttatccagggatattgctcaaaaatttaatttggattttaatgcgccagattttcttagagttcctgagcctctaatacaaaaaaatttttcaagaataatgagtttaaaggatggaaataataaaatgagcaaatccgatccttctgatctaagtagaataaatttaactgatagcaaagatcaaatttttagtaagattaaaaaagcgaaaactgataatgatcttttgccgagtgatgataaaaatttaaatcaaaggcctgaggttgaaaatttgcttgggatatattcaagcttaaacaaccaaagtttaaataattcaataaaagagtttagtggaaaaaacttctcagaatttaaagcaaaattagctgatctagttgttgaaaaaatatcaccaatatctgaagaaattaataagttgcaaaaagatactaattatattgatagtattcttaaaagtggtggagaaagagccaattctattgcttcaaaaaaggttcaagaaataaagaggataattggtttttaaa

SEQ ID NO: 300921 - DNA, 727 bp, Unknown
  Bacterial polypeptide expressing nucleotide sequence isolated from the Sargasso Sea
tggattttaaattgtatttgtagagtaggatggctaaatcgtatgactcaatttaaagataaagccggcaaggataaagaaaaagccagtgttggattatacatctatccaaatttaatggctgcagatatattattatataaagctacccatgtaccagtcggtgctgaccagaagcaacatttagaattatcgagagacattgcccagaaatttaataacgacttcaataaaaaagatttttttcctttacctgagcctttaattcaaaaaaatatttcccgtgttatgagtttaagagatggaacaaaaaaaatgagtaaatcagaagaatctgattattcaagaataaacttgaaagatagttctgatgaaatagtaaaaaaaataaagaaagcaaaaactgacaccgacccgatcactgaaaatattaaagattacgtaaatagaccggaggcatataacttattaagtatatattcagacctttctgatcaaaaaatcgaaactacaattaacgaatttataggaaaagatttttcctctttaaaaactaaattatccgaaaaactagttgagacaataagtccaatcggaaagaatattgaaaaattaatgagagatcgaaaacaccttgaagatgtattaaaaaaaggcaaacaaaaagccaatataattgctgaggaaaacctaaaaaagatacgtgaaatagttggatttgtgtaat

SEQ ID NO: 300922 - DNA, 748 bp, Unknown
  Bacterial polypeptide expressing nucleotide sequence isolated from the Sargasso Sea
tatgactaaaaaaattttttcaggagttcaaccaacaggaaatctacatttaggaaattatttaggtgctataaaaaatttcgtagaactacagaatgaagaagataacaattgtatatattgtgttgttgatttacatgcaattactttaaaacaggatccaaaagaacttaaaaataatattcgagaaactgccgcaacttttattgcaagtggacttaatccaaacaaaagcattttgtttaatcaatctttagtctccgcacactcagagggtgcttggatattaagttgtattggcagaatgggatggcttaacaggatgacacagtttaaggaaaaagcaggaagagacaaggagaaagcaagcgttggcctttacatttatcctattcttatggctgcagatattatgttatatgatgcaacacatgttcctgtcggtgatgatcagaaacaacacttagaactttgtcgtgatatcgcacaaaaatttaataatgattataacgttgaggactttctaattccaccagaaccattaatacaaaaacagttttccagaattatgagcttaaaagatggttcaaaaaaaatgagtaaatcagatgtgtcagatttaagcaggataaacttaaaagacagtaaagatttaataattaataaaattaaaaaagccaaaacagatccacatcctatacctaatattattgaagaattagaaaatagacctgaggcagaaaattta

SEQ ID NO: 300923 - DNA, 469 bp, Unknown
  Bacterial polypeptide expressing nucleotide sequence isolated from the Sargasso Sea
tatggaaaaaaaaattttttcaggagttcagcctacaggaaatcttcatttgggaaactatattggggcgataaaaaattttgttgatcttcaaaatcaagaaggaaatgaatgtgtttattgtgttgttgatttgcatgccattacaacaaaacaagatccaaaaattcttaaaaataatattagagaaaccaccgcagcttttttagcaagtggaatagatccaaaaaaaagcataatatttaatcaatcattggtaccagcacatgctgaaggttcttggattttgggatgtatagctcgaatgggttggttaaatagaatgactcaatttaaagaaaaagctggaaaagataaagaaaaagctagtgttggattgtatatatatccgatattaatgacagctgatattttattgtacgacgcaacccatgtacctgtgggtgaagatcaaaaacaacatttagaa

SEQ ID NO: 300924 - DNA, 839 bp, Unknown
  Bacterial polypeptide expressing nucleotide sequence isolated from the Sargasso Sea
tttggggaattatttaggcgctatgaaaaattttgttgacttacaaaaaactatgtcttgtatctattgtgttgttgacttacatgcaatcacaacctttaaagacccaacagaacttagagaaaatattttagatacagctgctgggttcttagcatgtggcttagattttaataaaagtataatatttaaccaatcttcagtaagtggtcatagtgaattagcatggatattaaattgtatatctagagttggctggatgaatcgaatgactcagtttaaagaaaaagcaggactaaacaaagaaaatgccagtgtcggactatatgtctacccaaatttaatggcagcagatatattgttatacaaagctacccacgttcctgttggcgatgatcaaaaacaacacttagagcttgcaagagacatagcacaaaagtttaataatgattttaaaagtgctgatttttttcctctcccagaacctttaatacaaaaaaaactttctagagttatgagtttaagggatggaaaaaaaaagatgagcaagtcggaagaatctgattattcaagaatcgatttgaaagatacagaagatgacattagaaaaaaaataaaaaaagcgaaaacagactcttctcccattcctgaacaagtctcagaattaagtaataggcctgaggcacttaatcttttgaacatttattcttttttaactaactcaaatttagaaagtactttaaaagaaatgcaaggtaaggatttttcaaaatttaaagatgcgttatcagatgtaattatttctactgtatgcccaattggtattaaaattaataaat

SEQ ID NO: 300925 - DNA, 382 bp, Unknown
  Bacterial polypeptide expressing nucleotide sequence isolated from the Sargasso Sea
atgacgagagtgttgtctggcatccaacccactggcgatatacatctgggtaattatcttggagctctgcgccagtgggcactggatcaacacgaacatgacagtttctattgtgcggtcgaccttcacgccgtgacggttcaacaagacccacaagaactccgctcgaagacgattgagaccatggcgacgttggtagcagtcggcttagaccctgaagtgtgcacattgttcgttcaaagtcatgtcccgtatcacacagaactctcgtggcttcttgaatgcactgtctcctttggtgagcttcgccgaatgacgcagttcaaagataaatcgaccaaacaaggtgacgccggccaagaacatgtttcggcggggttgt

SEQ ID NO: 300926 - DNA, 898 bp, Unknown
  Bacterial polypeptide expressing nucleotide sequence isolated from the Sargasso Sea
tcaggggtacaaccaacgggaaatttacatcttggaaattacctaggtgctttgaaaaattttgtttctcttcaaaaagaaatggaatgtatttactgtgtagttgacttacatgcaattacatcatttcaaaaaccaaatgaattagaagataatgtttttgagacagtagcaagttttctagctaccgggatcgacccaaatacaagcataatatttaaccagtcctctgtctcaggacatgctgagttagcttggatccttaattgcgtttcaagaattggatggcttaataggatgacacaatttaaagataaagcaggctctgataaggaaaaagctagtgtaggcttatatatatatccaaacttaatggcagcagatatccttttatataaagcatcacatgtaccagtcggcgctgatcaaaagcaacacctcgaactttgtagagatattgctcaaaaatttaataacgattttaattgcgaaggtttttttcctttacctgaaccattaatcccaaaaaatgtttcaagggttatgagtttacgtgatggaactaaaaaaatgagcaagtccgaagagtccgattactcaagaattaacttaaaagatacaacagatgagataagtaagaaaattaagaaagcaaaatctgactccgaacccataccacaaagtttgaaaggtttagaaaaaaaacctgaggcattaaatctagttaatatatactccgaattatcaaaaagtagtttagacaaagttttaaatgaaatgtcaggtaaagattactcatttctaaaaactaaattagctgaacttttaattaacgagatcacaccagttggtaaagaaatcaaaaaattattgaatgataagccttacctaaagcaag

SEQ ID NO: 300927 - DNA, 286 bp, Unknown
  Bacterial polypeptide expressing nucleotide sequence isolated from the Sargasso Sea
atgagcgataaatttaaaaaattagttttctccggtgttcaaccgactggtaatttacatttaggaaactatttaggtgcaataaaaaattttgttaacttacagaaaaaaatggattgtatttactgtgtcgtcgatcttcacgctattactaccttccagaaacctcaagagttaaaaaaaaatattatagaaactactgcagggttcttggcttgcgggttggactataaaaaaagtattatttttaatcagtcatcggtaagtggtcatgctgagttagctt

SEQ ID NO: 300928 - DNA, 658 bp, Unknown
  Bacterial polypeptide expressing nucleotide sequence isolated from the Sargasso Sea
atgttaaaatctaaacaaccttcgaaaagaattttttctggaatacaacctacgggtaacctgcatattgggaactatttaggtgctataaaaaactggattaaatttcaagaagaagatgattgtatctattcaattgtagatttacatgcaatgacagtaccaaataatttgcaagatattaaaaattcaacattagaagtagcggctgcagtaattgcttctggaattgatcctaagaaatcgattctttttaatcaatcaaatgttccacaacatactgagttagcatggatttttaattgtattgccagaataggctggttaaatagaatgacacagttcaaagaaaaagcaggcaaaaaaaaagataatgctactgttggtttatttagttacccagtacttatggcagcagacatattattgtataaagctacacatgtcccagttggtgaggatcaaaaacaacatttagagttaacacgtgatatagtaagttcttttaatgcaacatttaaaaagtctctcgataaagatttttttcatttaccagaacccattattttaggccctgcaaagagaattatgagtttgagagatggtaaaagcaaaatgagtaagtctgacatttctgatggttccagaattaatttga

SEQ ID NO: 300929 - DNA, 655 bp, Unknown
  Bacterial polypeptide expressing nucleotide sequence isolated from the Sargasso Sea
aatggaaaaagtaagcaaaagaatcttatcaggtgttcaaccttctggtgatttgcatttaggaaattatctaggggcaattaaaaattttgtctctcttcaaaaagagtttgaatgttttttttgtgttgtagatttacatgccattacggtttggcaagatccaaaaattttaaagcaaaagacaagagaagtagcagcagcttttattgcatcaggtattgatccagaaaaaaatactttgtttgttcaatcacaagttccacatcatgcacagcttgcatggatttttaattgcgtggcgcgaatgggatggttgaatcgtatgacacaatttaaggataaggctgggaagaatagtgaaaatgtatcagtgggtttattttcttatcctactttaatggctgcagatatacttatctatttagcaacacatgtcccagtaggtgaagatcaaaaacaacacctagagctaacacgtgatatagcacaaaaatttaatagtgactttaatacggatatattccctattcctgagcccttaattttaggagcagcgacacgtgtaatgagtctgcgggatggtttaaaaaaaatgagtaaatcagatccatcagattattcgagaattatgctttctgataggaagaagaaa

SEQ ID NO: 300930 - DNA, 596 bp, Unknown
  Bacterial polypeptide expressing nucleotide sequence isolated from the Sargasso Sea
gatggcaaataaaaaaagaattctttcgggagttcaaccaactggtgatttacatattgggaattggcttggggccataaataattgggttactctgcaagagcaatatgaaacattcctatgcgtagttgatttgcacgcaataacagcctcatataatcccaaagaattatctaaaaacactatctctactgcggctttatacgtcgcttgtgggatagatccaaatatatgctcaatttttgtccaaagtcagatttcagcacattcagaactttgttggatattaaattgtatgaccccaataaattggatggaaagaatgattcaattcaaagaaaaatccatacaacaggggaataatgtatctattggattatttgactatccaatacttatggctgcagacatccttctttatgatgctgacttcgtacctgttggtgaggatcaaaaacaacatcttgaacttgcaagagatattgcacaacagagaattaatgccagatttagtaaggataaaaatattttaaaaatccctcaaccaatcatcatgaagaatggttcaaaaataatgagtttaattgatggttcaa

SEQ ID NO: 300931 - DNA, 547 bp, Unknown
  Bacterial polypeptide expressing nucleotide sequence isolated from the Sargasso Sea
agtagatttacacgctattaccgtatgggaagatccgtcacagttagcaaaaaaaacaagagaagttactgcagcttttattgcatctggtattgatccagagaaaaatattttattttcacaatcacaagttccacaacatgcacaacttgcatgggtatttaattgtgttgctcgaatgggctggttaaaccgtatgactcaatttaaagataaagctggcaaagataaagaaaatgtatcagtaggtttattttcttatccaacattaatggctgctgatatattaatttatttagctactcatgttcctgttggcgaagatcaaaaacaacatcttgagttaacaagagatattgctcaaaaatttaataatgactttcaaacagatttgtttcctatacctgaacctttaatatttggtgaagcaacaagagtaatgagtttacgtgatggtacaaaaaaaatgagtaaatctgacccttctgactattctcgtattatgttaaatgatgatacagacattattgttcaaaaaattaaaaaa

SEQ ID NO: 300932 - DNA, 661 bp, Unknown
  Bacterial polypeptide expressing nucleotide sequence isolated from the Sargasso Sea
gctggtaaagataaagagaaggcaagtatttgggctttactcttatccagttttgatggctgctgatattttgttatatgacacaacacatgttccagttggtgatgatcaaaaacaacatttagaactttgcagagatatagctcaaaaattcaataatgattttaaagttgagaatttttttaagatacctgaacctttaattcaaaaagaattttcaagaataatgagtttgaaagatggtacaaaaaaaatgagtaaatcagatctttccgatttaagtcgcataaatttaactgatgatgaaaatcaaatagttaataagataaaaaaagctaaaacagatactttgcccttaccatcaaatattatggagctagaaaaaagacctgaagctaaaaatttgattggcatttattcaagtttaacaaatttaagtttagaacaatctgtcaatgagttttcaggtaaaaatttttcagaatttaaagatagcttatcacaagttttagttgataaaataactccaatatcagaagaaattaaaaaacttttaaatgaaaaaaaatatcttgatgaaatacttttagatgggttcgaaaaagcagataaaatagcatcaaaaaaagtaaaaaaaattcatgaaattattggtttttaa

SEQ ID NO: 300933 - DNA, 928 bp, Unknown
  Bacterial polypeptide expressing nucleotide sequence isolated from the Sargasso Sea
gcatgcggcctcgatgccgaacgcgtgaccttctatcgtcagtccgacgttccggaaatccccgagctgacctggctgctgacctgcgtcaccgccaaggggttgctcaatcgcgcccacgcctacaaggcctcggtggacaagaacgtcgagaacggcgaggacccggatgccggcgtgaccatggggctctacagctatccggtgctgatggcggcggacatcctgatgttcaacgcgcacaaggtgccggttggccgcgaccagatccagcatgtggaaatggcccgcgatatcgctcagcgcttcaatcatctgttcggtcacggtcgtgagttcttcaccctgccggaagcggtgatcgaggaaggggtcgccacgctgcccggccttgacggacgcaagatgtcgaagagctacgacaacaccattccgctgttcggcagcgccaaggagctcaagggcgcgatcgcacgcatcgtcaccgactcacgcctgccgggcgagcccaaggaccccgacagctcgcacctgttcaccctctaccaggcgttcgccaccgcgcagcagcaggatgcgttccgccaggagctgctcgacgggctggcttggggcgatgccaagcagcgcctgttcgagctgctcgacaacgagctgggcgaggcgcgcgagctgtatcaccagctgatcaccaagcccgccgagctggaggacattctccaggcgggcgcggccaaggcgcgccgaatcgccacgccgttccttggtgagctgcgcgaggctgtgggcctgcgcaacttccgtagcgaagttaaaagtgcagcgccagccaagaagaagtccagcaaggtggcgcgcttcgccagcttccgcgaggccgacggcgcgttccgctttcgtttcttcgcgcccgacggcgaggagctgc

SEQ ID NO: 300934 - DNA, 757 bp, Unknown
  Bacterial polypeptide expressing nucleotide sequence isolated from the Sargasso Sea
tatgtctaaagatattgttttttctggggtacaacctacgggggaaatacacttaggaaactacctaggtgcaattaaacaattccttaactttcaaaacgaatgtgattcaattttttgtattgttgatcaacacgctataactatctttcaggatccaaatgaactcaaagaaaatgttttgagtgtattggctatatttctggcttcaggcttagatccaaaaaaatgtattattttcaatcaggcctcagttaaagagcacagcgttttgtcatggtatctgagttgcactgctagagttggatggttaaatcgaatgactcagttcaaagataaggccggaaagaacagagataatgcatcacttggcctatatgcatatccagtcctaatggctgctgatattcttctctaccacgcagataaagtgcccgtaggagacgatcaaaaacagcacttagagctcacaagagacattgctcataaattcaatactgactactgtcatgaatattttaaactccctgacccaattataaataaagatgcaccaagaattatgagcttacgagatgcaaataataaaatgagtaagtcagatgtatccaaatattctagaattcttctaacagattctaacgatgagatatcaactaaaatcagcaaagcaaaatctgattcactaaagatgccttcatctagtgatgaactttctgatagacctgaaattaataatttaattacaatatattag

SEQ ID NO: 300935 - DNA, 668 bp, Unknown
  Bacterial polypeptide expressing nucleotide sequence isolated from the Sargasso Sea
atttcagaatccagaagaattaaatgataacatatttgaagtagcttccattttaattgcatcgggtatagatattaataattcaatattatttaatcaaagtagggtggcaatgcacgctgaacttgcttggatatttaattgtacagcaaaaattggttggttaaatcgtatgactcaatttaaggataaagcaggcaaaaacaaagaaaaagcatctgctggtttatatgtatacccaaatttaatggcagcagatatacttgcttataaagcaacccatgttcctgttggagatgatcaaaagcaacaccttgaattaacaagagatatagcggcttcttttaatgataattataatattgattattttcctttagttgagccactaattattggagaagctaccagagtaatgaacttacgagatggttcaaagaaaatgagtaaatcagataactcagacttttctagaataaatttaacagattctcctgagaagatttctgctaaaattaaaaaggcaaaaaccgattctcttcctgttccggattccccctctgaactttcaaatagattagaagcaaaaaatttaattggtatttttgctgccttaatggggaaaacacaggacgaaattgttaaagattatggtggaggtacttttt

SEQ ID NO: 300936 - DNA, 451 bp, Unknown
  Bacterial polypeptide expressing nucleotide sequence isolated from the Sargasso Sea
tatgcataaaaaaagagttttttcaggtgttcagccaacaggaaatttacatttaggaaattacttaggggcaataaaaaattttgttgatttacaaaacaaatttgagtgtgtttactgcattgtagatttgcatgctattaccaatcgtcaagatccaaaagaattaaaagctaatatcctggaaacgcttgctagtttcattgcatcaggattagaccctgaaaaaaatataatttttaatcaggccagcgtatccgctcacagtgaattggcatggatatttaattgtgtggctaggattggatggatgaatcgtatgacacaatttaaagaaaaagcaggaaccaataaagaaaatgcaagcgttggccttttagtttatccaaatttaatggcagctgatattcttttgtataaagccacacatgtgccggttggagaagatcaa

SEQ ID NO: 300937 - DNA, 511 bp, Unknown
  Bacterial polypeptide expressing nucleotide sequence isolated from the Sargasso Sea
atgagcaaaaaaattttttctggagttcaaccaacaggaaatcttcatttgggtaattacataggtgctataaagaattttgttaatttacaaaatgaccccgataacttttgtatttattgcgtagtagatcttcatgcgattactgttaaacaagacccaaaagtgttaaaaaaaaatattagagaaactaccgcagcatttattgcaagtggcttagattataaaaaaagtataatttttaaccaatcgcttgttccagctcattcagaaggatcttggatattaagctgtgtcgcaaggatgggttggctaaaccgaatgacccaatttaaagaaaaagctggaaaagataaagaaaaagctagtgttggactttatatatacccgatacttatggcagcagacattcttctttatgatgcaacgcacgttcctgttggagaggaccaaaaacaacatttagagctttcaagagatatagctaacaaatttaatttagattttaaga

SEQ ID NO: 300938 - DNA, 663 bp, Unknown
  Bacterial polypeptide expressing nucleotide sequence isolated from the Sargasso Sea
aattaaaaactttgttgcgctacaaaatgaaaaagataatgaatgtgtttattgtgttgtagatttacatgcgattactgtcaaacaggatccaaagaccttaaaagataacataagagaaacaaccgctgctttccttgcaagtgggctagattataaaaaaagtataatttttaatcagtctttagtacctgcccattcagaaggttcttggattctaggatgtattgctagaatgggttggttaaatcgtatgacacaatttaaagaaaaagctggtaaagataaagaaaaagcaagtgttggtttatacatatacccaattcttatggctgctgatattttattgtatgatgcaacacatgtgcctgtcggagaggaccagaagcaacatttagaactatccagagatattgctcaaaaatttaatttagactttgaaacccctgattttcttaaagcaccagaaccattaattcaaaaaaattttgcaagaatcatgagtttaaaagatggaacaaaaaaaatgagcaagtctgatccttcagatttaagtagaattaatttaactgataataaagatgaaataataaataaaatcaaaaaagctaaaactgataattcagctttacctttcgatgataaaaaattaagtgaaaggcc

SEQ ID NO: 300939 - DNA, 693 bp, Unknown
  Bacterial polypeptide expressing nucleotide sequence isolated from the Sargasso Sea
attgatccaaatcaaaataatattttgtgttcaatcacaagttcctcaacatgcacaacttggatggttgttcaattgtgttgcgaggatgggatggttaaaccgtatgacgcaatttaaagataaggctggaaagaatagtgaaaatgtttctgttggtttattttcttatccaacattgatggcagcagatatattaatttatttagccacgcatgttcctgtaggtgatgatcaaaaacaacatttggaattaactagagatattgcacaaaaatttaataatgattttaagacagatttttttcctattcccgaaccattaatcttaggagaggctacaagagtgatgagtcttcgtgatgggtcaaaaaaaatgagtaaatcagatccatctgattattcaagaattatgttaactgatacagcagaaaatattacgcaaaagattaaaaaagcaaaaacagatcctgaaccattaccacaagataaaactggtttatcaaaaagaccggaagcagaaaatctaatatctatttttgcttctttgcaagatacatctattgaaagtgttattaaagattacgcgggtaaagaattctccacctttaaaaaagatctggcagatttatccgtatctaaattggagcctattaccagtgaaatgaataaacttatgaatgatgtttctta

SEQ ID NO: 300940 - DNA, 850 bp, Unknown
  Bacterial polypeptide expressing nucleotide sequence isolated from the Sargasso Sea
ttcttcaaagcaaatctatgaagtcgcagctacttggcttgctcttggccttgaccccactgtctctgttctctatcaacagagccaaatccctgagctttttgagcttaactggattctaaactgctttacatcaaaagggcttatgaatagagcccatgcctataaggctcaggttgataaaaaccaagaggataaaaaagatacagactattctgttaatatgggcctttatagctaccctatcttaatggcagcagacattttgtttattgaaacagacttagttcctgttggagctgaccaagttcaacaccttgaaataacaagagacattgctagtagcttaaaccaccaatataaaaaaaatttaatcaaactccctcaagctcttgttcaaaaaaatgctaggatcattccaggacttgatggaagaaaaatgtcaaaatcctatgaaaatcatatccccatttttctacccccaaaaaaactaagaaaaatgattatgaaaataaccacagacagcctccctccttcagctccaaaagaccctgaaagctctcatcttttttcactctacacccacttttcctctcagaaagaacaagaagaaatgaaagaacgctataaaaaaggaatttcttggggagaggctaaagaagagctttttaaaaaaatagaaaaagatttaagcctaccaagagagcgctatgaggagctaatctctcacccgaaaaaaataaaaaaaatccttgatgattccactgaaaaagtaaggcctctagctaaaaaagtcttagataagcttaaagaagagatgggagtctcccttgaaaaaacgattaaatga

SEQ ID NO: 300941 - DNA, 631 bp, Unknown
  Bacterial polypeptide expressing nucleotide sequence isolated from the Sargasso Sea
ctatatgtgtatccaaatttaatggctgcggatattttgttatacaaagccacccatgtgccagttggtgatgatcaaaaacaacatctggaattagctagagatattgcccaaaaatttaataatgattttaagaatgataatttttttcctataccagaacctctaatacaaaaaaaaatttcaagagttatgagtttaagggatggcaaaaaaaagatgagcaaatcagaagagtcagattattctaggatcaacttaggtgataatgaggatgaaataaaaaagaaaattaaaaaagcaaaaacagattcactgccaatcccagaaaaagttgaagatttaaaaaatagacctgaggcattaaatcttttaactatttattcttcaattacagattctacattggaaaaaactctgaaagaaatgaatggaaaagatttttcgaaatttaaagataatttatctgacgcactaatagcaactatttgccctataggaaaaaaaattcaggatttaagaaaggataaatcctatttattaaaaattttaaaagagggttctaacagggctagaaagatttcagagcataatctgaataaaactaaagaaattgtaggatttatttagt

SEQ ID NO: 300942 - DNA, 535 bp, Unknown
  Bacterial polypeptide expressing nucleotide sequence isolated from the Sargasso Sea
aatgtcgaaaaaaattttttctggggttcaaccaacgggcaatttacatttaggtaattatcttggtgcaattaaaaattttacaaaattacaagatgataaaagtaataaatgtattttttgtgtagtagacttacattcaattactgttcaacaagatccaaaattattaaaaaaaaatgtaagagagacagcggctacttttatagcatgtggaattgatccatctaagagtataatttttaatcaatcttcagtaccagctcactctgagggggcatggatattaggatgtatttctagaatgggatggttaaatagaatgacacaatttaaagagaaggctggaaaagataaggaaaaggctagtattggtctttatgtgtatcctgttttgatggcgtctgacattttattgtatgatactactcatgtcccagtgggaaatgatcaaaaacagcatttagaattatgcagggatatagctcaaaaatttaataatgattttaatcaaaaagattttttaaagattcca

SEQ ID NO: 300943 - DNA, 742 bp, Unknown
  Bacterial polypeptide expressing nucleotide sequence isolated from the Sargasso Sea
tctcattcagaagtttcatggatcttaggatgcactgctagaatgggttggttaaatcggatgactcaatttaaggaaaaggcaggtaaagataaagaaaaggcaagtattggcttatacatatatccaatacttatggcttcagatattttattatatgactcaacccacgtccctgttggagaagatcagaaacaacatttagaattatcaagagatattgcgcaaaaatttaattcagattttaattgccctaactttcttaaagtgccagagccattaattcaaaaacgtttcgctagaattatgagtttaaaagatggaacaaaaaaaatgagtaaatcagacccttcagatttaagtagaataaatttaacagataaaaaagatgaaataataaataaaataaaaaaggctaaaacagataattcgcctttgcctgctgatgaaaaaaaaataaatgaaagaccagaggttgaaaatcttctaggtatttactcaagcttaagcagtcaaactttacaagatacaataaatgaatttggtggaaaaaatttttcagattttaaaaaaaaactctccgacttagtagttgaaaaaatatcaccaatctcagatgaaataaataaaatgaaaaatgataacacttatatagacaaaattttaaaaggtggagcagaaaaagcagaaaaaatagcatctaaaaaagtaaaagaaattaaaaaaattgtgggtttttaga

SEQ ID NO: 300944 - DNA, 742 bp, Unknown
  Bacterial polypeptide expressing nucleotide sequence isolated from the Sargasso Sea
aatgtccaaaaaaatattttcaggtgttcagcccacaggtaatcttcatttaggtaactatcttggagctattaaaaattttgttgacttaaataatgatgaccaaaatgaatgtattttttgtgtagttgatttacatgcaataactattaagcaagataaagatgaattaaagaacaatattcgagaaacagctgcaacatttatagccagtggtatcgatccaattagaagtataatttttaatcaatcaaaagtttatgcacatgcagaaggttcttggatattaagttgtatggctccaatggggtggttaaatagaatgacacaatttaaagaaaaagctggtaaagataaggaaaaggcttctgttggtctatatatttatcctatattaatggctagtgatatattgctttatgatgctacacatgtacctgttggagaagatcagaaacaacatttagaattaactagagatattgctcaaaaatttaataaagattttgactgtgaggattttttaaaagctccagaaccactaataaaaaaaaatttttcaagaataatgagtttaaaagatgggttaaaaaaaatgagtaaatcagacccatcagaccttagtagaattaatctaacagatactaaagatgaaattattaataaaataaaaaaagctaaaactgactcttttcctattcctaatgaagaccaaaaattaaaagatagacctgaagcagag

SEQ ID NO: 300945 - DNA, 370 bp, Unknown
  Bacterial polypeptide expressing nucleotide sequence isolated from the Sargasso Sea
atgtctaaagatatagttttctcgggagtacaacccacaggtgaaatacacttgggtaattacctaggcgcaattaaacagtttttatcctttcaagacgaatcagactcaatatattgcatagttgaccagcatgcaattactgtttttcaggatccacatgaacttagagagaatgtattgaatgttcttgctattttcttagctgctggtttagatccaaataaatgtattatattcaatcagtcttcagtcaaagaacatagtattctatcctggtatctcagctgcacggctagggttggctggctaaaccgaatgacgcaatttaaagataaagctggtaagaatcgagataatgcctcactcg

SEQ ID NO: 300946 - DNA, 793 bp, Unknown
  Bacterial polypeptide expressing nucleotide sequence isolated from the Sargasso Sea
tagtggtattgatccaagcaaaagtattatttttaaccaatcaaaagttcatgcacatgcagaaggttcttggatgttaagttgtatggctccaatgggctggttaaatagaatgacacaatttaaagaaaaagctgggaaggataaggaaaaagcttctgttggtttatatatttatcctatattaatggctagtgacatattactttatgatgctacgcatgttcctgttggagaagatcagaaacaacacttagaattaacaagagatattgctcaaaaatttaataaagattttaattgtgaagattttttaaaagttcctgaaccattaataaaaaaaaaattctcaagaataatgagtttaaaagatggtctaaaaaagatgagtaagtctgatccatcagatctcagtagaattaatttaactgataccaaagatgaaattatcaataagattaaaaaagcaaaaactgattcattgcctattcctaatcaagagcaaaaattaaaagatagacctgaagctgaaaatctccttggtatttactccagtattttaaataaaactttagacgaaactttaaatgaatttggtggtaaaaacttttcagacctaaaaggtcagttagctgaagttttattaagtaaaatttccccaatttctgatgagataaataaactgattaacgatcaaaattatttagataatgttctttcagaaggagcaaataaggcagaagaaattgcaggaaaaaagataaaagaaatgaagaaaataataggtttttaa

SEQ ID NO: 300947 - DNA, 619 bp, Unknown
  Bacterial polypeptide expressing nucleotide sequence isolated from the Sargasso Sea
tatgatagaccaagataaaaagtcgtcattaaaaacttttgaaaaacgagtgttttcaggtgttcagcctacgggaggtctcacattggggaactatcttggtgcagttaaacgctttgtagaaatgcagagtaaagagtacaaaactatatactgtgttgtcgatcaacatgcgattacagcatggcaagacccaacagaattaaaacaaaataccagacaaattgcagctttttttatagccgcaggcatagatcctaattcgtctatccttttcaatcaatcagccgtagccgagcatgcccaattagcttgggtttttaattgcgttgccaggatgggttggatgcagcgaatgacgcaatttaaagataaggccgggaaaaatgctcaaaatgccgcccttggtttatttgcatatccagcgctgatggctgcagacattttgctatatcatgcgacacatgttcctgtgggagacgatcaaaaacaacatctcgagttgactagagatatcgcaattaaatttaaccatgattatgatatcgattttttccctgtgactgaacctgtcattggaggaacagcctcaagagtaatgagcttgcgagatggacaa

SEQ ID NO: 300948 - DNA, 136 bp, Unknown
  Bacterial polypeptide expressing nucleotide sequence isolated from the Sargasso Sea
atgaataaagaattagtattttctggggttcaaccgacgggaaatttacatctaggaaattatcttggcgctttaaaaaattttgtttcacttcaaaagtcaaagaactgtttatactgtgtagttgatttgcatg

SEQ ID NO: 300949 - DNA, 694 bp, Unknown
  Bacterial polypeptide expressing nucleotide sequence isolated from the Sargasso Sea
ggggcatggatacttagctgcgttgctagaatgggttggctaaataggatgactcaatttaaagagaaagcgggcaaagacaaagagaaagctagtattggtttgtattcttatccagttctaatggcagctgatattcttttatacgacgctacacatgtccctgtaggtgatgatcaaaaacaacatttggagttatgtagagacatagctcaaaaatttaataatgattttcaattagaaaattttcttcaagttccagaacctcttattcaaaaagaattttcaagaatcatgagtttaaaagatggttcaaaaaaaatgagtaaatcagaattatcagatttaagtagagtaaatttaacagacgataaagatcaaataataaacaaaatcaaaaaagcaaaaactgatcctttccctatgcctcaagatataaaggaacttgatgaaagattagaggcaaagaatcttttaggaatttattcaagtttgaccaattcttcattagaaaattcggttagaaattttgcaggtaaaaacttttcagagtttaaagataaattagcagaagagcttgtaaataaaattgaacctatttctaatgagataaaaaaacttttaggagataaaagttatttagatgaaattcttctagaaggagttgaaaaagcagacataattgcttctaaaa

SEQ ID NO: 300950 - DNA, 591 bp, Unknown
  Bacterial polypeptide expressing nucleotide sequence isolated from the Sargasso Sea
tatgagtcggattttttcaggcatccagccaactggggatttgcaattaggtaattatcttggggcgttaaagaactgggttatgcttcaagataagtttgagagcatctactgtgtggtggatttgcatggtattactgtttggcaaactccagatgagttaacttctaacacacgagaagttaccgccggtttgatcgcggcaggtctggatcctaataaaaacataatatttaatcaaagccgggtttcagctcattctgagttggcttgggtgtttaactgtgtagctagacttggttggttaaaccgaatgacacagtttaaggaaaaggccggtaaggatagggagcgagcatcggtgggactttattcttacccaacgctaatggcggcagacattctcctatataaagctacccatgtccctgttggtgaagaccaaaaacaacatttagagctaactagggacattgcccaaaaatttaataatgattttggggtaagtttatttcctctacccgaaccacttatcttgggcgaggcccctcgagtaatgtctcttcgagatggcaaaaaaaagatgagcaa

SEQ ID NO: 300951 - DNA, 780 bp, Unknown
  Bacterial polypeptide expressing nucleotide sequence isolated from the Sargasso Sea
caaaaaaaagtataatttttaatcagtcaagtgttgcagcccactccgaaggtgcttggattttaagctgtgtagctcgtatgggatggctaaacagaatgacacaattcaaagaaaaagcaggaaaggataaggaaaaagccagcattggattatattcttatcctgttcttatggcagctgatatcttgttatatgatgccacccacgttcctgtaggagatgatcaaaagcaacatcttgagttgtgcagagatatagctcaaaaatttaataatgattttggtgtggaggattttttaaaagttcctgagcctttaattcaaaaagaattttctaggattatgagtttaaaggacggatcaaaaaaaatgagtaaatctgagttatcagatttaagtagaataaacttaacagatgataaagatcaaataataaataaaattaaaaaagctaaaacagatacgttaccaatgccaaaagatattaaagagcttgaggggaggctagaggcacaaaatcttctaggaatttttgctagcttgagtaattcaactctggaaacttccatagaaaaatttgctggcaagaatttttcagagtttaaacaagagctatctgaattattagttaataaaattatgccaatatctgatgagataaaaaaattacttcaagaccaatcatatctcgattctatccttctagatggagttgaaaaggctaacaaaattgcgtcaaaaaagatcaaaaatataaaagaaactgtaggtttttaat

SEQ ID NO: 300952 - DNA, 241 bp, Unknown
  Bacterial polypeptide expressing nucleotide sequence isolated from the Sargasso Sea
atgaaaaaaaatttcaaagaaatagttttttcgggtgttcaacctaccggcaatttacatttgggtaattacctaggggcaataaaaaactttgttgaattgcaaaaaaaaatggaatgtatttattgtgtcgtagatcttcacgcaataactgtttttcaggatccaaaagaattaaatagaaatattcttgaaactactgcaaaatttatagcttgcggattagattttaaaaagagcg

SEQ ID NO: 300953 - DNA, 725 bp, Unknown
  Bacterial polypeptide expressing nucleotide sequence isolated from the Sargasso Sea
gttgtttaattgtattgcaagaatgggttggctaaatagaatgactcagtttaaagataaagcaggtaagaatagtgaaaatgtttctgttggtctgttttcgtatccaactttaatggcagcagatattttaatatatttagcaacccatgtgccagtcggcgacgatcaaaaacagcatttagagctaactagagacatagctcaaaaatttaataatgattttaaaattgatttttttcctattccagaacctttaatttttggagaagctacaagggttatgagtctacgtgacgggtctaaaaaaatgagtaagtcagacccatcagattattcgagaattatgttaactgactcagcagataatattgcacaaaaaataaaaaaagcaaaaactgaccctcaaccattaccttctagtaaagaagatttaaaaaaaagaccagaagctgaaaatttaatttcaatatttgcatctttgcaagacaactctattgaaaatataattttagaatatgcaggaaaagaattttcagatttcaaaaaagatttgattgatttatctgtatctaaattaggacctataacaactgaaatgaataaattaatgaatgatacttcatatatcgattcggtattaaatgacggaaaagacaaggcaattaacgtggctgaaccagttttaataaaaactaaagaaataatcggttttttatcctaat

SEQ ID NO: 300954 - DNA, 691 bp, Unknown
  Bacterial polypeptide expressing nucleotide sequence isolated from the Sargasso Sea
attgataagtcaattcttttcaatcaatcctcaggttaaagaacatgctgaattagcctggatattaaattgtgtatgtagaattgggtggttgaatcgtatgactcaatttaaagagaaagctggcaaaaatagagaaaatgctacagttggtttatatggatatccagttttgatggctgcagatattcttttatacaaatcaactcacgttcctgttggtgatgatcaaaaacaacatatagaattggctagagatattgcatcttcttttaacaatatgtttacctctgatgaagaagacgacttttttaatttacctgagccacaaattataggtgaggccactcgtgtaatgagtttaagagatggtacgaaaaaaatgagtaaatctgacgcctctgacgcttctagaattaacctaactgacactgctgaggaaatatcaaacaaaattaaaaaagccaaaactgaccctcatccactgccagatactatagaggagctaaaagatagacctgaagcacataatttaatgagtatttattcttcattatcagatcagacattagaaaaagcattaatagaattttcgggtaagggcttttcttattttaagccaagattgatagatttggcaattgaaactttaagtcccatttcacgtgaaatgagaagtctcctaaagtat

SEQ ID NO: 300955 - DNA, 808 bp, Unknown
  Bacterial polypeptide expressing nucleotide sequence isolated from the Sargasso Sea
catgcatgcaattacaacctttcaagaaccaaaaaaattaaatgaaaatatatttgaagtagcatctattcttatagcatcaggtattaatattaataactctattttatttaatcaaagcagggtagctatgcatgctgagctagcttggatatttaactgtgttgcaaaaattggttggctaaatcgtatgactcaatttaaagacaaagccggaaaaaataaagaaaaagcctcagcagggttgtatgtgtatccaaatttaatggctgcagatattctcgcctataaagctactcacgttcctgttggagatgatcaaaagcagcacctagaactcacccgggatatagcagcttcttttaatgatagttatagtattgacttttttccgatagtagaacctctaattttaggagaagctacaagagtaatgaacttaagagatggttcaaaaaaaatgagtaaatcagatgattcagattttaccagaataaatctaacagattctaaagatgaaatttctgcaaaaataaaaaaagctaaaaccgattctcttcctgtacctgaatcaacctttgaactatcagacagactagaagcaaaaaatttattaggaatttttgcagccttaaatgatgtttctcaagaacatattattaaagattatggtggaggccctttttctgttttgaaagatgacctcactgaatgtattattagaaaacttacaccggtaggtgaagaaataagaaaattattagataacaaagatgagctagacaaaattttgaaagaaggtgctagt

SEQ ID NO: 300956 - DNA, 295 bp, Unknown
  Bacterial polypeptide expressing nucleotide sequence isolated from the Sargasso Sea
tatgggaaaaaaaattttttcaggtgttcaacctactggaaatcttcatcttggaaattatttaggagcgatcaagaattttgtaaaacttaataatgaagatcaaaatgagtgcgtgttctgtgttgttgatcttcatgctattacagttgctcaagatccaaaaaaattaaaagataatatttatgaaactgtagcaacttttattgctagtggcattgatcctaaaaaaagtattatctttaatcaatcaagagtaagtgctcattcagaaacagcctggatattaagttgt

SEQ ID NO: 300957 - DNA, 739 bp, Unknown
  Bacterial polypeptide expressing nucleotide sequence isolated from the Sargasso Sea
cagttatcttggggtactgaattgttacgctcaaatgggtgagctaaatcgcatgacgcagttcaaagataaatctgcgaaaaacgaaaacaatattaacgtgggtttatatagctaccctgtacttcaagcggcggatattctgctttaccaagcagataaagtaccagtgggtgaagatcagaaacagcatctagagttaacccgtgacattgcaacacgtgtaaacaatctatacggcgatgtatttcgtctacctgatccgtatatcccagactttggcgcgcgcatcatgagccttcaagagcctgaaaagaagatgtctaagtctgacaacaacccgaataacttcatcggcttattagaagatcctaagaagttggccaagaaaatcaaacgtgccgtgaccgactctgacgagcaagctaatatctactttaacccaactgaaaaaccaggcgtgtctaacttactgaccctactttcacttgcgacgggtaaatcaattaaagagcttgagcctgaatatactgacaaaatgtatggccaccttaaaggtgatgttgcagacgctgtggttgctctacttgaaccaattcaggcgcgctatgctgagatccgcgcagacagagcgtatcttgacgacgtgatgcgccagggtgccgacaaagcatcagcacgagcagctgaaaccttggctaaagtatacaaagcagtcggctttattccaaagccataa

SEQ ID NO: 300958 - DNA, 586 bp, Unknown
  Bacterial polypeptide expressing nucleotide sequence isolated from the Sargasso Sea
ttagcaacacatgttcctgtaggagatgatcaaaaacaacatttggagttaacaagagatatcgcacaaaaatttaataatgattttaagacagatttttttcctattcctgaaccattaattttaggagaggctacaagagtgatgagccttcgtgatgggtcaaaaaaaatgagtaaatctgatccatctgattattcaagaatcatgttaactgatacagcagaaaatattatacaaaaaattaaaaaagcaaaaacagatcctgaaccattaccacaagataaaactggtttagaaaagagaccagaagctgaaaacctaatttcgatatttgcttctttgcaagacacatctattgaaagtgttattaaagattatgctggaaaagaattctccatctttaaaaaagatttggcagatttatccgtatctaaattagagccaattacgagtgagatgaataaacttatgagtgatgtttcttatatcgattctattttaaatcagggcaaagagaacgctatagcagtagcagaacctgttttgcaaaaaactaaagaaattattggttttttatcctaaa

SEQ ID NO: 300959 - DNA, 379 bp, Unknown
  Bacterial polypeptide expressing nucleotide sequence isolated from the Sargasso Sea
tatgggtaaaaaaattttttcaggagttcaaccaacaggaaatcttcatttaggaaattatttaggagctataaaaaattttgtagaactaaataacgataatgaaaataaatgtgttttttgtgttgttgatcttcatgcaattactgttaaacaagaaccaagggaattaaaaaataatattagagagaccgtagcaacttttattgcgagtggaatagaccataaaaaaagtataatttttaatcaatcaaaagtgccagctcatgctgagggagcgtggatattgagttgtgttgctaggatgggatggttgaatagaatgacacagtttaaagaaaaagcgggaaaagataaagaaaaagcaagtataggtcta

SEQ ID NO: 300960 - DNA, 721 bp, Unknown
  Bacterial polypeptide expressing nucleotide sequence isolated from the Sargasso Sea
atgtccaaaaaaatattttctggtgttcaacctactggtaatcttcatttaggaaactatctgggtgcaattaaaaattttgttgaactcaataatgatgaagaaaacgagtgtatattttgcgttgtagatttacatgcaataactattaagcaagacaaagataaacttaagaataatatttttgagacagctgctacttttattgctagcggtatagatcctagtaaaagtattatctttaatcaatcaaaagttcacgctcatgccgagggatcttggatgttaagctgtatggctccgatgggttggttaaatagaatgacgcaatttaaagaaaaggctggaaaagataaggagaaagcatctgttggtctttatatttatccaatactaatggctagcgacatattactttatgatgctactcatgttcctgtaggagaagaccaaaaacaacatttggagttaacaagagacattgctcaaaaatttaataaagactttgattgtgaagattttttaaaagctccagagccattaataaaaaaaagtttctcaagaataatgagcttaaaagatggattaaaaaaaatgagtaaatcagatccatcagatctaagtagaattaatttaagtgacactaaagatgatattgttattaaaataaaaaaagcaaaaaccgactcatttccaattccaagtgaagagaataaataaa

SEQ ID NO: 300961 - DNA, 730 bp, Unknown
  Bacterial polypeptide expressing nucleotide sequence isolated from the Sargasso Sea
agggtgcgtggtttttgagttgtatggctccatgggatggttaaatagaatgacacaatttaaagaaaaagctggaaaggataaagaaaaggcttctattggtttatatatttatcctatattaatggctagcgacatactgctttatgatactacgcatgttcctgttggagaagaccaaaaacaacatttggaattaacaagagatttagctcaaaaatttaacaaagattttaattgtgaagattttttaagagtaccagaacctttaattaaaaagcatttttcaagaattatgagtttaaaagacggcaaaaaaaaaatgagcaagtcagatccgtcagattttagtagaattaatttaactgataccaaagatgaaattgttaataaaataaaaaaagcaaaaactgattctttaccaattccatatgaagaccaaaaattaaaagatagacccgaagctgaaaatcttcttggtatatattcaagtatttcagatcaaaatttggataagtctttggaagaatttggaggtaaaaatttttcagatttaaaaaatcaattagctgaagtattattaagtaaaatctcaccaatatctgatgaaataaaaaaattaattaatgattatgaatatttagataaagttcttgcagacggagtgaataaagctgaagaaattgcaggaaaaaagatagtagaaatgaagaaaataataggtttttaa

SEQ ID NO: 300962 - DNA, 715 bp, Unknown
  Bacterial polypeptide expressing nucleotide sequence isolated from the Sargasso Sea
ggatgcatagctagaatgggttggttgaatagaatgactcaatttaaagaatttgcaggcaaggataaagaaaaagctagtgtaggtttatatatctacccagtgttaatgacggctgacatattactttatgatgcttctcatgttcctgtgggagaagatcaaaaacaacatcttgaactttcaagagatattgctcaaaaatttaatttagattttaatgcacctaactttcttagagtgccagaaccgttaatacaaaaaaacttttctagaattatgagtttaaaagatggaacaaaaaaaatgagtaaatccgatccttcagatttaagcagaattaatttaactgatagtaaagacgaaattatcagtaaaattagaaaagccaaaacagatacggatcccttaccagttgatgaaaaaaatttgaaacaaagacctgaagttgaaaatcttttaggtatttactcgagtttaagcaaacaaagtttaacagatactattgatgattttaggggaaaaaacttttcaaattttaaagaaaaattggcagatttggcagtagaaaaaattttaccaatatcgaatgaaattaacaaattgaaaaaaaataatgattatatagattcaattttaaaaaaaggaggtgaaaaagctaatgaaattgcctcaagaaaaattttggagattaaaaaaataataggtttttaat

SEQ ID NO: 300963 - DNA, 727 bp, Unknown
  Bacterial polypeptide expressing nucleotide sequence isolated from the Sargasso Sea
atgaaaaaaaaaattttttctggtgttcaacccactggtaatcttcatttaggaaattatttaggagctataaaaaactttgttgatctcaacaatgacactcagaatgaatgtatattttgtgtggttgaccttcatgcaataactgtcagtcaaaatccaaaagagttgaaatcaaatatctttgaaacagtagctacatttttagcgagcggtatagatcctaaaaatagtataatttttaaccagtctcgagtaagcgctcattcggaggctgcatgggttttaagctgtgttgctagaatgggttggttaaatagaatgactcagtttaaggaaaaagctggtaaagataaagaaaaagcaagtattggcctatattcatatcctgtcttaatggcagcagatattttattatatgacgcaacacacgtgcctgttggtgaagatcaaaaacaacacttagaactttgtagagatattgcacaaaaatttaataatgactttaaagttaaagattttttgaaaattcctgagcctttaataaaaaaagaattttcaagaattatgagtttaaaagatggccttaaaaagatgagtaaatcagaggagtcagatttgagtagaattaatttaaccgatgataaggatcaaataataaacaaaatcaaaaaagcaaaaactgataccctacccttaccaactagaattgaggaattagaaaaaa

SEQ ID NO: 300964 - DNA, 610 bp, Unknown
  Bacterial polypeptide expressing nucleotide sequence isolated from the Sargasso Sea
atgattactaattccaaacaaacagttttttcaggagtacaaccaactggaaatttacatttaggcaactttcttggtgctattaaaaactttgtagagcttcaaaagaaaatggaatgcatatattgtgtagtggaccttcatgcaattactgtttttcaggatccaaaagaattaaaaaaaagtatgctcgaaacaactgcaacattcattgcatgtggcttagactttaaaaaaagtattatattcaatcaatcatcagtaagtgaacatgcagaactcgcctggatcttgaattgtgtttctagaattggctggatgaatagaatgacacaatttaaagaaaaggcaggaaaaaatagggaaaatgcaagtgttgggctttatgtttaccccaatctgatggccgcagatattttattgtataaggcaactcacgttcccgtaggagacgaccagaaacaacatttagaacttgtaagggatattgctcaaaaatttaataatgattttaaatcagaaaatttttttcctattcccgaaccattaattcaaaaaaaattatcaagagttatgagtttaagagatggaaaaaataagatgagtaaat

SEQ ID NO: 300965 - DNA, 461 bp, Unknown
  Bacterial polypeptide expressing nucleotide sequence isolated from the Sargasso Sea
gcacaacttggttggttgtttaattgtgttgcaagaatgggatggttaaaccgtatgacacaattcaaagacaaggcaggaaagaatagtgagaatgtttcagttggacttttttcttatccaactttaatggccgcagatattttaatttatttagcaacgcacgtaccagttggcgatgatcaaaaacaacacctggaactcactagagatatagcgcaaaaatttaataatgattttaagactgatttatttcctattcctgaaccgttaatttttggtgaagcaacaagagtaatgagccttcgtgatgggtcaaaaaaaatgagtaagtctgatccatctgattattcgagaataatgttaactgataccgcagaaaatattattcaaaaaataagaaaagcaaagacagatccagaaccacttcccgaaaataaaactcatttagaaaaaagacc

SEQ ID NO: 300966 - DNA, 761 bp, Unknown
  Bacterial polypeptide expressing nucleotide sequence isolated from the Sargasso Sea
taatcaatcaatggttccatcacattcagagggatcgtggttattgagttgtattgcaagaatgggttggttgaataggatgacgcaatttaaagaaaaggcaggtaaagataaagagaaagcaagtgttggactttatatatatcctgtattgatggcagcagatatcttgttatatgatacaactcatgttccggttggagaagatcaaaaacaacatctagaacttacaagaaatatagctcagagatttaatggagattttaactcacctaattttttaaaaatacctgaaccacttatccataaagatttttcaagaataatgagtttaaaagagggaactcaaaaaatgagtaaatcagatccatcggatcaaagcagaattaaccttacagatacaaaagatcaaattgtcaataaaattagaaaggcaaagacggatagcgatcctcttcctgaaaatattaatgaacttaaaaatagatatgaattaaaaaatctacttggtatatattcaagtttgaaaaatcaaaatttagatgagtcaattaatgagtttagtggaaagaatttttcacaattaaaagaaaaattagctgaactgctagtagaaaaaattaatccaatatctaatgaaataaataagttgttaaaggaccaaaagcatatagatgaaattttattagagggatctaaaaaagcagaaaaaatttcaaaaaaaaaggttgatgaaatcaaaaaaaaaataggattttaaa

SEQ ID NO: 300967 - DNA, 351 bp, Unknown
  Bacterial polypeptide expressing nucleotide sequence isolated from the Sargasso Sea
gatgccacaaaaaaatatattttcgggagttcaacctacaggcaaccttcatttaggaaattatattggtgcaattaaaaattttgtaaaacttcaatctgaaaatgattctaaatgtatttattgtgttgtcgatttacatgcaattactacaaaacaagaccctcaaaaattaaaagacaatatccttgagacgaccgcggtttttttggcaagcggaattgatccaagcaaaagtattatttttaatcaatctatggtatctgcacattcagagggaacatggatactgagctgtattgcaagaatgggttggttaaacaggatgacccagttcaaagaaaaagcagg

SEQ ID NO: 300968 - DNA, 628 bp, Unknown
  Bacterial polypeptide expressing nucleotide sequence isolated from the Sargasso Sea
ttattcttatcctattctaatggcatcagatatattactttatgattcaacccatgttccagtaggtgaggatcaaaaacaacatttagaacttagtagagatattgcacaaaaatttaataatgattttaaagctgacgatttttttaaaattccagaacctctgatacaaaaacaattttcaagaattatgagtcttaaagatggttcaaaaaaaatgagtaaatcagagccatcggatttaagtagaataaatttaactgacagtaaagatttaataattaataaaattaaaaaagcaaaaaccgaccctttgcccataccagggaatattgatgacttaaataaaagacttgaggtaaaaaatcttataagcatttattctagtttgactaactcaactttagaaaaatctattaacacttattcaggtaaaaatttttctgaatttaaagaggaattatcacagttattggttgataaaatagtaccaatatctcaggagataaaaaaattgataaaagaaaaaagttttttagataaaattctactagagggggcagaaaaagctaatgagatagcatctcaaaaacttaaaaaaattcaccaaataataggttttcaataa

SEQ ID NO: 300969 - DNA, 582 bp, Unknown
  Bacterial polypeptide expressing nucleotide sequence isolated from the Sargasso Sea
gatggcaattaaaaaaagaattctttcgggagttcaaccaactggagatttacatattggtaattggcttggggccataaataattgggttactcttcaagataaatatgaaacatttctatgtgtagttgatttgcacgcaatcacagcttcatatgatcccaaagaattatctaagaacactatttctactgctgctttgtatgtcgcttgtgggatagatcctaaaatatgctcaatttttgtccaaagtcagatttctgcacattcagaactttgttggatattaaattgcatgacaccaataaattggatggaaagaatgattcaattcaaagaaaaatccatacaacagggaaataatgtatccattggattgtttgactatccaatcctaatggctgcagacattcttttatatgacgctgactttgtgccagtaggtgaggatcaaaaacaacatcttgaacttgccagagatattgcacaacagagaattaatgccagatttagtaaggataaaaatatttttaaaagttccctcaccaaatatcatgaagaatggatcaaaaataatgagtt

SEQ ID NO: 300970 - DNA, 427 bp, Unknown
  Bacterial polypeptide expressing nucleotide sequence isolated from the Sargasso Sea
atgaaaaaaaatacagtattatcgggagtgcaaccctcaggcgaccttcacataggaaactatcttggtgcaattaaaaactttgtggatatgcaaaatgactataactgttttttttgtattgtagatttacatgcaataactgttaaacaagatccaaagattttaaaaacaaacactcttgaagttgcagccacttatattgcatcaggtatagatccaaaaactagtacaatttttaatcaaagcagtgtatctgctcatgctgagttagcttggataattaattgtgttacaagaatggggtggttgaatagaatgacacaatttaaagataaagctggtgcagataaggagaatgcgagctcaggtttatttacttatcctaacttaatggctgccgatattctaatttataaggcaacgc

SEQ ID NO: 300971 - DNA, 430 bp, Unknown
  Bacterial polypeptide expressing nucleotide sequence isolated from the Sargasso Sea
atgtcaaataaaaaaagaattctttcaggagttcaaccaactggtgatttacatattgggaattggcttggggcgattaataattgggtgacacttcaagagcaatatgaaacatttttatgtgtagttgatttgcacgcaatcactgcttcatataatcccaaagaattatctcagaatactatctccactgctgctttgtacgtcgcttgtggaatagatccaaatatatgctcaatttttgtccaaagtcagatttctgcacattcagaactttgttggatattaaattgcatgaccccaataaactggatggaaagaatgattcaattcaaagaaaaatctatacaacagggaaataatgtatctattggattatttgactatccaatcctaatggctgcagacattcttctatatgacgctgact

SEQ ID NO: 300972 - DNA, 658 bp, Unknown
  Bacterial polypeptide expressing nucleotide sequence isolated from the Sargasso Sea
atgaaaaaaaaaatattttcaggtgttcaaccaacaggcaatcttcatttaggaaattatttaggagccattaaaaactttgttcatttaaataataatgtggaaaatgagtgcatattttgtgttgttgatttacacgcaattacaattcatcaagacccaattgaattaagaaataatatccgtgaaactgttgcaacttttatagctagtggaattgatccaaaaaaaagtattatttttaatcaatcaaaagttagcgctcattctgaagccgcatggatattaagttgtattgcaaggatgggttggttgaacagaatgacacaatttaaagaaaaagctggaaaagataaagaaaaagcaagtgttgggctatactcttatccagtgctgatggctgcagatatactcttatatgactccactcacgtgccagttggggatgatcaaaaacaacacttagaactttgtagagatatcgcgcaaaaatttaataatgagtttaaagtagataatttttttgtacctccggagcctttaattactaaagagttttcaagaattatgagtcttaaagatggtaacaagaagatgagtaaatcagaaacatcagacttgagtagaataaacttgactgatgaaaaagatcagattg

SEQ ID NO: 300973 - DNA, 664 bp, Unknown
  Bacterial polypeptide expressing nucleotide sequence isolated from the Sargasso Sea
atgaagaagccaagagttctcacaggtattaccactactggcacgccacatctaggaaatttcgtgggtgcaattaggccagcgatagaagcaagtaacgatcccggagtggaatcttttctttttctagcagactatcactctctaataaaatgtcagaaacctgatctagtaatgcaatctagtaaagaagttgcagcagcctggttgtcgctagggttagatcctagtagaacgatattttacagacagtctgatattcctgaaatcacggaactgacctggatacttacctgttgcgccgctaaaggacttatgaatagagcgcatgcttacaaagctgcggttagtgcgaatgaagaagctggtgaggacgcagattttggtattactatgggattgtttagttacccaatccttatggccgcagatatattggtttttagtggcgaacgaattccggtgggaaaagatcagattcaacatgttgaaatggctcgcgatattgcccagcgatttaatcacaatttctctgaaatcttgacgatcccagaagctgtcgtaggagaagaaggttctgttctcaccggattagatgggcggaagatgagtaaaagctataataatattattcctcttttttgctcagagaaacagcttaaaa

SEQ ID NO: 300974 - DNA, 769 bp, Unknown
  Bacterial polypeptide expressing nucleotide sequence isolated from the Sargasso Sea
tatcatttttaatcaatcaaaagttgctgcacactctgaaggtgcttggatattaagttgtgtagctagaatgggatggttaaatagaatgactcagtttaaggaaaaagctggtaaagataaagaaaaagctagcctaggactttattcttatccagttttaatggccgctgatattttgctttatgattcaactcatgttcctgtaggagatgatcaaaagcaacatttggaactttgtagagatatagctcaaaaatttaataatgattttaatttaaataatttttttgtactaccagaaccattaattcaaaaacaattttctagaatcatgagtcttaaagatggaacaaaaaaaatgagcaaatcagaaatatcagatttaagtagaattaatttaactgatgataaagatgaaatgataaataaaataaaaaaagcaaaaacggatcctttgccaatgccgaacacagttggcgaattagaaaaaagaccagaggctaaaaatttaatcggcatttactcaagtttaactgatactagtttagatcaaatagttaatgatttttcgggaaaaaatttttctgaatttaaagataatttatcacaagctttagttgaaaagattgttccaatttcgatggaaatcaaaaaattattaaatgataaaaaatatttggaagaggtattatctgagggctctactaaggcaaataatattgcatcacaaaaaataaaaaaaattcaagaaatattgggtttttaa

SEQ ID NO: 300975 - DNA, 801 bp, Unknown
  Bacterial polypeptide expressing nucleotide sequence isolated from the Sargasso Sea
tatggaaaaaaatagaattttatccgggattcaaccaactggaaatttgcatttaggtaactatctgggggcaataaaaaattttgttagcttacaaaataaatttgattgtctatatatgttggctgactatcacgctataacaacaaattataatcaagcagaaattaaaaatcatatatttgagacaactgctgcatttttagcgtccggcttagataatgaaaaaaatataatttttagacaatcaagagtttcagctcatttagaattagcatggattctaaattgtgtggcgaggttaggttggttaaatagaatgacacagttcaaagaaaaagctggagataataaagaaaaagcaagcattggcttgtatacttatcctgttctaatgactgctgatatattaatctatggcgcaactcatgttccagtaggagaagatcaaaaacagcatttagaactttgtagagacatagcacaaaaatttaacaacgattttaaagttaaaaatttctttaaacttccagagccaattataccttcaaatgtttctagaataatgagtctaagagatggtactaaaaaaatgagcaaatcagatccttcagactcgtctagaattaatctcaaagatagtaatgatcaaattacacaaaaaattagaaaagccaaaactgacaacgaaccaattacattaaacatattagatgaaaattcaaagcgttttgaagcaaaaaatttaatttccatttacgcaagtttgcaggataaaaatgtaaaggaaattataaaaga

SEQ ID NO: 300976 - DNA, 636 bp, Unknown
  Bacterial polypeptide expressing nucleotide sequence isolated from the Sargasso Sea
gtatcggtctatattcgtatcctgttttaatggcagctgacattttattatatgacacaactcatgtacctgttggagatgaccaaaaacaacatttggagttatgtcgcgatatagcccaaaaatttaacaatgattataaaattgataatttttttatagttcctgaacctttaattaaaaaagaattttccagaatcatgagtcttaaagatggtcttaaaaagatgagtaaatcagaagtttcagatttaagcagaattaatttaactgatgatagagatgaaataataaataagattaaaaaagcaaaaactgataccttgcctttaccttcatcaattgaagaattagaaaaaagacctgaggctaaaaatttaatcggtatttattcaagtttgtcaaataatacactccaaaaatcaattgatgaatttgctggaaaaaatttttcagaatttaaagaaaaattatcagatatagttgtcaacaaaatcaatccaatttcattgagaattaaagagttattaaacgataaagttttcttggaaaaaatacttaaagacggatctgagaaagccaatgaaattgcgtcaaaaaaaataaaaaaaattcaagaaattgtaggtttttgag

SEQ ID NO: 300977 - DNA, 496 bp, Unknown
  Bacterial polypeptide expressing nucleotide sequence isolated from the Sargasso Sea
atgactaaaaaaattttttcaggagttcaacctacaggaaatctccatttaggaaattatttaggggcaattaaaaattttgtagagcttaataacgataaagaaaatgaatgtattttttgtgtagtagatctacatgcaatcactattaaacaaaatccaaaagaattaagaaataatatcagagaaacagttgcaacttttgtagctagtggaattaatcccgaaaaaagtattatttttaaccaatctaaggtttctgctcatactgaagctgcttggttattaagttgcgttgcaaaaatgggttggttaaatagaatgacacaatttaaagaaaaagctggaaaagataaagaaaaggcaagtattggtttatattcttatccaatattaatggcagcagacattcttttatacgatgcaagtcatgtaccagtaggagaagatcaaaagcagcatattgagctttgcagagatattgcccaaaagttta

SEQ ID NO: 300978 - DNA, 229 bp, Unknown
  Bacterial polypeptide expressing nucleotide sequence isolated from the Sargasso Sea
aatgtcaaaaaaaatcttttcaggcgtgcaacccactggaaatttacatttaggaaattatttaggtgcaatcaaaaattttgtgaatttgcaaaaagaaaaggaaaatatttgtatttattgtgttgttgatcttcacgcaataacggttaagcaggatcctgagattttaaaaaaaaatataagggaaacaacagctgcgtttttagctagcgggctagacccaaaa

SEQ ID NO: 300979 - DNA, 790 bp, Unknown
  Bacterial polypeptide expressing nucleotide sequence isolated from the Sargasso Sea
gattgtatttactgtattgttgatctacatgcgataacagttaaacaagatcccaaggagcttagaaaaagtataagagaaactttggcagcctttattgcgagcggattggactcaaaaaaaagtattatttttaatcaatcatctgtttcagctcattctgaaggcgcatggattttaagctgtattgcaagaatgggttggctaaatagaatgacacaatttaaggaaaaagcaggtaaggacaaagaaaaagcaagtattggtctttatgcttacccagttttaatggctgctgacatattactttatgacactactcatgtgccagttggagatgatcaaaagcagcatctcgaattatgtagagatattgctcagaggtttaataatgattttgggatttctaattttttgaaagttcctgaaccattaattcaaaaaaatttttctagaattatgagccttaaggatggtacaaaaaaaatgagcaaatcagacccatcagattttagtagaataaatcttatggatgataaagataaaataataaataaaatcaaaaaagctaaaacagatatattaccgatgccaaatgaaaatgaagaattaaaaaatagacctgaggtattgaatttattaggtattttttcaagcttatcaagtcaaactattgaaaagtctataaatgaatttagtggaaaaaatttttctatttttaaggaaaaacttactaatttattaattgaaaaaattgaaccaatctcaaaagaaatcaataaattgttaa

SEQ ID NO: 300980 - DNA, 485 bp, Unknown
  Bacterial polypeptide expressing nucleotide sequence isolated from the Sargasso Sea
tatggctaaaaaaatattttctggtgttcagccaactggtaatttgcatttaggtaattatatcggagcaattaaaaattttgtagatcttcaaaacgaaaaaaataatcagtgtattttttgtgttgtagatttacatgcaataactgttaaacaaaatcctaaagaactaaaagacaatataagggaaacaactgcagcatttttagcaagtggtatcgagccaaaaaaaagcataatttttaatcaatcactagtgccagctcattcagaaggatcctggatacttggatgcgtcgcaagaatgggttggttaaatcgaatgacccagtttaaagagaaagcaggaaaggataaagaaaaagcaagtataggactctatatatacccagttttaatggctgcggatattcttttgtatgatgcatctcatgttccggtaggagaagaccaaaaacaacacttagaattatcaagagatattg

SEQ ID NO: 300981 - DNA, 499 bp, Unknown
  Bacterial polypeptide expressing nucleotide sequence isolated from the Sargasso Sea
atgggtaaaaaaattttttcaggagtacagcctacaggcaacctacatttaggtaattatattggtgcaattaaaaattttgttgatcttcaaaatcaagacggtaataaatgtgtttattgtgtagtagatttacacgcaattacagtaaaacagaatccgataacattaaaaaaaaatattagagaaaccacagcagcttttttggcaagtggcattgatcccaaaaaaagtattatctttaatcaatctatggtttcagctcatgctgatgcatcatggattttagggtgtgtagctaaaatgggttggttaaacaggatgacccagtttaaagagaaggcaggaaaagataaagaaaaagcaagcattggtttatatatttacccaatactaatggcagctgatattcttttatatgacgcaacacatgttcctgtaggagaagatcaaaagcagcatttagaactttcaagagatatcgcccaaaaaatttaac

SEQ ID NO: 300982 - DNA, 684 bp, Unknown
  Bacterial polypeptide expressing nucleotide sequence isolated from the Sargasso Sea
aatgagtaaaaaaaaattagtattttcaggagttcaaccaacagggaaccttcatttaggaaactatttaggagcgcttaaaaattttgtttcgttgcaaaaaaatgcggaatgtatttattgtgttgttgatttgcacgccattactgtttttcaagatcccagtcatttacatgataatgtcttagaaaccacggcaagttttttagcaactggtttagatcctgataaaagcattatctttaatcaatcttcagtttctggtcatgctgagcttgcttggattttaaactgtgtatcaagagtaggttggttgaatagaatgacacaatttaaggataaagcaggatcagataaagaaaaggccagtgttggactttatatttatccaaatctaatggcagcagatatcttactttataaagctactcacgttccagttggagcagatcaaaaacaacacttagaattatccagagatatagcgcaaaaatttaataatgattttaactgtaaagatttcttccctttaccagaaccattgatacctaaaaatatttctagaattatgagcttaagagatggaactaaaaaaatgagtaaatctgaagagtctgattatttcagaataaatttaaaagatacagctgacgaatttattaaaaagataaaaaaagcaaagtc

SEQ ID NO: 300983 - DNA, 968 bp, Unknown
  Bacterial polypeptide expressing nucleotide sequence isolated from the Sargasso Sea
aaaaataaaatgggaaaaaccaacaaaaagaatcttatcaggtgttcaaccgtctggtgatttgcatttaggtaattatcttggagctataaaaaattttgtatcacttcaaaaagaatatgaatgtttcttttgtgtcgttgatttacatgcaataacagtatggcaagatccaaaagttttatcacataaaactagagaagtaacagctgcttttattgctgctggaattgacccaaaaaaaaataatatttttgttcaatcccaagtaccacaacacgcacaacttgcatggttatttaattgtgttgcaagaatgggttggttaaatcgcatgacacaatttaaagacaaagctggaaagaatagtgaaaatgtttctgtcggtttattttcttatccaactctaatggcagcagatattttaatttatttagctacccatgttccagttggtgatgatcaaaaacagcatttagagctgactagagacatagctcaaaaatttaataatgattttcaaacagatttatttcccatacctgaacccttgatttttggagaagccaaaagagtaatgagtcttagagatggatccaaaaaaatgagtaaatcagacccttcagattattcaagaataatgcttacagatacagcagaaaatattaaacaaaaaattaaaaaagcaaaaacagacccatatccacttccagaaagttctagtgatttagaaagtagacctgaagcacaaaatctcgtttcaatttttgctgccctgaaagacgaatcagttcaaaatataattaatgagtatgttggaaaagaattttcaatatttaagagagatttagctgatttggcagtttcgaaattggaaccaattacaacagagatgaataaaatgatgaatgatatttcatatatcgattctattttaaagagggtagaaataatgctatttcagtttc

SEQ ID NO: 300984 - DNA, 485 bp, Unknown
  Bacterial polypeptide expressing nucleotide sequence isolated from the Sargasso Sea
tatgcataaacaaagagttttttctggagtccaacctacaggaaatttacacttaggtaattatttaggagcaataaaaaattttgttaatttacaaaaaaattttgagtgtatttattgcattgttgatttacacgcaattacaaatcgacaagatccaaaattattaaaattaaatattttggagacgatagctacttttattgcatcaggattaaaacccgaaaaaaatattatttttaatcaagcaagcgtagctgcacactctgaattagcttggatatttaattgtgttgcaagaataggatggatgaatcgaatgacacaatttaaagaaaaagctggaaataataaagaaaatgctagcgtaggtcttttagtttatccaaatttaatggcagctgatattcttttgtataaagctactcatgttccggtaggcgaagatcaaaaacaacatttagaattaacaagagatatagcaa

SEQ ID NO: 300985 - DNA, 623 bp, Unknown
  Bacterial polypeptide expressing nucleotide sequence isolated from the Sargasso Sea
tttggtaacagggctaactgccacaggcgatttgcacttgggttcgtatttgggcacaatgaagcagtgggagcggtattcaaaagaccatgactgttacttttttattgcagatatgcatgcaatcaccatacctcaagacccaaaactaatgcgaaaacgcagtttagatatggctgcattgtttatgagttcaggggtgtgtcttgagagttcagtgttgttcaatcagtcgcaggtaccgcagcatgccgagctatgctgggtgttgtcgtgcatcagtgcgatgggagagttacaacgcatgacacagtacaaggaaaaatcagccaatcaaaaacagaaagagacgttgggtttatttgcctatccttgtttaatggcagcagatattttgctttataatccgcagtatgtgcctgttggagaagatcagaaacagcacttagaattggccagaaacattgcacagcgtttcaatcatcaattcaaagaggaggtgttttcagttcctgatccagtcatccctaaggttgcggctcgggtaatggcacttggtgatccagaaaagaaaatgtctaaatcagacgtcagtgtgaataacacagtttacttactggata

SEQ ID NO: 300986 - DNA, 770 bp, Unknown
  Bacterial polypeptide expressing nucleotide sequence isolated from the Sargasso Sea
aatttttaatcagtcatcagtaagtggccatgcagaacttgcttggattttaaattgtatttgtagagtaggatggctaaatcgtatgactcaatttaaagataaagccggcaaggataaagaaaaagccagtgttggattatacatctatccaaatctaatggctgcagatatattattatataaagctacacatgtaccagttggtgctgatcagaagcaacatttagaattatctagagacattgcccaaaaatttaataacgacttcaataaaaaagatttttttcctttacctgagcctttaattcaaaaaaatatttctcgtgttatgagtttaagagatggaacaaaaaaaatgagtaaatcagaagaatctgattattctagaataaacttgaaagacagttccgatgaaatagtaaaaaaaattaagaaagctaaaactgacaccgacccgatcaccgaaaatataaaagattacgaaaatagaccggaagcatataacttattaagtatatattcggacctatctgatcaaaaaattgaaactacaattaatgaatttataggaaaagatttttcctctttaaaaacaaaattatccgaaaaactagttgagacaataagtccaatcggaaagaatattgaaaaattaatgagagatcgaaaacaccttgaagatgtattaaaaaaaggcaaacaaaaagccaatattattgctgaggaaaacctaaaaaagatacgtgaaatagtaggatttgtgtaat

SEQ ID NO: 300987 - DNA, 690 bp, Unknown
  Bacterial polypeptide expressing nucleotide sequence isolated from the Sargasso Sea
taaatagaatgactcaatttaaagaaaaggcaggaaaagataagaaaaatgtaagtgttggattatatatataccctgttcttatggcttcagatattcttttatatgactcaactcatgtaccagtaggagaggatcaaaaacagcatttagagttatcaagagatattgctcaaaaatttaatttagactttaacgctccagatttttttaatgttccagaacctctaatacaaaaaaatttcgcaagaataatgagtttaaaagatggaacaaaaaaaatgagtaaatctgacccttctgagctcagtagaattaatttaacagatagtccagatcaaattatcaataaaatcaaaaaagctaaaacagatactcaacctttgcctggtaatgaaaaagaattgagtaaaagacctgaggctgagaatttattaggaatttattctagtttgaaagatcaaaatttagagaattcaataaatgaatttagtggtaaaaatttttctgattttaaaaaaaaattaactgagattgtaattgataaaattacaccaatttcaaaagaaataaataaattaaaaaaagataataattttatagataatgtacttcaagagggtggcgaaaaagcacaggttgttgcttcaaaaaaagtcaaagaaatgaagaaaatcattggattttaaa

SEQ ID NO: 300988 - DNA, 196 bp, Unknown
  Bacterial polypeptide expressing nucleotide sequence isolated from the Sargasso Sea
atgggtaaaaaaatattctctggcgtacagcctacaggtaaccttcatttaggaaattatttaggagctataaaaaactttgtagacttaaataacgataaagaaaataagtgtattttttgtgtagttgatttacatgcaatcacagttaagcaagatcctaaagaattaaaaaacaatatcagagaaactgtgc

SEQ ID NO: 300989 - DNA, 970 bp, Unknown
  Bacterial polypeptide expressing nucleotide sequence isolated from the Sargasso Sea
aatgcgcgttcttagtggtatccatccatctggaactttacatttggggaattattttggaatgatgaatagaatggtaaggtatcagtcggaaaatgatttattttgttttattgctaattatcatgcacaaacaacaataccaactgcacagaccttatcagaaaacacattcaatgccacttgtgatttcttagctttgggtatagatcctgaaatctcaaccttttgggtgcagtcggatgttcctcaagttacagagttaatgtggattctttcttctttgacaagcgttggcagcctggatagagcaacatcctataaagataaaattgctcaaggaataaaaccaaatgcaggtctctattcctatccaatattaatggcagcagatattttactttttgatgctgaattagttcctgttggtagggaccaaaaacaacatttggaaatgacaagagatattgcgataagatttaataactcttttgggcagacattaattatccctgagcctgatattgaaaaagagactcaattaattccaggcgtggatggtaagaaaatgagcaaatcatatgataatacaataccactctttgattctgaaaagattataagaaaaaagataatggctataattacagatactgcagatattgatgagccaaaagataaagacactcctttattccagctttatagtttatttcttgataagaaagatcaatcaaagttatcagctcgatatgatggtaaaggactaagatatggtgatgttaaaatagaattattccaaaaagtaatggatcattttcagcccttcagagaaaaaagagctagtttaatttctaggccaaaagaagtcagagatattctgaggttaggtgcaaaaaaggcaaatatcattgctgaagaagtgttggacagagtaaaatcatctgtaggcatgatttacattaaatga

SEQ ID NO: 300990 - DNA, 775 bp, Unknown
  Bacterial polypeptide expressing nucleotide sequence isolated from the Sargasso Sea
aaatagtataatattcaatcaatctttagttcccgcgcattccgagggttcgtggattttgggatgtattgctagaatgggctggctaaatagaatgacacaattcaaagagaaagctggaaaagacaaggaaaaagctagtgttggtttatatatttatccaattctaatggcatctgatattctattatatgatgctactcatgtaccagttggaaatgatcaaaaacagcatctagaactctgcagagatatagctcaaaaatttaattatgaatataaatgtccgaattttttaagacctcctgagcccctgatacaaaaaaatttttcaagaataatgagtttgaaagatggcacaaaaaaaatgagcaagtcagatacttctgaaggaagcaggattaatttaacagataccgatgaccaaattattaacaaaataaaaaaagcaaaaacagataatgatactttacctggaaatgaaactggatttaagggaagacctgaagcagaaaatttgatgggtatttactctagcttaagaaatcaaaatattactgatacattaaatgaatttgaaggaaaaaatttttccgatctaaaaaataaactatctgaaataattgtgactaaactgtcgcctatatcaaaagaaatacaaaaattgctgttagataaaaattatatagatcaaattttagaggatggtgcagcaaaagcagaggacatttcatctaaaaaagttaaaaaaataaaagaaatagtcggtttttaa

SEQ ID NO: 300991 - DNA, 244 bp, Unknown
  Bacterial polypeptide expressing nucleotide sequence isolated from the Sargasso Sea
tatgggtaaaaaaatattctctggtgttcagcctacaggcaatcttcatcttggaaattatttaggtgctataaaaaactttgtagatttaaataacaataaagataacaaatgtattttctgtgtagttgatcttcatgccattacagtaaagcaaaatcctaaagaattaaaaaataatatccgagaaactgttgcaacttttgtagcaagtggaatagatccaaaaaaaagtataattttt

SEQ ID NO: 300992 - DNA, 736 bp, Unknown
  Bacterial polypeptide expressing nucleotide sequence isolated from the Sargasso Sea
ctcgcgtatggaaatcgccgcgacctggctggccggtggtctggatgtgaaccgggtgacgttctaccgccagtcggacatcccggaaatccccgagctgacctggctgctgacctgcgttgccgccaagggcctgctcaaccgcgcccatgcctacaaggcctcggtggacaagaacgtggaaaacggtgaagacccggatgcgggcatcagcatgggcctgtacagctacccggtgctgatggcagcggacatcctgatgttcaacgcgcacaaggtgccggtgggccgcgaccagatccagcacgtggaaatggcccgcgacatcggccagcgcttcaaccacctgttcggcaacggtaaagaattcttcaccatgcccgaggcgctgatcgaagaaaacgtcgccaccttgccgggcctggatggtcgcaagatgtccaagagctacgacaacaccatcccgttgttcaccagcgccaaggacatgaaggacgcgatctcgcggatcgtcaccgactcccgcgcgccaggcgaagccaaggacccggacaattcgcacctgttcaccctgtaccaggcgttcgcgaccaaggcccaggaagcccaattccgtggtgagctgctagaaggcctgggctggggcgaggcgaagaaccgtctgttccaactgctcgacggccagctcggcgaagcgcgcgagcgttaccatcaactgatggagcgcccatcggac

SEQ ID NO: 300993 - DNA, 685 bp, Unknown
  Bacterial polypeptide expressing nucleotide sequence isolated from the Sargasso Sea
taaggagaaggctggtcacgataaagaaaatgctacctctggattattttcatacccaactttaatggctgctgatattttgctatacaaagctacacatgttcctgttggaaatgatcagaaacaacaccttgaattgaccagagatattgctcaaaaatttaataacgagtttaaagctaaagatttttttcctttgcctgagcctttcatcgataaagatatatcaagaattatgtctttgagaaacggtttggaaaaaatgagtaagtcggatgagtctgattattcaagagttagtttaaaggatgatgaagaaagcattagaaaaaaaataaaaaaagctaaaacagcagatgttgtaatgcctgattcagaaagagatgttaatgatttacccgaagtaaataacttactcaatatttatagtggaattacaaaaagatctaaaaaagaattagtaaatatatacagaggtaagaatttttctgaatttaaagaaaatctttctgagtcattaattgaagttatttcaccaataaaatctgaaatttcaagattgatggatgataaaaattatttagattctattataaaagaaggatctgaaaaggccaatgaaagagcgataaagactttatcagaagtttacgatataattggatttataaaaaatgaaacatag

SEQ ID NO: 300994 - DNA, 675 bp, Unknown
  Bacterial polypeptide expressing nucleotide sequence isolated from the Sargasso Sea
aattcaaagaaaaggctggaaaagataaagaaaaggctagtgttggtctttatatttatcctgttttgatggctgcagatattcttttatatgatgcaactcacgtacctgtaggggaggatcaaaaacagcacttagaattagctagagatatttcaaaaaaatttaatacagattttgatacgcctgatttttttaaaatcccagaacctctaatacaaaaaaactttgctagaattatgagcttaaaagatggtaaaaaaaaaatgagtaaatcagatccatctgaattaagcagaataaacttaactgacacagaccaagagataattaataaaattaaaaaagcaaaaacagacactagcccctttccaataaatatcaacaatttgaagtctaggcctgaaattgagaatttaatcggaatttattcatctttatcaggaaaaaaaattgatcttttgtttgatgaatttaaagataaaaacttttctttttttaaggaaaaattatcagaagttatagttgaaaaaatttcgccaatttcaaaagagattaaaaaattgaaccaagatccatcttatatagatcaagttttacgagatggaagtgaaaaagcttataaattatcatcaaaaaaattacaagatattaagaaaaaatttggtttttaag

SEQ ID NO: 300995 - DNA, 814 bp, Unknown
  Bacterial polypeptide expressing nucleotide sequence isolated from the Sargasso Sea
aacaacagcagcatttttagcgagtggactagatcacaaaaaaagtattatatttaaccaatccttagttcctgcacattcggagggatcatggatcctagggtgtatcgcaagaatgggatggttaaatcgaatgacacagtttaaagaaaaagctggaaaggataaagaaaaagcaagcataggtttatatatttatccagttcttatggctgcagatatattattatatgactcaacacatgttccagttggagaagatcaaaaacaacatttagaactttcaagagatattgctcaaaaatttaatctagattttaatataccaaattttttcaaaacaccagatcctttaattcaaaaaaattttgcaagaataatgagcttaaaagatggtactaaaaaaatgagtaaatctgatccatcagatttaagcagaatcaatttaactgataataaagatgaaattataaataaaattaaaaaagcaaaaactgatactgaaccattgccagataatgaaaaagatttatttaaaagacctgaggcagaaaacttattaggaatatattctagtttaaaaaatcaagttttgcaaaaatctataaatgaatttggtggaaaaaatttttcagagtttaaaaaaaatttaagtgatttggttgttgaaaaaatttctcctatatcaaatgaaattaataagttaaaaaaaaataatgattttatagatgatgtattgagagatggtgcggcaaaagcagacgttatttcctcaaaaaaagttgaagaaatgaaaaaaattattggtttttaa

SEQ ID NO: 300996 - DNA, 440 bp, Unknown
  Bacterial polypeptide expressing nucleotide sequence isolated from the Sargasso Sea
aatgaagcgaattttctcaggcatccaaccatcgggtagtttgcaacttggtaattacctgggcgcaattagaaattgggcaaaaatgcaaaatgactatgaatgcattttttgcgtcgtagacttgcatgccatcactcttccccaggatccattggcgatgcgagctgctactcgtgaagttgctgccggagtgattgcagggggagtgaaccctgagacatgcattatttttaatcagagccaggttccggaacacgctgaactggcatggctgtttaattgcgttgcccgcctcggatggcttaacagaatgacgcaatttaaagaaaaagctggaaaagatcgtgacggcgcgtttgttggtctttatacgtaccctgtgcttcaggctgctgacatattagcttataaggctagcgatgtacctgttggagagg

SEQ ID NO: 300997 - DNA, 766 bp, Unknown
  Bacterial polypeptide expressing nucleotide sequence isolated from the Sargasso Sea
gcaagtgtttctgctcatagtgagttggcttggatatttaattgcgttgcgagaattggttggatgaatagaatgacacaatttaaagaaaaagctgggattaataaagaaaatgctagcgtaggtttgatggtttatccaaatttaatggccgcagatattcttttgtataaagctacacatgtgcccgtcggagaagatcaaaaacaacatttggaattaaccagagacattgcaaaaaaatttaataatgattttaattgtggtgagtattttccaatagtagaacctttaattcctaaagaggtgtccagagtaatgagtttacgtgatggaaaaaaaaagatgagcaaatctgaagagtctgatcaaagtagaataaatttaaaagatgacaaagatttaattgatcaaaaaattaaaaaagcaaaaactgactcttcttcaatcccttcagaagcagaaggacttaagaatagaccagaggctgccaatctaatatctatttatgccagcatgaacaatatgaagattaatgatgtgctaaaagaatttggaggaaaaaacttttcaacttttaagagtaaattaagcgaatcagtgattgaaaaaataagcccaattggaaaagaaataaacaaattattaagtgataaaaaaaatctacataaaattttagaaaaaggttcaaaaaaagcggacctaatagcaaaaaataatcttagagaaatatataatattgtgggactcacaaagttttcttgat

SEQ ID NO: 300998 - DNA, 664 bp, Unknown
  Bacterial polypeptide expressing nucleotide sequence isolated from the Sargasso Sea
atggatagtaaattagttttttctggtgtgcagcccactggaaacctccacttaggaaattatctcggagctgttaagcgatttgttgagcttcaagatgctgataccatgtgcatttattgcctggtagatcttcatgcaataaccaattggcaagatccaaaagaattacgccgaaatactatcgaggtaaccgccgcttttctagcctgtggtttacggcaagaaaattcaattatattcaaccaaagtcaagtctcgacacatacagagctagcatggatattcaattgtgtagcaagaattgggtggctgaatcgtatgacacaatttaaagagaaggctgggaaaaatagagaaaatgcttctcttggactttattgttacccaactctaatggctgcggacattcttgcttatcacgccactcatgtaccggtaggtgaagaccaaaaacaacatctcgaattaactcgtgatatagctatgaaatttaataatgacttcaagacgccaggctttttcccaataccggagccaattatagaaggaacagccacaagaataatgtctttgagagatggaaccaagaaaatgtctaagtcagaagcgtcagagatgtctcgcataaacctaaccgatgatagcgattctattagaaaaa

SEQ ID NO: 300999 - DNA, 517 bp, Unknown
  Bacterial polypeptide expressing nucleotide sequence isolated from the Sargasso Sea
aatgagcaaaaaaaaattagtattttcaggcgttcaaccaaccgggaatttgcacataggtaattatctcggtgctcttaaaaactttgtttcacttcaaaaagaaatggattgtatttactgtgtcgtagatttacatgctttaactacctttcaaaacccaagtaacttaaggaaaaatgtttatgaaacagtagctagtttcatagctacaggacttaatcctgataaaagtattatttttaatcaatcttcggtttctggacatacagagttagcgtggatcttgaattgtgtttcaagaatcgggtggttaaatcgaatgactcaatttaaagacaaggctggatcagataaagaaaaagctagtgttggattatatatttatccaaatcttatggctgcagatattcttctttataaagcaacgcacgtgccagtaggagcggatcaaaaacaacatttagaattaacaagagatattgcacaaaaatttaacaacgacttcaattgcaaa

SEQ ID NO: 301000 - DNA, 238 bp, Unknown
  Bacterial polypeptide expressing nucleotide sequence isolated from the Sargasso Sea
aatgacaaaaaaaattttttcaggtgttcaaccaacaggtaatttacatttaggaaattatttaggagctataaaaaattttgttaatcttcaaaaggaaaaggataataattgcatttattgtgttgttgatttacatgcaattactgtcagacaagatccgaaaattttaaaaaaaaatataagagagacaacagccgtttttttggcgagtggcctagacccaagtaaaagtatt

SEQ ID NO: 301001 - DNA, 811 bp, Unknown
  Bacterial polypeptide expressing nucleotide sequence isolated from the Sargasso Sea
atagcttcaggcctagacccagaaaaaaatattatatttaaccaagcaagcgtatcagcacatagtgaactagcttggatatttaattgtgtcgcaagaataggttggatgaatcgcatgacacagtttaaagaaaaagcaggatcaaataaagaaaacgctagtgtaggtttaatggtttatcccaatcttatggcagcagatatacttatttataaagctacacatgttcctgtaggcgaagatcagaaacaacatttagagcttactagagatatagcaaaaaaatttaataacgactttaaatgtggcgaatattttccaattgtagaacctttaataccaaaagaaatttctagagttatgagccttagagatggaaagaaaaaaatgagtaaatctgaagattctgatcaaagtagaataaatttaaaagatgataaagatttaatagatcaaaaaataaaaaaagccaaaactgataatgatcccataccttctgaaataaatgggcttaaagataggtatgaggcaactaatctaatatctatttatgctagtattaataatatgaaaatagataaagttttgaaagaatttggaggtaaaaatttttcaacttttaagagtaaattaagcgaatcaataatcgaaaagatttgccctattggaaaacaaattgaaaaattaatggatgatgaaaaatatctacataatgttctcgaaaagggttcaaaaaaagctgatatattggcaaaaaacaatcttaaagagatttatgatattattggcttaactaaattttcttgat

SEQ ID NO: 301002 - DNA, 186 bp, Unknown
  Bacterial polypeptide expressing nucleotide sequence isolated from the Sargasso Sea
tatgcataaaaaaagagtattttctggagttcagccaactggcaatttacatttaggaaattatctaggtgcaataaaaaattttgttgatttacaaaacaaatttgaatgcatttattgtatagtagatttacatgcaataacaaatttacaaaaaccacaaaaattaaaagcaaatattttaga

SEQ ID NO: 301003 - DNA, 154 bp, Unknown
  Bacterial polypeptide expressing nucleotide sequence isolated from the Sargasso Sea
aatgtccaaaaaaatattttctggcgttcagcccacaggcaatcttcacttaggaaactaccttggtgctataaaaaattttgttgatttaaataatgatattcaaaatgaatgtatattttgtgttgtagatttacatgcaataactattaaa

SEQ ID NO: 301004 - DNA, 548 bp, Unknown
  Bacterial polypeptide expressing nucleotide sequence isolated from the Sargasso Sea
tatggaacgtgtgttttcgggcgctcagcccaccggtaaccttcaccttggcaactatcttggcgcgatccgcaactgggtcgaattgcagaagaaatatgaatgcatcttctgcgtggtcgatatgcatgccatcacggtctggcaagatcccaaggaactgcgttccaacattcgcgaactggccgccagcatgatcgcttcgggcgtcgatccggaaaatcaggtgctgtttaaccaaagccaggtttccgcccatgccgaactggcctggatctttaactgtgtcgcgcgcatcggctggatgaaccgcatgacccagttcaaggaaaaggccggcaagcatcgcgaaaacgcgtcgctcggtctttatgcgtatccgagcctgatggcagctgacattctggcctacaaggcgacccatgtaccggtcggcgaagaccagaagcagcatcttgaactggcccgtgatatcgcgctcaaattcaacaccgattacggcgtcgaaggcttcttcccgcagcccgaaccgttgatccttggtccgg

SEQ ID NO: 301005 - DNA, 469 bp, Unknown
  Bacterial polypeptide expressing nucleotide sequence isolated from the Sargasso Sea
gatgaatactgacaagaaactagttttttcaggggtccaaccaacgggaaatttgcatctcggaaactatttgggagctataaaaaattttgttttacttcaaaaaaaaatgaattgtatattttgcgtagtcgatttgcatgctattaccgtatttcaagagcctaaagaacttaaaaaaaatatacttgagacaactgctggatttttagcatcgggattagatgaaaaaaaaaatgttattttttgtcaatcatcggttagtggccactcagagttagcttggatcctgagttgcacagctcgtttaggatggttgaatagaatgacccaatttaaagacaaagcaggctctgataaagagaaagctagtgttggtttatatatttatccaaatttaatggctgcagatattttactttatagggcaacacatgtacctgttggtgcagatcaaaaacaacattta

SEQ ID NO: 301006 - DNA, 934 bp, Unknown
  Bacterial polypeptide expressing nucleotide sequence isolated from the Sargasso Sea
agtattaaacatatgagtaaaaaaattttctcgggagtacaaccaactggaaatcttcatttaggaaactatataggagctatcaaaaattttgtaaatttacaaaatgatataaaaaatacttgtatttattgtgttgttgatcttcatgcaattacagttaaacaagatccaattgaacttaaaaaaaatattagagaaactgcagctacatttatagcaagtggattagattataaaaaaagtattatttttaatcaatctttagtacctgctcactccgagggatcttggatattaagttgtgttgcaagaatgggttggatgaaccgaatgacccaatttaaagaaaaggcaggaaaagataaagaaaaggcaagtgttggattatatatttacccgattttgatggctgctgacattttgctttatgatgcaacacatgttccagttggtgaagatcaaaaacaacatttagagctttctagagatatagcaaacaaatttaatttagactttaatgctccagattttttagttgcccccgaacctttaattcaaaaaacttttgcaagaataatgagtttaaaagatggaactaagaaaatgagtaaatcagatccgtcagagttaagtagaattaatctaaacgatagcgcagaccagatttcaaataaaatcaagaaagccaaaactgatccagaaccacttccagataatattaatggattatctaagagaccagaggcagaaaatctacttggcatttattcatgtttaattgatcaaccactaagtaagactatagatgaattttctggaaaaaaattttctgaatttaaggaaaaattagcaagcttagtagttgataagatatctccgatatctttcgaaataaataaattacttaaagatgaaaaatttatagatcaaa

SEQ ID NO: 301007 - DNA, 811 bp, Unknown
  Bacterial polypeptide expressing nucleotide sequence isolated from the Sargasso Sea
tgccgctgcatttattgctagtggcttagattttaagaaaagtattattttcaatcaatccttagttccagctcatgccgagagctcttggattttgagttgcgtagcaaggatgggttggttgaatagaatgactcaatttaaagaaaaagctggaaatgataaagaaaaaacaagtgttggtttatatatttatcctattctaatggccgctgatatacttctttatgattctactcatgttcccgtaggagaagatcaaaaacaacatttggaactttcaagagatatagcaaataaatttaacttagattttaacgcaccaaattttttagttgcaccagaacctttaattcaaaaaaattttgcaagaataatgagtttaaaggatggaattaaaaaaatgagcaaatcagatccttcagagttaagtagaattaacctaaatgatagtagtgatcagatattaaataagatcaaaaaagcaaaaacagataccgaaccacttcctgaaaacgaaaacggattatctaatagaccggaggcaaaaaacttattaggtatttattctagcttaagtgaccaaccattaagcaaaacaataaatgaattttctggtaaaaatttttctgaattcaaagaaaaattaacaaacttagttgtagataaaatttcacctatctcaaaagaaattaacaaattgctcaaagatgaaaactttattgataaagtattaaaagatggtgccgaaaaggctaatgaaattgcgtcaaagaaaatcaaaaatataaaaaaaatcattggtttttag

SEQ ID NO: 301008 - DNA, 685 bp, Unknown
  Bacterial polypeptide expressing nucleotide sequence isolated from the Sargasso Sea
ttccaagaccctaaagaacttaataatagcacactggagactattgctgggttcattgcttgtggtttagattttaaaaaaagtataatttttaatcagtcttccgtcagtgaacatgccgaacttgcctggatttttaactgcgtttcaagacttggatggcttaatagaatgacacaatttaaagaaaaggctgggacaaataaagaaaatgcgagtgttggattatatgtttatccaaatttgatggcagcagatattcttttatacaaagcaacccatgtcccagtgggagacgatcaaaaacaacacttagagctttgtagggatatagcaaataaatttaataatgattttggtagctcagatttttttccaataccagaacccttaatacataaaaatttttcacgagtaatgagcttaagggatggaaaaaagaaaatgagcaaatctgaagagtctgattattcaagaattaatcttcaagatagtgaagatgaaattgaaaaaaaaatcaaaaaagctaaaaccgactcatctgcaataccatcagataaaaaggatctagaaaaacgacctgaagcattaaacctgttaaatatatattcatctttaactaattcaactttagagaaaaccttgaaagaaatggaaggtaaggacttttcccaatttaaaaaaa

SEQ ID NO: 301009 - DNA, 733 bp, Unknown
  Bacterial polypeptide expressing nucleotide sequence isolated from the Sargasso Sea
acttgcttggctatttaactgtgtggcaagaatgggttggttaaatcgtatgacacaatttaaggacaaggctgggaagaatagtgaaaatgtttcagtgggcttattttcatatccaacattaatggcagcagatattttaatttatttagcaactcatgttccagttggtgatgatcaaaaacaacatttggagttaacaagagatattgcacaaaaatttaataatgattttgaaacagatttgtttccaataccagaacctctaatttttggagaagcaacaagagttatgagtttgcgtgatggatcaaaaaaaatgagtaaatctgatccatcagattattctaggataatgctaactgatactgcagaaaatattgttcaaaagattaaaaaagcaaaaacagatcctaagccattacctgtaaataagataggtttagaaaaaagacctgaagctgaaaacctgatttcaatctttgcatctatgcaagatacatctattgaaagtgtgattaatgaatattcaggtaaagaattctcagtttttaaaaaagatttagctgatctttcggtatctaaattagagccaattacatctgaaatgaatagattaatgaatgatattccttatattgataatgttcttaaaactggaaaggagaatgcgatatctgttgcagagccagttttagagaaaacaaaagaaattattggatttttattgtaa

SEQ ID NO: 301010 - DNA, 613 bp, Unknown
  Bacterial polypeptide expressing nucleotide sequence isolated from the Sargasso Sea
aatggttaaaaaaaatttagtattttctggggttcaaccaactggaaatttacatttaggaaattatttaggtgctttgaaaaattttgtttcccttcaaaaagaaatggaatgtatttactgtgtcgttgacttacatgctattactatatttcaaaatcctatagatttaaaaaataatgttttagaaacagtagcaagttttttagccacaggcctcgatccaaataaaagtataatatttaatcaatcgtcagtgtcagggcatgctgaactggcatggatttttaattgtgtttctcgtattggatggttaaatagaatgacgcaatttaaagataaggctggatcagataaagaaaaagcaagtgttggcttatatgtttatccaaatttgatggcagcagatattcttctatacaaggcaacacatgttcctgttggagcagaccaaaaacaacacttagagttgtcgcgagatattgctcaaaaatttaacaatgattttaattgtaaagatttttttcctctgcccgaacctttaattcctaaaaatatttcaagagtaatgagcttaagagatggaacaaaaaaaatgagtaaatcagaggag

SEQ ID NO: 301011 - DNA, 322 bp, Unknown
  Bacterial polypeptide expressing nucleotide sequence isolated from the Sargasso Sea
aatgaacaaaaatttcaaagaattagttttttctggggtacagccaactggcaatctccatcttggaaactaccttggtgcgatgaaaaattttgtagcacttcaaaagaaaatggagtgcatatattgtgtggttgaccttcatgcaataacagtttttcaagaaccaaaagacttaaggaaaaatattcttgagactacagctggttttgtagcttgcggattagattttaaaaaaagtataatatttaatcagtcttctgttagtggtcacgctgaacttgcttggatttttattgtgtatccagagttggatggatga

SEQ ID NO: 301012 - DNA, 389 bp, Unknown
  Bacterial polypeptide expressing nucleotide sequence isolated from the Sargasso Sea
gatggaccggatcttttccggcgtgcagccaaccgggaatcttcatctcggaaactatctgggtgcgatccgaaatttcgtcggcctgcagagcgattatgaatgcatctattgcgttgtagatctgcacgctatcaccgtctggcaggaccctaaggagctggtatcgaacacccgcgaagtgacggcggcgtttctggcctccgggatcgatcccgaaggcagcatcattttcaaccagagccaggtttccgcgcacgcgcagcttgcctggattttcaactgcgtcgcgcggctcggctggttgaaccggatgacccagttcaaggaaaaagccggcaaacaccgtgagaacgcgtcggtcggcctttatgcatatccgaacctga

SEQ ID NO: 301013 - DNA, 806 bp, Unknown
  Bacterial polypeptide expressing nucleotide sequence isolated from the Sargasso Sea
tttgggagcaatcaaaaattttgtaaaactcaacaatgaagatcaaaatgagtgtgtattctgtgttgttgatcttcatgctataacagttgctcaagatccaaaaaaattaaaagataacatttatgaaactgtagcaactttcattgctagtggcattgatcctgaaaaaagtattatctttaatcaatcaaaagtgagtgctcattcagaaacggcctggatattaagttgtgtcgctagaatgggatggcttaatagaatgacccaatttaaagagaaagccggaaaagataaagaaaaagcgagtatcggtctttattcttatcctgttttaatggcagcagatattttgttatatgacacaacccatgtacctgttggagatgatcaaaagcaacatttagaactttgccgagatatagctcaaaagtttaataatgattttaatgctgacgatttttttaaaattcctgagccattaattcaaaaagagttttcaagaattatgagcttgagagatggtacaaaaaaaatgagtaaatctgaattatcagatcttagcaggataaatttaacagatgataaagaccaaataataaataaaatcaaaaaagcaaaaactgatactttgccattaccatctacaagtgcagatttagaaaaaagacccgaagcaaaaaatttgatgggtatttattctagtttaatggatgtaagttcagaggatacaataaataaattttctggaaaaaatttctcggaatttaaagaaattttatcacaagttatggttgataaaattt

SEQ ID NO: 301014 - DNA, 763 bp, Unknown
  Bacterial polypeptide expressing nucleotide sequence isolated from the Sargasso Sea
gatgtccaaaaaaatattttctggtgttcaacctacaggtaatcttcatttaggaaattacttgggagcaataaaaaactttgttgaattgaataatgacaaaaaaaataaatgtatattttgtgtcgtggaccttcatgcaataactgttaaacaggataaagatcaattaaagaataatattcgagaaacagctgcaacatttattgccagtggcattgatccaaatgaaagtattatttttaatcaatcaaaagttcatgctcatgcagaaggtgcttggatgttaagttgtatggcacctatgggctggttaaatagaatgacgcaatttaaagaaaaggccggcaaagataaagaaaaagcatctgttggactttatatttatcctattttaatggctagcgatatattgctttatgatgctacccatgtaccggttggtgaggatcaaaaacaacatttagaattaactagagatatagctcaaaaatttaataaagatttcaattgtaaagattttttaaaagttcctgagccgttgataaaaaaaaatttttcaagaataatgagccttaaagatggtttaaaaaaaatgagtaaatcagatccttcagatcttagtaggattaatttaacagactcagaagatgaaataattaataaaattaaaaaagcgaaaaccgactctcatccaattccaaatgaagtgcagaaacttaaagatagacctgaagccgaaaaccttcttggtatttattct

SEQ ID NO: 301015 - DNA, 841 bp, Unknown
  Bacterial polypeptide expressing nucleotide sequence isolated from the Sargasso Sea
atcgtttttgtttatcgcaaacatgcactctttaacacaaattaaaaatgcagaagaactgagacaaaacacctacgaaatcgcagcagcttggttagcttgcggtttagataccgaaaaaacttatttctacagacaaagtgatattcctgaagtttgtgaactttcttggtatttatcttgcttctttcctttttctagattacaactggcgcattctttcaaagataaagcagaccgtttagaagatgtaaacgcaggacttttcacctatcctatgttgatggcggcagacattttattgtatgatgcagaaatcgttcctgtaggaaaagaccagttacagcatttggaaatggcgagagatgtaggtgcgagattcaacaatcaaatgggagaaattttcgtacttccacaagctgaattacaagaaaatacgaaatacgttccaggaattgatggtcataaaatgtctaaatctagaggaaatatcatcaatattttccttccagaaaagcaattaaaaaaacaagtgatggctatcgaaacggattctactccgctagaagaaccgaaaaaccctgacacttgtaaagtttttgccatttattctttactcgcaaatgaaacgcaaatcgcagaaatgcgtgctaaatatttggcaggaaattacggttatggtcatgctaaaacagaattactcaatttaattctagaaaatttcaaaacagaaagagaaaaattcgaatattacatgaacaatctttctgaattggacgctaaacttcaagaaggcgcagaaaaaaccagaaaaattgccgcagaaactttaaaaagagtg

SEQ ID NO: 301016 - DNA, 382 bp, Unknown
  Bacterial polypeptide expressing nucleotide sequence isolated from the Sargasso Sea
gatgtccaaaaaaatattttctggtgttcagcccacaggtaatcttcatttaggtaactaccttggtgctattaaaaattttgttgaattaaataatgatataaataataaatgtatcttttgtgttgtagatttgcatgcaataacagttaagcaggataaagatcaattaaagaataatatttttgaaactgctgcaacatttattgcaagcggcattaatccaaacaaaagtattatttttaatcaatcgacagtccatgcacatgccgagggttcctggttgttaagttgtatagatccaatgggttggctaaatagaatgacacaatttaaagaaaaagctggcaaagataaggaaaaggcatcagttggtctttat

SEQ ID NO: 301017 - DNA, 852 bp, Unknown
  Bacterial polypeptide expressing nucleotide sequence isolated from the Sargasso Sea
aaaaacctgaggagttacgaaataatgttttagaaactgttgccagttttttggcaacaggtcttgactcagaaaaaagcattatattcaatcagtctgctgtttccggacatgcagagctagcttggatattaaattgcgtatcaagaatgggatggttaaacagaatgacacaatttaaagataaagctggtgctgataaagaaaaggccagtgttggtttatatatatacccaaatttaatggccgctgatattcttctttataaagcaacccatgttcctgttggagcagatcaaaaacagcatttagagttatctagagatattgcacaaaaatttaacaatgattttgattgtaaagacttttttcctctaccagaagcattaataccaaaaaatgtttcaagagtcatgagtcttagggatggtaccaaaaaaatgagtaaatctgaggagtcagattactctagaataaatttaaaagatactgcagatcaaataaacaaaaaaataaaaaaagcaaaatctgactcagaacaaataccagacaatttaaaaagtttagaaaaaaaacctgaagctctaaatcttataaatatttactcagaagtttcaagaaacagtattgataaagtactgatagaaatgtcaggtaaagaatactcttatttgaaaactaagttagctgaggttttagttgaaacaattactcctgttggaaatgaaattaaaaaattattaggtgataggtcgcacctagagcaaattttgaagaaaggtaagcaaaaagccaatattattgctgaggaaaacctaaaaaatatacgtgaaaaagtgggtttgatataat

SEQ ID NO: 301018 - DNA, 396 bp, Unknown
  Bacterial polypeptide expressing nucleotide sequence isolated from the Sargasso Sea
tatgaaaaaaaaaattttctccggtgttcaacctactggaaatcttcatttaggaaattatttaggagcgataaaaaattttgttgatttaaacaatgatactcaaaatgaatgtatcttttgtgtagttgatcttcatgcaataactgtaagccaaaatccaaaagatctaaaatcaaatatacatgagacagtcgctacatttgttgctagcggaatagatcctaaaaaaagtataatttttaatcagtctcgggtgagcgctcactcagagtcagcgtggattttaagctgcgttgcgaaaatgggatggttaaataggatgacccaatttaaggaaaaagctgggaaagataaagagaaagcaagtatcggtctttattcttatcctgtttt

SEQ ID NO: 301019 - DNA, 691 bp, Unknown
  Bacterial polypeptide expressing nucleotide sequence isolated from the Sargasso Sea
tatgtctaaaaaaattttttctggtgtacaaccatcgggcaatttacatttaggaaattatttgggcgcaattaaaaattttgtaaatcttcaaaaagaaaaagaaaataattgtatttattgtgtagtagatctacacgcagtaactgttaagcaaaatccagaaattttaaaaagaaacatcagagaaactacggcggtatttttagctagtggtattgatccaactaaaagcataatatttaatcaatctatggttccttcccattcagagggagcttggcttttaggatgtgtagcaagaatgggatggttaaacagaatgacacaatttaaggaaaaagcaggaaaagataaagagaaagcaagtgttggactatatatttatccaatattaatggctgcagatattttattgtatgactccactcatgttcctgtaggtgaagatcaaaaacaacatttagaacttacaagagatatagctaataaatttaatttagattttaaatgtgaaaattttttaacagttcctgagcctttaattcaaaaaaatttttcaagaattatgagtttaaaagatggaacaaaaaaaatgagtaaatccgacttatcagatcaaagtagaattaatcttacagatgataaggatcaaattataaataaaattagaaaagcaaagactgatagc

SEQ ID NO: 301020 - DNA, 297 bp, Unknown
  Bacterial polypeptide expressing nucleotide sequence isolated from the Sargasso Sea
tatggctaaaaaaattttttcaggagtccaaccaacaggaaatctacatttaggaaattatttaggtgcaataaaaaattttgtagaactgcagaatgaggaggaaaataattgcatatattgtgttgttgacttgcatgcaattactttgaagcaggatccaaaaaaactaaaaaataatattagagaaactgctgcaacattcattgcaagtggacttaatccaaacaaaagcattttgtttaatcaatctttagttcccgcacactctgagggttcttggatattgagttgtat

SEQ ID NO: 301021 - DNA, 748 bp, Unknown
  Bacterial polypeptide expressing nucleotide sequence isolated from the Sargasso Sea
tttgcaaaaggacatggaatgtatttattgtgtagtagatcttcacgctataactgtttttcagaagcctcagagtcttcatgacaatgtgctcgagacgactgcaagttttttagcctctggtttaaatccaaacaaaagtattatttttaatcaatcatctgtttctggtcatgctgagcttgcttggattttaaattgcgtttcaagaataggttggatgaataggatgacacaatttaaagacaaagctggatctgataaagagaaggctagtgttggtctttatatttatcctaatttaatggcagcagatattcttctctataaagcaacgcatgttcctgtaggagctgatcaaaagcaacatttagagctttctagagatatagctcaaaaatttaataatgattataattgtaaaaattttttccctttaccggagcctttaatatctaaaaatattcctcgagtaatgagtttgagagacgggacaaaaaaaatgagtaaatcagaagagtctgattattcaaggatcaacttaacagactcagctgatgaaataagtaagaaaataaaaaaagctaaatcagactcagaagcaatcccttccaacaaaaaactacttgaaaacaaaccggaagctctaaatttattatctatctactctgaattaactaaaaaaagcttagataaaattatttctgaaatggctggaaaagaatattctattttaaaaaaaaattta

SEQ ID NO: 301022 - DNA, 331 bp, Unknown
  Bacterial polypeptide expressing nucleotide sequence isolated from the Sargasso Sea
atgaaaaaaataattttttcaggtgtccaacctactggtaatttacatttaggtaattatcttggtgctataaaaaattttgtaaaactaaataaagatgttaataataattgcatattttgtgttgttgatcttcatgctattacaactaaacagaacccaaaagagttaaaagaaaatattctcgaaactatagcaacctttattgcttgtggaattgatccaaaaaaaagcatcttatttaatcaatctcaagtacctgctcattcagaaactgcttggattttaagttgtgttgcaaggatgggatggttaaatagaatgacacaat

SEQ ID NO: 301023 - DNA, 849 bp, Unknown
  Bacterial polypeptide expressing nucleotide sequence isolated from the Sargasso Sea
aagatccaaaagtgttagcagataaaacaagagaagtcactgctgcgtttattgcttcaggaattaatcctaaaaaaaataatatttttgttcaatcccaagttcctcaacatgctcaacttgcttggttatttaactgtgttgcaagaatgggctggttaaaccgtatgacacagtttaaagataaagctggcaaaaatagtgaaaatgtttcagtaggtttattttcttatccaacattaatggcagctgatattttaatttatttggcaacacatgttccagttggtgatgatcaaaaacaacatttggaattaacaagagacattgctcaaaaatttaataatgattttgagactgatttatttcctattccagaaccattaatttttggagaagcaacaagagtaatgagtcttcgtgacggatcaaaaaaaatgagcaaatcagatccatcagaatattcgaggattatgcttaccgataccgcagataatattatacaaaaaattaaaaaagcgaaaacagaccctcaacctttaccaactaattcgcatgatttaaagacaagacctgaagcacaaaatttaatttctatttttgcatcacttgaaaataattctattgatgatgttattaaagaatatgctggtaaagagttttcagtttttaagaaagatttagctgatttagctgtttcaaaattagaaccaattacatctgagatgaataaaataatgagtgaggtttcatacatcgatgctgtattaagagagggtagggagaaagctatatctgtagcagaaccggttttgaataaaactaaagaaataattggctttctctaat

SEQ ID NO: 301024 - DNA, 784 bp, Unknown
  Bacterial polypeptide expressing nucleotide sequence isolated from the Sargasso Sea
ttgcatgcaattacaactaaacaaaatccaaaaattcttaaagataatataagagaaacaacggcagcttttttggcaagtggaatagatccaaataaaagtataatatttaatcaatcattagtgccagcgcattcagagggttcttggattttaggatgtgtggctcgtatgggctggttgaatagaatgactcaatttaaagaaaaggctggtaaagataaagaaaaagccagtgtaggcttatacatatatccagtattaatgacggctgatattttattatatgatgctacccatgttcctgtaggtgaagatcaaaaacagcatttggaattatctagagacattgctcaaaaatttaatttagattttaacgcaccgaattttttaagagctccagaacctttaatacaaaaaaatttttctagaataatgagtttaaaaaatggagttaataaaatgagcaaatcagatccttcagatttgagtagaataaatttgactgatagtaaagatcaaattattaataaaattaaaaaagccaaaaccgataatgaccctttgccagataacgaaaaaaatttaaacaaaagacctgaagtagaaaatttattaggtatttattctagcttgaacaatcaatcattaaaaaattcaataaatgaatttagtggaaaaaatttttcaatgtttaaagaaaaattatcagatcttgttgtagaaaaaatttcaccaatatctgttgaaattaataaattgcaaaaagacaataactatatga

SEQ ID NO: 301025 - DNA, 412 bp, Unknown
  Bacterial polypeptide expressing nucleotide sequence isolated from the Sargasso Sea
atgggtaaaaaaattttttcaggagtccaaccaacgggaaatcttcatttaggaaattatttaggagctataaaaaactttgtagaactaaataacgataatgaaaataaatgtgttttttgtgttgttgatcttcatgctattactgttaaacaagaaccaagggaattaaaaaataatattagagagactgtagcaacttttattgcaagcgggatagaccataaaaaaagtataatttttaatcaatcaaaagtgccagctcacgctgaaggagcgtggatattaagttgtattgctcggatgggatggttgaacagaatgacacagtttaaagaaaaagctggaaaagataaagaaaaagcaagtataggtctatattcttatcctattttaatggctgcagatatat

SEQ ID NO: 301026 - DNA, 676 bp, Unknown
  Bacterial polypeptide expressing nucleotide sequence isolated from the Sargasso Sea
atttttaaagagaaagctgggtaaagataaggagagagctagtattggattatactcttatccagttctaatggcggctgatatacttttgtacgatgctactcatgttccagtaggcgatgatcaaaaacaacatttggaattatgtagagatatagctcaaaaatttaataatgattttgaagtagaaaattttcttcaagttccagagcctttaattcaaaaagaattttcaagaataatgagtttaaaagatggttcaaaaaaaatgagtaaatcagaattatcggatttaagtcgaattaatttaacagacaataaagatcaaataattaacaaaatcaaaaaagcaaaaactgatcctttacccatgccgcaacatataaaagaaattgatgaaagattagaagcgaaaaatcttttaggaatatactcaagtttaactaattctacattagaaaactcagtaaaaaattttgcaggtaaaaacttttcagaatttaaagaacaattaattgaagaacttgttaataaagttgaacctatttcaaaagagatcagaaaacttttagaagataaaaaatttcttgataaaattcttctagatggagttgaaaaagcaaatatgattgcttctaaaaagattgaaagaattaaagaaatagtgggtttttaa

SEQ ID NO: 301027 - DNA, 777 bp, Unknown
  Bacterial polypeptide expressing nucleotide sequence isolated from the Sargasso Sea
aaaaaagtataatttttaatcagtcaggtgttgcagcccactccgaaggtgcttggattttaagctgtgtagctcgtatgggatggctaaacagaatgacacaattcaaagaaaaagcaggaaaggataaggaaaaagccagcattggattatattcttatcctgttcttatggcagctgatatcttgttatatgatgccacccacgttcctgtaggagatgatcaaaagcaacatcttgagttgtgcagagatatagctcaaaaatttaataatgattttggtgtggaggattttttaaaagttcctgagcctttaattcagaaagaattttctaggattatgagtttaaaggatggatcaaaaaaaatgagtaaatctgagttatcagatttaagtagaataaacttaacagatgataaagatcaaataataaataaaattaaaaaagctaaaacagatacgttaccaatgccaaaagatattaaagagcttgaggggaggctagaggcacaaaatcttttaggaatttttgctagcttgagtaattcaactttggaaacttccatagaaaaatttgctggcaagaatttttcagagtttaaacaagacctatctgaattattagttaataaaattatgccaatatctgatgagataaaaaaattacttcaagaccaatcatatctcgattctatccttctagatggagttgaaaaggctaacaaaattgcgtcaaaaaagatcaaaaatataaaagaaactgtaggtttttaac

SEQ ID NO: 301028 - DNA, 466 bp, Unknown
  Bacterial polypeptide expressing nucleotide sequence isolated from the Sargasso Sea
atgaataacaatgaaacaaatatcgtattatcaggtgttcaaccatctggtggcttacatattggtaactacttaggtgcgatccaaaattttgtgaaaatgcaaaaagaatataattgtttcttttgtgttgttgatcttcatgcaattacagtaaagcaaaatcctatagatttaaaaaataatactttagaggtcgtcgcaacatatattgcttcaggtattgatcctcataaaagtattatttttaatcaaagcggtatttcagctcatgcggagttagcttggatatttaattgtgttacaagaatgggatggcttaaccggatgacacaatttaaagataaagcaggaaaagataaggagaatgcaagttccggattatttatctatccaaatttaatggctgcagacatattgctatacaaggccactcatgtcccagttggtaatgatcaaaagcaac

SEQ ID NO: 301029 - DNA, 550 bp, Unknown
  Bacterial polypeptide expressing nucleotide sequence isolated from the Sargasso Sea
tatgcataataagagagtattttctggagtacagccaacaggaaatttacatcttggtaattatctaggtgcaataaaaaattttgtagaattacaaaataaatttgaatgtatttattgtatagtagatttacatgcaatcactaatcgtcaagatccaaaagaattaaagtctaatattttagaaactgtcgcgagttttgttgcatcaggtttaaatcctgaaaaaaatattatttttaatcaagcaagtgtttcagcgcattccgagctagcatggatatttaattgtgtagcaagaattggttggatgaatcgaatgacacaatttaaagaaaaagccggtgtaaataaagaaaatgctagtgttggtttattagtttatccaaatctaatggcggctgatatacttttgtataaagctactcatgttcctgtaggtgaagatcaaaaacaacatttagaactaaccagagatattgcaaaaaaatttaacaatgattttaactgtaaagattactttcctatagtagaacctttaattcctaaa

SEQ ID NO: 301030 - DNA, 598 bp, Unknown
  Bacterial polypeptide expressing nucleotide sequence isolated from the Sargasso Sea
cccatactgatggctgctgatattttgatttttaatgcccaccaggtgccggtcgggcgcgaccagattcagcatgttgagatggcgcgggatattgcgcagcgcttcaatcatcactacggcgagacattcaccttgcctgaggcggtggtcgatgaccacgtcgccgtcttgcaggggctggatgggcgcaagatgagtaagagctacggtaataccatcccgctgtttggcacctcaaaacaactgcaaaaggcaatcaacaagatcaaaaccaatttattggagcccggcgaacccaaagacctcgatgactcgaccgtgtttcaggtgtggtgcgcgtttgctaacgaagcggaacgtgagcacatgcgtcaggcgtttgccgatggcattgcctggggcgaggccaaaaagcagctctttgagcgggttaatgacgagttggcgcctgcgcgggagatctatgaccggctgatggtcaaccccgaggaggtggaagccatcctcacgcaaggtgccgagcgcctcaggccgcaaagtgcggcattactggagaaagtgcgtcacgctgtgggcttgcgcgcgtaccgctagc

SEQ ID NO: 301031 - DNA, 742 bp, Unknown
  Bacterial polypeptide expressing nucleotide sequence isolated from the Sargasso Sea
tatgtctaaaaaaattttttctggagtccaaccaactggaaatttacatcttggcaattatataggtgcaataaaaaattttgtcgatttacaaaacaataaagataatagctgcattttttgtgtcgttgatcttcatgccatcaccgtaatgcaagatccgatagagttgaaaaataatattagagaaacagcagcagcatttatagcaagtggcattgatccaaaaaaaagtataatatttaatcagtctttagttcctgcacattccgagggctcttggattttaggatgtgtagccagaatgggatggcttaatagaatgacgcaattcaaagaaaaagctggaaaagataaggaaaaagctagtgttggtttatatatttatcccattctaatggcctcagatattcttttatatgatgctactcatgttccagttggagatgatcaaaaacagcatctagaactttgtagagatatagctcaaaaatttaataacgaatataaatgtccaaatttcttaagacctcctgagcccctcatacaaaaaaatttttcaagaataatgagtttgaaagatggcacgaaaaaaatgagtaagtcagatattgctgaaggaagtaggatcaatttaacagataccgaggatctaattattaacaaaataaaaaaagcaaaaacagataataatgctttacccggtaatgaagatggacttaatggaagaccagaagcagaa

SEQ ID NO: 301032 - DNA, 598 bp, Unknown
  Bacterial polypeptide expressing nucleotide sequence isolated from the Sargasso Sea
tatgggagttaaaaaaattttttcaggtgttcagcctactggtaatttacatttgggaaactatattggagcgataaaaaactttgttgatctacaaaatgaaaataacgattgtatattttgtgtagttgatttgcatgctgttaccgtaaaacaagatcctaaaattttaaaacaaaatgttagagaaactgctgcaacatttttagcatgtggcattaacccaaaaaaaagtataatttttaatcagtcctctgtgtctgctcattcagagctatcttggttgttaagttgtgttgcaaggatgggttggttaaatagaatgacacagtttaaagaaaaggctggaaaagataaagaaaaggccagtgttggtctttatatttatcctgttttgatggctgcagatattcttctatatgatgcaactcacgtacctgtgggggaggatcaaaaacaacacttagaattagccagagatatatcaaaaaaatttaatacagattttgatgcacctgaattctttaaaattccagaaccattaattcaaaaaaactttgcaagaattatgagtttaaaagatggaaaaaaaaaaatg

SEQ ID NO: 301033 - DNA, 155 bp, Unknown
  Bacterial polypeptide expressing nucleotide sequence isolated from the Sargasso Sea
tatggttaaaaaaattttttcaggagtccagccaacaggaaatctgcatttaggaaactatttaggagcaataaaaaattttgtagaactgcagaatgaaaaagacaataattgcatatactgtgttgttgacttgcatgcaattactttaaaac

SEQ ID NO: 301034 - DNA, 886 bp, Unknown
  Bacterial polypeptide expressing nucleotide sequence isolated from the Sargasso Sea
atgagcgcaaaaccaatcgtattaagcggctgtcagccatccggacagcttaccctgggtaactacatgggtgcgctgaagcagtgggtctccatgcaggaaacacacgactgtctgtatatgattgtggatttgcatgccataacggttcgtcaggacccggccaaactcaaagaagcttgtctggatggtctggcgttgtatctggcctgtggtatcgacccaaccaggagtacgctgtttttgcagtctcatgtgcctgagcacgcgcagctttcatgggtactaaactgctttacccaaatgggtgaactgaaccgcatgacccagttcaaggacaagtcggcccgcaatgccagtaatattaatgtaggcctgtacagctatccggttttacaagccgccgatatcctgctttatcaggctaatgaagtaccggtaggtgaagaccagaaacaacacctggagcttacccgcgatatcgccacccgcttcaacaacatttacggcgacactttccgtattcctgatccattcatccctgaattcggtgcccgcattatgagcttgcaggagccggataagaagatgtctaaatcagacaccaacccgaataactttatcggcttgctggaagaacctaagaaggtagccaagaagatcaaacgcgctgtcaccgattctgacgagcaggcgcgtatttattttgactgggcagaaaagccaggggtgactaacttactcacacttctgtcactggctaccggcaaaacagtggacgaactggtacccgcttacgaagataaaatgtacggtcacttaaagtctgacgtggctgatgctgtggtcgctctgattgagcctctgcaggaacgatataaagccc

SEQ ID NO: 301035 - DNA, 700 bp, Unknown
  Bacterial polypeptide expressing nucleotide sequence isolated from the Sargasso Sea
catgggtaaaaaaatattttctggtgtgcaacctacgggcaatcttcatttaggtaattatttaggagcaataaaaaattttgttgaactaaataatgatagtgcaaatgaatgtattttttgtgtggtggatttacatgctataacagtcaaacaagatccaaaagaattaaaaaaaaatattagagaaactgtagcaacatttattgcaagtggaatagacgcaaaaaaaagtataatttttaatcagtcaggtgttgcagcccattctgaaggtgcctggattttaagctgtgtggctcgtatgggatggctaaatagaatgacgcaatttaaagaaaaagcaggaaaggataaggaaaaagccagcgttggattatattcttatcctgttcttatggcagctgatatcttgttatatgatgctacccatgttcctgtgggagaggatcaaaagcaacatcttgagttgtgcagagatatagctcaaaaatttaataatgattttggtgtggaggattttttaaaagttcctgagcctttaattcaaaaagaattttccaggattatgagtttaaaggatggatcaaaaaaaaaaagtaaatctgagttatcagatttaagtagaataaacttaacagatgataaagatcaaataatcaataaaaaaaaaaaagctaaaacagataccttaccaatg

SEQ ID NO: 301036 - DNA, 341 bp, Unknown
  Bacterial polypeptide expressing nucleotide sequence isolated from the Sargasso Sea
aatggaaaaagtaagtaaaagaattttatcaggtgttcaaccttctggtgatttacatttaggaaattatctaggggcaattaaaaactttgtctctcttcaaaaagaatttgaatgtttcttttgtgtagttgatttgcacgccattaccgtttggcaagatccaaaaattttaaagcaaaagacaagagaggtagcagcagcttttattgcttctggtattgatccagaaaaaaacacattatttgttcaatcgcaagttcctcaacatgcacagttggcatggatctttaattgtgtggcgcgaatgggatggttgaatcgtatgacacaatttaaag

SEQ ID NO: 301037 - DNA, 739 bp, Unknown
  Bacterial polypeptide expressing nucleotide sequence isolated from the Sargasso Sea
tatgggtaaaaaaatattctctggtgttcaacctactggcaatcttcatttaggaaattatttaggggcaataaagaattttgtagatttaaataatgataataataacgaatgtattttttgtgtggttgatttacatgccatcacagtcaagcaagatcctaaagaattaaaaaataatatcagagaaactgttgcaacctttattgcaagtggaatagacccaaaaaaaagtttaatttttaatcaatctagagtggctgctcatgctgaaggagcatggatattaagctgtattgctagaatgggttggttaaacaggatgactcaatttaaggagaaagcaggtaaagacaaagaaaaagctagcattggtttatattcttatccggttttaatggcagctgatattcttttatatgatgccactcatgttcctgtaggtgatgatcaaaaacaacatttagagttatgtagagatatagctcaaaaatttaataatgattttagagttgataattttcttcaagttcccgaacctttaattcaaaaagaattttcaagaataatgagtttaaaagatggttcaaaaaaaatgagtaaatctgaattatcagatttaagtagaataaatttaacggacgataaagatcaaataataaataaaataaaaaaagcaaaaaccgatcctttgcctatgccacaagatataaaagaactcaatgaaagattagaggca

SEQ ID NO: 301038 - DNA, 544 bp, Unknown
  Bacterial polypeptide expressing nucleotide sequence isolated from the Sargasso Sea
aatgaaaaagataatgagtgtgtttattgtgttgtagatttacatgcaattactgtaaaacaaaatcctaagattttaaaagataacataagagaaacaacagctgcttttcttgcgagtggacttgattataaaaaaagtataatttttaatcagtccctagtaccggctcatgcagagggttcttggattttgggatgcattgcaagaatgggatggttaaaccgcatgacacaatttaaagaaaaagctggtaaagataaagaaaaggtcagtgttggcttatatatatacccaatacttatggctgccgatattttattgtacgattcaacgcacgtgcctgttggagaagatcaaaaacaacatttagaattgtctagagatattgctcaaaagtttaatttggattttaaagctcatgatttcctgaaagcgccagagccattaattcaaaaaaattttgcaagaattatgagtttaaaagatggaacaaaaaaaatgagcaaatctgatccctctgatttaagcaggattaatttaa

SEQ ID NO: 301039 - DNA, 736 bp, Unknown
  Bacterial polypeptide expressing nucleotide sequence isolated from the Sargasso Sea
gcaagatagtgaaactatatactcaatagttgatcttcatgcattaacgttagattccaatttagaaacattaaatgaatcagtttatgaggtaactgcagctattatagcctcaggtattgacccacaaaaatcaataatatttaatcaatcttctgtaaaagaacattctgaattgtgctgggtatttaactgtgtagcaaaaatgggttggttaaacaggatgacacagttcaaagaaaaagctggtaaaaagagagaaaacgcatctgttggattatataattatcctattttgatggcagcagatattttgttgtatagggctacgcatgtcccagttggtgatgatcaaaaacaacatttagagcttacaagggatattgcgacatcattcaatcatattttcaaaaacaatcttaaaaatgattttttcaccttacctgaaccaataatttctggaccagcaaaaagaataatgagcttaaaggatggaacaaaaaaaatgagtaaatctgagctttcagatttttcaagaattaatttaacagacaatagagataatattgtaaaaaaaatcaaaaaagctaaaacagatgcacttcctatacctgaattggaaacagaattaacttctcgttttgaagctcaaaacttgataaatatatatgctggacttgaagacaagtcacctcaaatgggttttggacgagtattctggaaaagggtttgctga

SEQ ID NO: 301040 - DNA, 557 bp, Unknown
  Bacterial polypeptide expressing nucleotide sequence isolated from the Sargasso Sea
tatgagtaaaaaaatattttcaggtgttcagccaactggtaatcttcatcttggtaattatttaggagcaatcaagaactttgttgaattaaataatgaagattcaaatcactgcattttttgcgtagtcgatttgcatgcaataaccgttaaacaagatccgaaagaattaaaaaaaaacattagggaaacagttgcaacgttcatagcaagtggcatagatccaaagaaaagtataatttttaaccaatcaggtgtagcagcacattctgaaggagcttggattttaagctgtgtagctcgtatgggttggctaaatagaatgacacaatttaaagaaaaggctggaaaggataaggaaaaagccagtattggattatattcttatcctgttcttatggcatctgatattttattatatgatgctactcatgttccagtaggagatgaccaaaagcaacacttagagttatgcagagatatagctgaaaaattcaacaatgattttggacaagagggttttctaaaagtccctgagcctttaattcaaaaagagt

SEQ ID NO: 301041 - DNA, 724 bp, Unknown
  Bacterial polypeptide expressing nucleotide sequence isolated from the Sargasso Sea
ggggtgtttaattgtgtcagtcgtattggttggcttaatcgtatgactcatttcaaagacaaagcaggaaagaataaagaaaatgttagtgtgggtttgatggtctatcctaatttaatggccgcagacattttggcttatcttgcaacgcacgttcctgttggagatgatcaaaaacaacatttagaattatcaagagatatagcacaaaaatttaataatgattttggagtagaattttttcctcaacctgaacctttaatttatggaagtgccacaagagtgatgagtttacgagatggcagcaaaaaaatgtctaaatcagatccatctgatttttcacgaattcttttgacagatgatgatgacaccattgctgcaaaaattaaaaaagcaaagtctgactcagaattaatccctggatctaaggaggagcttcaaagtaagcctgagtgtttaaatttgattaatattttatctgcaacgactaatcaatcggttgatcaagtgctaagtcattatgcaggtaaagagtattcctctttaaagaaagacttagctgatagtcttgttcaagtaatcagccctataagaggtgaaattaataatctattaaataaccgagatgagttgaatgtgatattagctgaaggaactgaaaaagctgcggccattgctaaccccataattgaagaggtttataaaatagtcggatttaaataag

SEQ ID NO: 301042 - DNA, 643 bp, Unknown
  Bacterial polypeptide expressing nucleotide sequence isolated from the Sargasso Sea
aaaggcgagcgtaggtctatacatatatccaatacttatggctgctgatattttgttgtatgattcaacgcatgtcccagttggagaagatcaaaaacaacatttagaactatctagagatattgctcaaaaatttaatttagactttaaataccctgattttcttaaagcaccagaaccattaatacaaaagaattttgcaagaattatgagcttaaaagatggaacaaaaaaaatgagtaaatctgatccttcagattttagtagaattaatttaacagataaaaaagatgagatagtgaataaaataaaaaaagctaaaactgataatttagctttgccttcagacgataaaaaattaagtgaaagaccagaagttgagaatcttttagggatttattcaagtttaaataatcaaacacttcaaaattcaataaatgaatttggtggaaaaaatttttctgaatttaaaaataaactttctgatcttgttgtagaaaaaatttccccaatatctaacgaaataaataaattaaaaaaggataataactttatagataagattttaaaagatggagctgaaaaagctgataaaataacttcaaaaaaagttaatgaaatgaaaaaaatcataggtttttaa

SEQ ID NO: 301043 - DNA, 592 bp, Unknown
  Bacterial polypeptide expressing nucleotide sequence isolated from the Sargasso Sea
atgaaaaaaaaaattttttctggtgtacagccaactggaaatttacatttgggaaattacttaggggcaatcaaaaattttgttgcactacaaaacgaaaaagataatgattgtgtttattgtgttgtagacttacatgcaattactgttaaacaagatccaaagattttaaaagataacataagagaaacaacagccgcttttctagccagtggattggattataaaaaaagtataatttttaatcagtctctagtacctgctcattcagagagctcttggattttaggatgtgttgcaagaatgggttggttaaatcgcatgacacaatttaaagaaaaggctggtaaagacaaagaaaaagcaagcgttggcttatacatatatccaatacttatggctgcagatattttgctgtatgactcaacgcatgtacctgttggagaggatcaaaaacaacatttagaattatctagagatattgcacaaaaatttaattcagattttaatgctcctgattttcttaaagcaccagaaccattaatacaaaaaaattttgcaagaattatgagtttaaaagatggaacaaaaa

SEQ ID NO: 301044 - DNA, 799 bp, Unknown
  Bacterial polypeptide expressing nucleotide sequence isolated from the Sargasso Sea
atagcaagcggtattgatccaagtaaaagtattatttttaatcaatcaaaagttcatgcacatgcagaaggatcatggatgttaagttgcatggcaccaatgggttggttaaatagaatgacacagtttaaagaaaaagctggcaaagataaggaaaaagcatcagtaggtctatatatttatcctgtattgatggccagtgatatattactatatgatgctacgcatgtacctgttggagaagatcagaaacaacacttggaattaactagagatattgctcaaaaatttaacaaagacttcaactgtgatgattttttaaaagttcctgaacctctaataaaaaaaaatttttcaagaataatgagtttaaaagatggtttaaaaaaaatgagtaaatcagatccatctgatcttagtagaattaatttaactgatacaaaagacgaaattataaataaaattaaaaaagcaaaaactgactctttttcaattcccaatgaagagcaaaaattaaaagatagacctgaagctcaaaatcttcttgaaatttattctagtatttctaatcaaactttaaataaaactttagatgaatttggtggtaaaaatttttcagatctaaaaaatcaattagcggagattttatcaagtaaaatttctccaatctctgatgaaataaaaaaattgattaatgatcaagaatatctagataaggttttagtacaaggagcaagtaaagccgaggaaattgcaggaaaaaagataaaagaaatgaaggaaataataggtttttaaa

SEQ ID NO: 301045 - DNA, 346 bp, Unknown
  Bacterial polypeptide expressing nucleotide sequence isolated from the Sargasso Sea
aatgaacaaaagttctaaatcactagtattttcaggtgtccagcctactggaaacctacatttgggcaattatcttggtgctattaaaaactttgttgaccttgaaaaaaaaatcacatgtatatttagtgtggtcgatcttcacgcaataacagtatttcaggatccatcagaactaaaaaacaatatacttgaaacaacagctgggtttgtagcttgtggattagattttaaaaaaagtataatatttaatcaatcttccgttagtgagcatgctgagctcgggtgggttttaaattgtatttctagagttggatggatgaacagaatgacacaatttaaagaa

SEQ ID NO: 301046 - DNA, 814 bp, Unknown
  Bacterial polypeptide expressing nucleotide sequence isolated from the Sargasso Sea
attcgtgaaacaactgcaacatttatagcaagcggtattgatccaagtaaaagtattatttttaatcaatcaaaagttcatgcacatgcagaaggatcatggatgttaagttgcatggcaccaatgggttggttaaatagaatgacacaatttaaagaaaaagctggtaaagataaggaaaaggcttctgttggtctatacatttaccccatattgatggccagcgatatattgctttatgatgcaacacatgtaccagttggagaagatcagaaacaacatttggaattaacaagagacattgcccaaaaatttaataaagattttaattgcgatgattttctgaaagtaccagaacctttaataaaaaaaaatttttcaagaataatgagtttaaaagatggtacaaaaaaaatgagtaaatcagatccatcagattttagtaggattaatttaactgatactaaagacgaaattattaacaaaattaaaaaagctaagactgattcatttccaattccaaatgaaaagcaaaaattaaaagataggcctgaagccgaaaatttactagtaatttattctagtatttcaaatcaaactttggataaaacattagatgaatttggaggtaaaaatttttctgatctaaaaagagatttagctgaaaatttatcaaataaaatttccccaatctctaatgagataaaaaaattgattaatgatcaaaattatttagataaagttcttgcagaaggagcatttaaggcagaagaaattgcaggaaaaaaaataaaagaaatgaagaaaataatag

SEQ ID NO: 301047 - DNA, 517 bp, Unknown
  Bacterial polypeptide expressing nucleotide sequence isolated from the Sargasso Sea
atgtctaaaaaaattttttctggagtgcaacctacaggaaatttacaccttggtaattatataggtgcaataaaaaattttgttgatttgcaaaacaataaagacaataattgcatcttttgtgtcgtggatcttcatgcaataacagtgatgcaggatccaacagagttaaaaaataatattagagagacagcagcagcatttattgcaagcggtattgatccaaaaaatagtataatatttaatcaatccttagtcccagctcactcagagggttcttggattttaggatgtgttgctagaatgggatggcttaatagaatgacacaatttaaggagaaagctggaaaagataaggaaaaagctagtgttggtttatatatttatccagttctaatggcatctgatattcttttatatgatgctacccatgtgccagttggcgatgatcaaaaacagcacttagaactttgtagagatatagctcaaaaatttaataacgaatacaaatgtccag

SEQ ID NO: 301048 - DNA, 355 bp, Unknown
  Bacterial polypeptide expressing nucleotide sequence isolated from the Sargasso Sea
catgaacataaagaaaattttttctggggtccagcccactggaaatttgcacctgggaaattatttaggcgcaattagaaattgggtagaattgcaaaaagtacatgattgcattttttgtgttgtagatttgcatgccataacaatttggcaatcgccagaagctcttcgagccaacaccagagaagttgcggccgcgatgatggcatctggtgtcgatgcgaaaaaaaatattatttttaatcaaagtaaggtatctgcccatgcagaattagcctgggtttttaattgtgtgtcaagattggggtggttaaaccgaatgacacagtttaaggagaaagctgggaaaagataa

SEQ ID NO: 301049 - DNA, 736 bp, Unknown
  Bacterial polypeptide expressing nucleotide sequence isolated from the Sargasso Sea
attggatacacctttaaagaaaagagttttatctggtatacagccatctggagagttgtgcatatcgaactatattggagcacttaaaaattggatttctcttcaggatgaatatgaatgtgtatatttaattgttgatttacattcacttacagtcgatcaagtgcctgcagaattaagacaaagatgttattcttatgtagctcaatatttagcatgtggtattgatccagaaaaaagtcttattgttattcaatcccatgttccagagcatacagaattaacttgggtactaaatacaattacatatatgggtgagctcaatagaatgactcagtttaaagataaatccaagaagcaaaaaaacatcaatcttggactttatacttatcctgttttaatggcttctgacattctattatatcaggctgaccttgtgcccgtaggtgcggatcaaaagcagcacctcgagctttcaagggatttagctattcgatttaacggtaaatattcaccaacgtttacaatccccgagccgtttattccgaagcaaggtgctagaataatgtccctacaagatcctgaatcaaagatgtcgaaatctgataagaatcctaataattatatttctctattagatgattcaaatgtaataatgaagaaatttaaaagggcagttactgattctgagacggagataaaatatgatgaaaatcgtaagggattgcacaactaa

SEQ ID NO: 301050 - DNA, 700 bp, Unknown
  Bacterial polypeptide expressing nucleotide sequence isolated from the Sargasso Sea
tatggcaaacaaaaataggattttatctggcgtccaaccatcaggggatttacatttaggaaattatttaggagccataaaaaattttgttgctcttcaaaaagattatgaatgttttttttgtgttgttgacttacacgctatcacggtatggcaagatccaactttattagcacagaaaacacgtgaagtaaccgcagcttttattgcagcaggtattgatccgaaaaaaaatgtattgtttgttcaatcacaagttccgcaacatgcacaactagcgtggatttttaattgcattgcacgaatgggttgggtaaatcgtatgacacaatttaaagataaggcaggaaaagatcgtgaaaatgtttctgttggattattttcctaccccactcttatggcggcagatattttaatttatcttgctacacacgtccctgttggcgatgatcaaaaacaacatttagaattaacaagagatattgcccaaaaatttaatactgattttaaaaccgatcttttccctatacctgagccattaatatttggagaagcaacaagagtaatgagtttacgagatggaacaaaaaaaatgagtaagtctgatccctcggattattctcgcattatgttaagtgataataaagatgctattgttcaaaagattagaaaagctaaaactgaccctcatccctgccag

SEQ ID NO: 301051 - DNA, 887 bp, Unknown
  Bacterial polypeptide expressing nucleotide sequence isolated from the Sargasso Sea
tattgtagactgccatgctcttactacttcagatagtcgcacgcaaatactcaaaaatacaagagaagtcgcagctgcatatattgcctcaggaataaatcctaaaaaaacaataatttttgttcaatcaaatgtcacaggacacagtgagcttgcatggatattgagttgccatacaccaattggttggcttaatagaatgactcaatttaaagataaagcaggaaaaaataaagagagagcgccgctaggtttatattcatatccggtattaatggccgctgatattcttctttataaatcaacgcatgtgcctgttggagatgatcaaaaacaacatttggaattatcaagagatattgcacaagcgtttaatagatattatcaaaatgattttttcccaattcctgaaccaatcattactggaaatgctacaagggtgatgagcctaagagatggcatgaaaaagatgagtaaatcagatccatcagatcagtctagaattaatctatcggacaacgctggagaaatagaaaaaaaaattcagaaagccaaaacagactctcatccgttcccagaacattttcaagatttagatggtcgacccgaaatcaaaaatttaataaatattttttctgcattagataatgaatcggtagataatgtaatatccaactatgtcgacaaagattttaaaatttttaaaaaagatttaagcgatcttcttgttgaaaaaatttctttaatttcttctgaaatgaagaagcttttaaaaaatgtagattatcttgattcgattcttaaggatggaaatcttagagcgaatgaaatggcaaatgaaagcttaacaaaattaaaaaccacaatcggactttttaaatcatgag

SEQ ID NO: 301052 - DNA, 957 bp, Unknown
  Bacterial polypeptide expressing nucleotide sequence isolated from the Sargasso Sea
catttagaaattatttaggagctataaagaactttgtggatctaaataatgataatgataataaatgtattttttgtgttgttgatttacacgccattactgtaaaacaaaatccaaaagagttaaaagataatataagagagacagttgcaacttttgtagcaagtggaatagatccaaaaaaaagtataatttttaatcaatctagagtagtggctcatgcggaaggagcgtggatatttagttgtatagccagaatggggtggcttaatagaatgacacagtttaaggagaaagccggtaaagacaaagagaaagcgagtgttgggctatattcttacccagttttaatggctgctgatattcttctctatgatgctactcatgttccagttggtgatgatcaaaagcaacatcttgagttatgcagagatatagctcaaaaatttaataacgattttgaagtagaaaattttcttcaagtacctgagccattaatacaaaaacaattttcaaggataatgagtttaaaggatggctcaaaaaaaatgagtaaatctgaattatcagatttaagtagaataaacttaacagatgataaagatcaaataataaataaaattaaaaaagcaaaaactgatcccttaccaatgcctgaagatattaaagaacttgataaaagagtggaagcaaaaaatcttttaggaatttattcaagcttaactaattcaacattacagaattcagtagaaagttttgcaggcaaaaatttttcagaatttaaagaaatattagcagaagtacttgtaaataaaattgagcctatttctctagagataaaaaaacttttaggaaataaagaataccttgatgaaattcttctagatggagttgaaaaagcaagttcaattgcctccaaaaagattgaaagaatcaaagaaatagtgggtttttagt

SEQ ID NO: 301053 - DNA, 172 bp, Unknown
  Bacterial polypeptide expressing nucleotide sequence isolated from the Sargasso Sea
atgaaaaaaaaaattttctcaggtgttcaacctactggaaaccttcatttaggaaattatttaggagctataaaaaactttgttgatctcaataacgatacccagaatgaatgtatcttttgtgttgttgatcttcatgcgataactgtaagccaaaatccaaaaaattgaa

SEQ ID NO: 301054 - DNA, 178 bp, Unknown
  Bacterial polypeptide expressing nucleotide sequence isolated from the Sargasso Sea
atgattaaaaaaattttttctggagttcaaccaacaggaaatctgcacttgggaaattatctaggtgcaattaagaactttgttaattttcaaaatcaagaaaaagcagagtgtatttattgtgtagttgatttacatgctataaccgtaaaacaagatccagctgaacttaaaaata

SEQ ID NO: 301055 - DNA, 208 bp, Unknown
  Bacterial polypeptide expressing nucleotide sequence isolated from the Sargasso Sea
atgaataaaaaaattttttcaggtgttcaacccactggcaatctccatttaggaaattatttaggagcgattaaaaattttgtagatcttaataatgatgaagaaaatgagtgtgttttttgtgtggtagatttgcatgcgatcactgttaaacaagatccaagagaattaagaaacaatattagagaaacagttgcaactttgtagc

SEQ ID NO: 301056 - DNA, 340 bp, Unknown
  Bacterial polypeptide expressing nucleotide sequence isolated from the Sargasso Sea
tatgggaaaaaaaattttttcaggtgttcaacccacaggcaatcttcatttaggtaattatttaggagcgatcaagaattttgttgacttaagtaatgaaaatgaaaatgagtgtattttttgtgtagtggatcttcatgctattactgtaaatcaagatcctaaagaatttaaaaataacatttatgaaactgtcgcaactttcattgccagtggaatagacccaaaaaaaaacattatttttaatcagtctcaagtaagtgcacactcagaggctgcatggattttaggctgtactgctagaatgggatggttaaatagaatgacacaattaaagaaa

SEQ ID NO: 301057 - DNA, 463 bp, Unknown
  Bacterial polypeptide expressing nucleotide sequence isolated from the Sargasso Sea
ggcgtggatattgaattgtgtcgcaaggattggttggcttaatcgaatgactcagttcaaggaaaaggctggaaaaaatagagagaatgcgtctgtcggcctctatgtctaccctaatctcatggcgtctgacatactcctctatcacgcgaattttgtgccggtgggggacgatcaaaaacagcatttggaaatcacaagggatattgctcaacggttcaacaatgatttcagttcagaaggagaggaatttttccctcttccagagccgttaattttaccagtcgcttctagggtgatgtcgcttcgggatggccagaagaaaatgtctaaatccgacccttcggatatgagtcgaattgacctgattgatgatgctgatctgatcaggaagaagattggaaaagcaaaaactgacccgcttcctttgcccgatagtagagaggagcttgagactcgacct

SEQ ID NO: 301058 - DNA, 897 bp, Unknown
  Bacterial polypeptide expressing nucleotide sequence isolated from the Sargasso Sea
aagtggcaaaataaattattaaaattttatgatgaaaatcctaaatttattttaccaaagtcaagacgtaatgaagttataaattttgttaaaagtggtcttaaggatttgtctataagcagaaaatctttctcttggggtatcaaagttcccagtaataaggatcatgtaatttatgtttggttagatgcactaactaattatttaagtgcattggattatcccgatttaaatagcacaaagtataaaaatttttggcctacagacgttcatatgattggtaaagatatattaagatttcatgcaatttattggccagcttttttaatggctgctgatattcctccgccaaaaagagtatatggacatggatggatattatctggagaagaaaaaatgtccaaatcaaaaggtaatattttagatccattagaaattgttgataaatatggattggatccattaagatattacttattgaaagaagtttcatttggaaatgatggaagtattacacaagaaaaacttgaagattgtataaatagtgatttagcaaataattatgggaatttatgtcaaagagtaatttcttttaatgaaaaaaactgtggtcttgtaatacctgaaaaaaataaattcgaaaaagatgatttgttaattcttgataaaataagtcatagtgcagaatctttaagatctaacatagataatcaagaactaagtacatatacaaattttattgttgattgcttatttgacgcaaataaatattttaatgaccaggagccttggaaaaaaaaatctgacattaaaagattaaatactattgtatatgtttctttagaaattattagaaaagtatcaattttactaaatccaaattatcctcaaaaactt

SEQ ID NO: 301059 - DNA, 901 bp, Unknown
  Bacterial polypeptide expressing nucleotide sequence isolated from the Sargasso Sea
gccaacagaaaatttacatcttggtaattatataggtgcaataaaaaattttgttgatttgcaaaataataaagataacaactgtattttttgtgtcgttgatcttcatgccattactgtcatgcaagatccaatagacttgaaaaataatattagagagacagcagcggcttttatcgctagcggtattgatcccaaaaatagtataatatttaatcaatctttagttcctgcacattccgagggttcttggattttaggatgtattgccagaatgggttggctcaatagaatgacacaattcaaagagaaagctggaaaagacaaggaaaaagctagtgttggtttatatatttatccagttctaatggcttctgatattcttttatatgatgctactcatgtgccagtcggagatgatcaaaaacagcatctagaactttgtagagatatagctcaaaaatttaataacgaatataaatgtcctgatctactaaaacctcctgagcctctaatacaaaaacatttctcaagaataatgagcttgaaagatggcacaaaaaaaatgagtaagtcagatatttctgaaggaagtaggatcaatttaactgatacagaggatcaaattattaataaaataaaaaaagcaaaaacagataatgatactttaccaggaaatcaagatggacttaaaggtagacctgaagcagaaaatttgatgggtatttactctagtttaagtaatcaaaatattacagatacattaagtgagtttgaaggaaaaaatttttctgatttaaaaaataaactatctgaaataattgtaactaaaatgtcgcctatatcaaaagaaatacaaaaactgttatctgataaaaattatatagatcaaattttagag

SEQ ID NO: 301060 - DNA, 235 bp, Unknown
  Bacterial polypeptide expressing nucleotide sequence isolated from the Sargasso Sea
atgggcaaaaaaattttttctggtgtacagccaactggtaatcttcatttaggaaattatttaggggctataaaaaattttgttgatttaaataatgataaggataacaagtgtattttttgtgtagttgatctacacgccattacagtaaagcaagatcctaaagaattaaaaaataatatcagagaaacggttgctacttttgtagcaagtggaaatagatccaaaaaaaagt

SEQ ID NO: 301061 - DNA, 679 bp, Unknown
  Bacterial polypeptide expressing nucleotide sequence isolated from the Sargasso Sea
acattttaaagaaaaggcaggtaaggataaagaaaaagccagcgtaggtctctatatttaccccatacttatggcagctgatatactattatatgatgccacccatgttcccgttggccaagatcagagacaacatcttgaactttctagagatatagcaaataaatttaatttagattttaactcaccaaattttttagttgctccagaaccattaatccaaaaaaattttgcaagaattatgagtttaaaagatggctcaaaaaaaatgagcaagtcagatccctctgaattaagtagaattaatttaaatgataccagtgatcaaataataacaaaaattaaaaaagcaaaaactgataacgacccactcccagataatgaaaatgaattatcgaaaagactagaagcacaaaatttacttggtatttattcaagtttgagtgatcaaaccttaaaaaataccattagtgaattttctggaaaaaatttttctgcttttaaagaaaaactagccaacctagttgtagataaaatttctcctatatcatccgaaattaacaaattgctcaaagatgaaaattttatagataaaattttaaatgatggtgcagaaaaagcgaatgaaattgcatctaaaaaaattaaagatttaaaaaaaatcattggttttaaataa

SEQ ID NO: 301062 - DNA, 538 bp, Unknown
  Bacterial polypeptide expressing nucleotide sequence isolated from the Sargasso Sea
tatgagtaattttactaaaagagttttatcaggtgtacagccaacaggagggcttcacttaggtaattaccttggtgctattaaaaatttcgtaccccttcaagataaatatgaatcattattttgtgttgtggaccttcacgctattacgacttggcaagaccctaaagaactaatatctaagaagtgtgaagttgctgctgccttcattgcatctggcatagaccctcaaaaaagcataatttttaatcaatcagctgtgcctgagcacacacaattatcttgggtgttaaattgtgttgcaagaatgggttggttaaacagaatgacgcagtttaaggacaaggcaggaaaaaataaagaaaacgtaagcgttggtttgtttacatatcctgttctaatggcgtcagatattatgatttataaagcaactcacgttccagtaggagaagatcaaaagcaacatttagaacttactagagatatagtattaaagtttaataatgattttcaaaagggaaagtctttcctttgcctg

SEQ ID NO: 301063 - DNA, 885 bp, Unknown
  Bacterial polypeptide expressing nucleotide sequence isolated from the Sargasso Sea
tttgtgtggtagatcttcacgcaataacagtgagccaagatcctaaagagttaagagataatataagagagacagtagcaacattcatagcttgtggcattgatcctgaaaaaaacattatttttagtcaatcaaaagtaagtgctcattcagaggcagcgtggattttaagttgtatagctagaatgggatggctgaacaggatgacacaatttaaagaaaaagctggaaaagataaagaaaaggcaagtatcggtctttattcttatcccgtgttaatggcagcagatatattactttatgatacttcacatgttccggttggagacgatcaaaagcaacacttagagctatcaagggatattgcacagaaatttaataatgatttcaatgtaaatgatttttttaaagtccctgaaccattaatccaaaaagaattttcaagaataatgagtctaaaagatggtttaaaaaaaatgagtaaatctgagatatcagatcagagtcgaataaatctaacagatgataaagatcaaattataaacaaaattaaaaaagctaaaaccgatgccttagcaatgccatctagtgatgaagaattactgaaaagaccagaggtaaaaaatttaataggtatttattcaagtttaaaaggtttaaattttgaaaaggtcattaaagaattttctggaaaaaatttttctgattttaaagaatctttatctcaagtcttggttgataagataattccaatatcggatgagattaaaaaattattaaaagataggaattatttagataaaattcttttagatggatctaaaaaagcagataaaatagcatcccaaaagatgaaaaaaattcatgaaattattggtttttgaa

SEQ ID NO: 301064 - DNA, 798 bp, Unknown
  Bacterial polypeptide expressing nucleotide sequence isolated from the Sargasso Sea
tttgcatgccataacaaataggcaagatccagaggagttaaagtcgaatatttttgaaactgtcgcaagttttatagcatctggtctagatcctgaaaaaaatattatatttaatcaagctagtatttctgcacatgccgaactggcttggatatttaactgtgtagcaagaattgggtggatgaatcgaatgactcaatttaaagaaaaagctggagcaaataaagaaaatgcaagtgtaggcctgcttgtttatccaaatttaatggctgcagacatcttaatatacaaggctacacatgtgcctgttggagaagatcaaaaacagcatttagaattaacaagagatattgcaaaaaaatttaacaacgattttaaaagcgataattatttcccaatagtagagccattgataccaaaagagatttctagggttatgagtttaagagatggaactaaaaagatgagtaaatctgaagactcggatcaaagtcgaataaacttaaaagatagtagggatttaatagatcaaaaaattaagaaggctaaaactgataatgatcccataccttccgaagtaaatggaatgaaaaataggtacgaagcagcaaatcttatatcaatttatgccagtataaatgggattaaagtagaaaaagttctaaaggaatttggcggaaaaaatttttcaacttttaagagtaaactaagcgaatcaataattgaaaaaatctgtccgattggagatgaaattaaaaagttattaaaagacaaaagttatctggataagattttaca

SEQ ID NO: 301065 - DNA, 850 bp, Unknown
  Bacterial polypeptide expressing nucleotide sequence isolated from the Sargasso Sea
aatgtctaaaaaaattttttcaggcgttcagccttctggaaacttacatttgggtaactacttaggtgccattaagagttttgtggaacttcaaaatgaaaaagatagtgagtgtgtttattgtatcgtagatttacatgcaattacagttaagcaaaacccaaatgaattaaaaaaaaatattaaagaaactttagctacttttatagcaagtgggttagatccaaaaaaaagcataatttttagccaatcttcagtttcagcacactcggaaggagcttggatattaagttgtgtggcaagaatgggctggttaaatcgaatgacacaatttaaagaaaaggctggaaaagataaagaaaaagcaagtattggattatatgcttatccagttttaatggcagcagatatattactttacgatgctacccatgttccggttggcaatgatcaaaaacagcatttagaattatgtagagatattgctcaacggtttaataatgattttaattctccagattttttaaaagttccagaacctttaatacaaaaacatttttcaagaataatgagtcttaaagatggcacaaaaaaaatgagcaaatctgatccttctgatttaagcagaataaatcttacagatgaaaaagatgaaatagttaataaaattaaaaaggcaaaaactgataccatgtctatgcctgggtctggtgaaaatttatcaaaaagacctgaaattgaaaatttattaggtatttattcaagcttatctaatcaaagtttagataacacaaaaaaaaaatttagtggaaaaaatttctcagaatttaaagaaaatctttcggaactc

SEQ ID NO: 301066 - DNA, 721 bp, Unknown
  Bacterial polypeptide expressing nucleotide sequence isolated from the Sargasso Sea
atgtccaaaaaaatattttctggtgttcaaccgtctggcaatttacaccttggtaattatttaggagcaattaaaaactttgtaaatttacaaaatgaaaagaataatcaatgtgtttattgtgtagttgatttacatgcaattacagttaagcaaaatccacaagaactaaaagacagtataagagatacaacagctgcattccttgcaagtggattagattataaaagaagtattatttttaatcagtcatccgtgccagctcatagtgaagggtcttggattttaagttgcatagctagaatgggttggttaaatcgaatgacacaatttaaagaaaaagcaggtaaggacaaagaaaaagcaagtgttggattatatatttatccaatattaatggcatctgatattttattatacgactcaacacatgttccagttggcgaagatcagaagcaacatttagaacttactagagatattgctcaaaaatttaatattgaatttaattgtccaaatttttttactgcaccagagcctttaattcaaaaaacatttgctagaattatgagtctaaaagatggaaaaaaaaaaatgagtaaatcagatccatcagatttgagtagagtaaatttaaatgactcaaaagatgtaattataaataaaatcaaaaaagcaaaaacagatgataaaagtatgccacaagacaataaaaattgaa

SEQ ID NO: 301067 - DNA, 509 bp, Unknown
  Bacterial polypeptide expressing nucleotide sequence isolated from the Sargasso Sea
tatgagtaaaaaaattttttcaggggttcaaccaacaggaaatcttcatttgggaaattatattggcgccattaagaattttgtgaatttacagaacaatccagacaatttttgtatttattgtgtagtagacttgcatgcaattacagttaaacaaaatccaattgaattgaggaaaaatattagagaaacaacagctgctttcattgccagtggtttagattataaaaaaagtattatatttaaccaatctttggtttcggctcactcagaggcatcatggattttaagttgtgttgctagaatggggtggttaaacagaatgacacaatttaaagaaaaagcaggaaaagataaagaaaaagccagtgtaggtctttacatttatccagttctaatggctgctgatatacttctttatgatgcaactcatgttcctgttggagaagatcaaaagcaacatttagagctttcaagagatatagctaataaatttaatttagactttg

SEQ ID NO: 301068 - DNA, 688 bp, Unknown
  Bacterial polypeptide expressing nucleotide sequence isolated from the Sargasso Sea
atgaaaaaaaacttcaaagaagtagttttctcaggagtccagccaactggaaatttgcatctaggtaattacttaggcgcaatgaaaaattttgtagagcttcaaaaaaaaatggaatgtatttattgcgtagttgatcttcatgcaataacagtttttcaagaacctcaagaattaaataaaaatattcttgaaacaacagctggatttctggcttgtggattggattttaaaaagagcataatattcaatcaatcatcagttagtggtcacgcagaactggcttggattttcaattgtgtatctagagttggatggatgaatcgaatgactcaattcaaggagaaagctggctccaataaagaaaatgcaagtgtcgggttatatgtatatccaaatttaatggccgcagatattttgttatacaaagccacccatgtaccagtgggtgatgatcaaaaacaacatctggaattagccagagatattgcacaaaaatttaataatgattttagaaatgagaatttttttcctataccggaacctctaatacaaaaaaaaatttcaagagttatgagtttaagagatggcaaaaaaaagatgagcaaatcagaagaatcagactattctaggattaacttaggcgatagtgaggatgagataaaaaagaaaattaaaaagcaaaaac

SEQ ID NO: 301069 - DNA, 231 bp, Unknown
  Bacterial polypeptide expressing nucleotide sequence isolated from the Sargasso Sea
tatgggtaaaaaaattttttcaggagttcaaccaacgggaaatcttcatttaggaaattatttaggagctataaaaaattttgtagaactaaataacgataatgaaaataaatgtgttttttgtgttgttgatcttcatgctattactattaaacaagaaccaagggaattaaaaaataatattagagagaccgtagcaacttttattgcgagtggaatagaccataaaaa

SEQ ID NO: 301070 - DNA, 712 bp, Unknown
  Bacterial polypeptide expressing nucleotide sequence isolated from the Sargasso Sea
catggggaggccgagggttctctccggtgtgcagccgaccggtgcgttgcacctcggcaactggcttggagcgattcgcaactgggttgatctccagaacacccacgacacctttgtctgcgtggtggatctccatgccatcaccgttccccacgacccggcccggctggcggaggacacccttaataccgctgcgctctatctggcctgcgggatggacccgcagcggtgctcaattttcatccagagtcaagtcgccgcccacagtgagctgtgctggctgctgaactgcgtgacaccgctcaactggttggagcggatgatccagttcaaggaaaaggccgtgaaacagggggacaacgtctccgtcggccttctggattacccggtgctgatggcggcagacatccttctttatgacgcggacctcgttccagtcggggaagaccaaaagcaacacctggagctggcgcgtgacatcgcccagcagcggatcaacgcccgctttggacgcgaggaacaaccggtgttgaaggtgcccaaaccgctcatcctcaaggaaggcgcacgggttatgagcctcacggatggacgcagcaagatgagcaaaagcgacccgaacgaggccagccgcatcaccctgctggacccgccggaactcatcaccaaaaagatcaaacgggcgaagaccgatccggagcgaggtctcgaa

SEQ ID NO: 301071 - DNA, 644 bp, Unknown
  Bacterial polypeptide expressing nucleotide sequence isolated from the Sargasso Sea
aatggctaaaaaaattttttctggagttcaaccaactggaaatcttcatcttggtaattatattggagcaattaaaaattttgtagagcttcaaaatgaaaaggataataaatgtgtattctgtgttgttgatctacatgcaatcactgtaaaacaagatccaaaaattcttaaagacaatattagagaaacgacagcagcttttttggcaagcgggattgatccaaaaaaaagtataatatttaatcaatcgctagtcgccgcacatgctgaaggttcttggatgttaggatgtgttgcaagaatgggatggttaaatagaatgactcaatttaaagaaaaagcaggcaaggataaagaaaaagcgagtgtaggtttatatatttacccaatattgatggcagctgatattttattatatgacgcaactcacgtaccagtgggagaagatcaaaaacaacacttagagctatccagagatattgctcaaaaatttaatttagattttaattccccaaactttttaagagctccagaaccattaataaagaaaagtttttcacgaataatgagtttaaaagatggtaaaaaaaaaatgagtaaatcagatccttcagatctcagcagaattaatttgactgata

SEQ ID NO: 301072 - DNA, 931 bp, Unknown
  Bacterial polypeptide expressing nucleotide sequence isolated from the Sargasso Sea
attgggtgctataaaaaatttcgtagacttacaaaaccaaaaagataatgagtgtatttattgtgtagtagacttacatgcaattacacttaaacaagatcctaaaattcttaaaaataatattagagaaacaacagctacatttcttgctagtggaattgatccaaataaaagcataatttttaatcaatcaatggtgccagctcatacagaaggttcttggattttaggttgtgtagcaagaatgggttggttaaatagaatgactcaatttaaagagaaggcaggtaaagataaagaaaaagccagtgttggattgtatatctatccagtgttaatgacagcagatattttattatatgatgcaactcatgtacctgtaggtgaagatcaaaaacaacacttagaattggctagagatattgcacaaaaatttaatttagaatttaatgcacaaaactttcttcaagctcctgaaccattaatccaaaaaaatttttcaagaataatgagtctaaaagacggatcaaaaaaaatgagcaagtctgatccatctgatttaagcagaataaacctaacagatgataaagatgaaattataaataaaattaaaaaagcaaaaacagatgcaatgtcaatgccgagtgaatcaaaagaattaaaaaataggccagaagtagaaaatctacttggaatttattcaagcttaaaaaatcagaacattgataaatcaataagcgaattaagtggaaaaaatttttcacattttaaagatcttctttctgaaattgtagtagaaaaaatttcaccaatttcaaaagaaataaacaaactattgaaaaataaagactatattgacaaaattttagaagaaggatctaaaaaagctgacaagtatgcatcaaaaaaagttaatgatatgaaaaaataa

SEQ ID NO: 301073 - DNA, 775 bp, Unknown
  Bacterial polypeptide expressing nucleotide sequence isolated from the Sargasso Sea
aatgagtaaaaaaattttttctggcgttcaaccaaccggaaaccttcatcttggaaactacattggggcaattaaaaattttgttgatttgcaaaatcaggatgaaaatgaatgtgtttattgtgttgttgatttacatgctataactgtaaaacaagattctaaaactcttaaaaaaaatattagagaaaccactgctgcctttttagctagcggattaaatcataaaaaaagtattatatttaatcaatcattagtgcccgcacatgcagaaggatcttggatgttgggttgtattgcgagaatgggctggttaaatagaatgacacaatttaaagaaaaggcaggaaaagataaagaaaaggctagcgttggtttatatatttatccagttctaatggcagctgacattttgctttacgattccactcacgtaccagtaggtgaggatcaaaaacaacatctggaactttctagagatattgctcaaaaatttaatcttgactttgactccccaaattttttgaaagctcctgagccgttaatacaaaaaaattttgcaagaattatgagtttaaaagatggaagaaaaaaaatgagtaaatcagatccgtcagatctaagcagaataaacttgaatgataaaaaagatcaaatagtaaataaaataaaaaaagcaaaaacagatcagtatcctttaccagataatgataaagaattaaaaaatagacctgaagcagaaaatcttttgggaatttattcaagtttaaataat

SEQ ID NO: 301074 - DNA, 278 bp, Unknown
  Bacterial polypeptide expressing nucleotide sequence isolated from the Sargasso Sea
catgagtaaaaaaattttttctggagttcagcctactggaaatcttcatcttggaaactatcttggcgccataaaaaattttgtaaattttcaaaatcaaaaaaatacagattgcatttattgcgtggtagacctgcacgcgatcacagtaaaacaagacccaggtaaattaaaagctaacattagagaaactacagcagcatttattgcaagcggtcttgatcacaaaaaaagtataatttttcaacaatcaatggtcgctgcacattctgagtttt

SEQ ID NO: 301075 - DNA, 396 bp, Unknown
  Bacterial polypeptide expressing nucleotide sequence isolated from the Sargasso Sea
tatggctaaaaaaattttttcaggagtccaaccaacaggaaatctacatttaggaaattatttaggagcaataaaaaattttgtagaactgcagaatgaaaaagataataattgtatatattgtgttgttgatttgcacgcaattactttaaaacaggatccaaaagaacttaaaaataatatcagagaaactgccgcaacattcattgcaagtggacttaatccaagcaaaagtattttattcaatcaatctttagttcctgcacactcagaaggtgcttggatattgagttgcattggcagaatgggttggcttaacaggatgacacagtttaaggataaagcaggcaaagataaagagaaagcaaatgtaggtctttacatctatcctattct

SEQ ID NO: 301076 - DNA, 669 bp, Unknown
  Bacterial polypeptide expressing nucleotide sequence isolated from the Sargasso Sea
aagaaaaagcaggcaaggataaggaaaaggcaagtgttggtctttactcttatccagttttaatggcagctgatattttgttgtatgatgcaacgcatgttccagtaggagacgatcaaaaacaacatttagaactttgtagagatatagcacaaaaattcaacaatgattttaaagtagaaaattttttagtagcaccagagcctttaattcaaaaagaattttcacgaataatgagtcttaaagatggtttaaaaaaaatgagtaaatcagaaacatctgattttagtcggataaatttaagtgatacccaagatcaaattgtaaacaaaattaaaaaagctaaaactgatccatttcctatgccaatgaatattaaagatttggataagagacctgaagctaaaaatttactaggtatttattcaagtttaaaaaatatagatttggaaaagtctgtaaaagaattttctggaaaaaacttttcagaatttaaagaaaatttaactcaagttgtagttgatataatatctccactttcacttgaaataaaaaaattattaaatgaaaaagcttatctagatcaaattttaatagaaggtgctcaaaaggcgaatggtattgcgtcaaataagattaaagaaattcataaaataatgggtttttgat

SEQ ID NO: 301077 - DNA, 920 bp, Unknown
  Bacterial polypeptide expressing nucleotide sequence isolated from the Sargasso Sea
actgggtgtacctcatttaggtaatttggttggtgcaatattgccggcaataaaagctagtgagcaaaaaaatacaacctcctttttatttttagctgattatcattctttaattaagaattctgattccaggttaagatatcaatctagcttcgatattgcggcatgctggcttgcatgcggccttgatccaaaaaaagttatcttttatagacaatcagatatacctcatatatttgaactagcttggattttaagctgtatagcttcaaaagggttgctaaatagagcgcatgcttataaggcagcaatttctgacaatcaagcaaataagattgaagatattgataaaggcataaatatgggtctttttaactatcctattcttatggcggcagatattttgatgtttaaagcagatttagtaccagtaggtcaggaccaaaaacaacacatagaaatgacccgagatatagctttaagattcaaccatcactatggagaaatactcacgccacctgaagcaataattgataaaaatacaggagtacttcctggaattgacggaagaaagatgagtaaatcttatgagaataccattcccatatttagtgaagaagaagcattaagaaaagtggtcatgaaaattaagactaattcacttgaacctggagagcctaaagatgtatctgattcaaatatttttgatatttacaaggcaattagcacgcaagataagatagacgaaatgcagaagctttatcaagaaggaatagcatggggagaagcaaaaaaagttttatttgaagaacttgattcatttttaaaaccttttaacaacgaatacagaaagattatcaaagatcgatcttttgttgaacaaacattagtcgacggctcagaaaaggctttatcagttt

SEQ ID NO: 301078 - DNA, 664 bp, Unknown
  Bacterial polypeptide expressing nucleotide sequence isolated from the Sargasso Sea
gatggcaaataaaaaaagaattctttcgggagttcaaccaactggtgatttacatattgggaattggcttggggccataaataattgggttacgcttcaagagcaatatgaaacatttctatgtgtagttgatttgcacgcaataacagcctcatataatcccaaagaattatctaaaaacactatctctacagcagctttgtacgtagcttgtggcatagatccaaatatctgttcaatttttgtccaaagtcagatttcagcacattcagaactttgttggatattaaattgcatgaccccaataaattggatggaaagaatgattcaattcaaagaaaaatctatacaacaaggtaataatgtatctattggattatttgactatccaatacttatggctgcagacatccttctttatgatgctgactttgtaccagtaggtgaggatcaaaaacaacatcttgaacttgcgagagatattgcacaacagagaattaatgccagatttagtaaggataaaaatattttaaagatccctcaaccaatcatcatgaagaatggttcaaaaataatgagtttaattgatggttcaaaaaagatgagcaaaagtgatcctaatgagggcagtcgcattaacttattagatcctcctgaaataatc

SEQ ID NO: 301079 - DNA, 922 bp, Unknown
  Bacterial polypeptide expressing nucleotide sequence isolated from the Sargasso Sea
ataaaaaattttgtatcacttcaaaaagaatatgaatgttttttttgcgtagttgatttacacgctataacagtatggcaagatccaaaagttttagcagataaaacaagagaagttactgcagcatttattgcttcaggaattgatcctaaaaaaaataatatttttgttcaatcacaagttcctcaacatgcacaacttgcttggctatttaactgtgtagcaagaatgggttggttaaatcgtatgacacaatttaaggacaaggctgggaagaatagtgaaaatgtttctgtgggtttattttcctatccaactttaatggcagcagatattttgatttatttagcaactcatgttccagttggggatgatcaaaaacaacatttagagttaacaagagatattgctcaaaaatttaataatgattttaaaactgatttgtttccaattccagaacctcttatttttggagaagcaactagagtcatgagtctaagggatggatcgaaaaaaatgagtaaatctgatccatcagattattcacgaataatgctcactgatacagctgataatattaaacaaaaaataaaaaaagcaaaaacggatcctcagcctataccagaaactgttactcaatttgaatcaagaccagaggcacaaaacttaatatctatatttgcctctcttgaaggaattaatattcaaaatgtagttaataaatatggtggaagagagttttcaatatttaaaaaagatttagctgatttagcagttgcaaaattagaacctatcaccagtgaaatgaataaattgatggctgatcctgcatatattgataaaatattaaatgaaggaaaaagcagtgctatttcagtagctgaaccagttttagagaaaacaaagaaaattattggttttt

SEQ ID NO: 301080 - DNA, 337 bp, Unknown
  Bacterial polypeptide expressing nucleotide sequence isolated from the Sargasso Sea
atgagcaaaaaaatattttcaggagttcagcctacaggtaatttacacttaggtaattacctgggtgcaattaaaaattttgttgagcttagtaaagacaataaaaatcaatgtattttttgtgtagttgatcttcattcaattacgacgaaacaagacccaaaaaaattaagagacaatattaatgagacggttgcaagttttattgcaagtggcatcgatccaaaaaaaaatataatctttaatcagtcaagggtttctgcacattcagaggcagcatggattttaagttgtgtggctagaatgggttggttaaataggatgactcaatttaaag

SEQ ID NO: 301081 - DNA, 526 bp, Unknown
  Bacterial polypeptide expressing nucleotide sequence isolated from the Sargasso Sea
atgaaacgtgttttttctggtgttcaacctacaggcaatcttcatttaggaaattatttgggggcaataaggaattttgtatctttgcagaagacgcatgagtgtatttattgtgttgtagatatgcatgcaattactgtaaagcaagatccagaggttttgaaaaataatattttagaagtggccgcggcatttattgcttcaggaattgatccaacaaaatctataatttttgctcaatctcaagtatcagctcatgcggaattgtcatggatatttaattgcacagcaagattaggatggttaaataggatgacacaatttaaagaaaaggcgggcaagaatagagaaaatgcatctgcaggattatatgtttatcctgtattgatggcggcagatattttagcttatcatgctacccatgttccagtaggagaagatcaaaaacaacatcttgagttagcaagagatatagcacaaaaatttaacaatgattttgatatagatttttttcctaattactgaa

SEQ ID NO: 301082 - DNA, 423 bp, Unknown
  Bacterial polypeptide expressing nucleotide sequence isolated from the Sargasso Sea
aatggataaaaaaaaattagtattttctggagtccaaccaactggaaatttacatttaggtaattatcttggagcattaaaaaattttgtatcacttcaaaaagaaatgaagtgtatttactgtgtagtagatttacacgccataactatatatcaaaaaccaaaagaattagagaacaatgtttttgaaacattagctgcctttctagcaactggtctcgatccggagaaaagcattatattcaatcagtcttccgtttcaggacatgcggaactcgcgtggatcttaaactgtgtttctcgtgtcggatggttaaatagaatgactcaatttaaagacaaagctggatcggacaaagaaaaagccagtgtaggactgtatatttatccaaatctaatggctgcagacatcttactttacaa

SEQ ID NO: 301083 - DNA, 339 bp, Unknown
  Bacterial polypeptide expressing nucleotide sequence isolated from the Sargasso Sea
aatgagtaaaaaaaaattagtattttctggagtacaaccaactggtaatttacatttgggtaattatcttggagctctaaaaaactttgtttcacttcaaaaagaaatgaattgtatttattgtgttgtagatttacatgcaattaccacctttcaaaggccttccgaattacaaagcaatgtcttggaaactgtcgctagtttcatatctacaggtttagatccaaataaaagtataatatttaatcaatcatcggttccaggacacacccaattagcatggattttaaattgtgtttcaagaattggttggttaaataggatgacacagtttaagga

SEQ ID NO: 301084 - DNA, 319 bp, Unknown
  Bacterial polypeptide expressing nucleotide sequence isolated from the Sargasso Sea
aatgaataaaaaaaccgtcttatcaggcgttcagcctactggagatttacacttaggaaactaccttggtgccataaaaaactttgcaaaaatgcaaaatgaaaacgattgtctattctgtgtagtagatcttcatgcaattactatttttcaagatcctcttgaacttagaaacaacacatacgaaataacagccgcatatttagcgtgtggtattgatccaaaaaaaagtattatatttaaccaaagccaagtcccaggacatgctgagttagcttggattttaaattgtatatgtagagtgggatggcttaataga

SEQ ID NO: 301085 - DNA, 733 bp, Unknown
  Bacterial polypeptide expressing nucleotide sequence isolated from the Sargasso Sea
gaaggagcgtggatattaagctgtattgctagaatgggttggttaaatagaatgacccaatttaaggagaaagctggtcaagacaaagaaaaagctagtattggattatattcttatccagttttaatggcagctgatattcttttatatgatgccactcatgttccagttggtgatgatcagaagcaacatttggaattatgtagagatatagctcaaaaatttaataatgactttgaagtagaaaattttcttcaagttccagaacctttaattcaaaaagagttttctagaataatgagtttaaaagatggttcaaaaaaaatgagtaaatcagatttatcagatttgagtagaataaatttaacagataataaagatcagatagtaaataaaatcaaaaaagcaaaaacggatcctttacctatgccgaatgatatcaaagaacttgatgaaagattagaagctaagaatcttctaggtatttattcaagcttaactgattcgacattggaaaattcagtagaaaattttggaggaaaaaatttttcagaatttaaagaaaaattatcagacgagcttgtaaacaaaattgaacctatttctaatgaaataaaaaaacttttaggagataaaagttatttagatgaaattcttctagatggagttgaaaaggctaacttgattgcatccaaaaagattgaaagaattaaagaaatagtgggtttttaaa

SEQ ID NO: 301086 - DNA, 178 bp, Unknown
  Bacterial polypeptide expressing nucleotide sequence isolated from the Sargasso Sea
tatgcaaaaaaaaattttttctggcgttcaaccaactggaaatcttcacttgggaaattatttaggagctataaaaaattttgtaaatttaagtaaagaggaaaataataagtgcattttctgtgtagttgatttacatgctataacaataagtcagaatcctaaggaacttagaaat

SEQ ID NO: 301087 - DNA, 772 bp, Unknown
  Bacterial polypeptide expressing nucleotide sequence isolated from the Sargasso Sea
aactatctgggcgcgctgaaacgctttgccgccctgcagggacagggcgccgagacggtctattgcatcgtcgacctgcacgcgatcaccgtctggcaggatccgcaaatgctgcgcgcccgcatccgcgaggccgccgccgctttcatggcatcgggcgtcgatcccgcgcaatcgatcctgttcaatcagagccaggtcagcgcccatgccgaaatggcatggcttttcaacacagtggctcgcgtcggctggatgtatcggatgacccagttcaaggacaaggcaggcaagaacagcgaaaacgccagcctcggactgctggcctatccggctttgatggcggccgatatcctgacctatcaggcaaccgccgtgccggtcggcgaggatcagaagcagcatctggaactgacccgcgacatcgccgccaagttcaaccatgattacggcgtcggtcattttccgatcaccgaaccgctgatcgagggggtggcgacccgtgtcatgtcgctgcgtgacgggtccagaaagatgtcgaaatccgacccctcggatgccagccggatcaacctgaccgacgatgccgacaccatcgcccagaagatccgcaaggcccgcaccgatgccgacccgctgccgggcgccatcgacgggctgaaggaccgccccgaggcgcgcaatctggtcaacatctatgctgcgctggccgatgagacccccgatcaggttctggcccgcttcgagggccagggcttggcgcatcaagccg

SEQ ID NO: 301088 - DNA, 192 bp, Unknown
  Bacterial polypeptide expressing nucleotide sequence isolated from the Sargasso Sea
tatgaaaaaaaaaattttttctggagttcaacctacaggtaaccttcatttaggaaattacttaggtgcaataaaaaattttgttgaactaaataataataaagagaataaatgtattttttgtgtagtagatctacacgcaattacagtaaagcaagatccaaataaattgagaaacaacattagagaaac

SEQ ID NO: 301089 - DNA, 742 bp, Unknown
  Bacterial polypeptide expressing nucleotide sequence isolated from the Sargasso Sea
atggaaaagccaacaaaaagaatactgtccggtgtccaaccatctggtgatcttcatttaggaaattatcttggtgccataaaaaattttgttactcttcaaaaagaatatgaatcttttttttgtgttgttgatttacatgcaatcacagtatggcaagaccctaaagtattagcagataaaactagagaagtaacagctgcatttattgcttcaggcattgatccaaagaaaaataatatttttgttcaatcacaagttcctcaacatgcacaacttggatggttgttcaattgtgttgcgagaatgggatggttaaaccggatgacgcaatttaaagataaggcaggaaagaatagtgaaaatgtttcagttggtttattttcttatccaacgttaatggctgcagatatattaatttatttagcaacgcacgttcctgttggtgatgatcaaaaacaacatttagaattaacaagagatatagcacaaaaatttaataatgattttaagacagatttttttcctattcctgaaccattaattttaggagaagctacaagagttatgagtctccgcgatgggtcaaaaaaaatgagtaaatcagatccttctgattattcgagaatcatgcttactgatacagcggaaaatattattcaaaaaattaaaaaagctaaaacagatcctgaaccattaccacaagataaaactggtttagaaaaaagaccagaagcagaaa

SEQ ID NO: 301090 - DNA, 810 bp, Unknown
  Bacterial polypeptide expressing nucleotide sequence isolated from the Sargasso Sea
cagcagcttttttggcaagcggtattgatccaaaaaaaagtataatatttaatcaatcactagttgccgcacatgccgaaggttcatggatgttggggtgtattgcaagaatgggatggctaaatagaatgactcaatttaaagaaaaagcaggtaaggataaggaaaaagcaagtgtaggtttgtatatttatcctgtattaatggcagctgatattttgttgtatgatgcaacccacgtgccagtaggagaagatcaaaaacaacacttagagttatcgagagatatagctcaaaaatttaatttagattttaatgctccaaattttttaagagctccagaaccattaataaagaaaaatttttcgcgaataatgagtttaaaagatggaacaaaaaaaatgagcaagtcagacccttcagaccttagtagaattaatttgactgacaataaggaagaaatagttaataaaataagaaaagctaaaacggatacaaagcctctacctgataatgaaaaggatttaaacaaaaggccggaggtagaaaatcttttaggaatatattcaagtttaaatgatcaaagcttagttgattcaataaatgaatttgctggaaaaaatttttctgaatttaaagaaaagctggccgaaattgtaatggaaaagattttccctatatcaaaagaaattaataaattacaaaaagataataattttattgacgatgtacttaaggaaggagcaaaaaaagctgatgcaattgcttcaaaaaaagtaaaagaaatgaagagtatcttaggtttttagt

SEQ ID NO: 301091 - DNA, 254 bp, Unknown
  Bacterial polypeptide expressing nucleotide sequence isolated from the Sargasso Sea
aatggttaaaaaaattttttctggcgttcaaccaactggaaatttgcatttaggaaattacttgggagcaataaaaaattttgttgaactacaaaatcaagataaaaatgaatgcgtctattgtgttgttgatttgcacgcaataacaacaaaacaagatccaaaaattttgaaaaacaatataagagagacaacagcagcatttttagccagtggattaaatcataataaaagtattatatttcagcaatctt

SEQ ID NO: 301092 - DNA, 637 bp, Unknown
  Bacterial polypeptide expressing nucleotide sequence isolated from the Sargasso Sea
ggtttatttacttaccctgtgctgatggcggccgatattctggtttataacgcgcatcaaatcccggtcggccatgatcagaagcagcatctggagttggcccgtgatattgctaaccgttttaatgccttgcatggtgagatttttaccgtgccagaaccttatattcctggtgtagcggcgcgggtcatgagtttgcaggagccgacgaaaaaaatgtccaagtcggatgaaaatccatggaattttgtcggtttgctcgaagatccaaagatgatcagcaagaaattcaaaaaggccatgacagactcagaggatccacctcgtgtggcttatgatctggagaacaaagcgggtgtcgccaacctgttaagtattttaagtggggtgacaggcaagtcgattgacagtctggtcgctgagtacgaaggcaagatgtacggtcatttaaaaggcgatgtggcggatgctgtcattgcactattggaacctgtacaggcgaagttccatgaaattcgtcaggatcaaagcttgatgaatcaagtgctaaaacaaggtgccgcagaggccagggctcgcgctgctgtgacgcttgagaaagtctatgatgctgtgggttttgtgttacctggctaaa

SEQ ID NO: 301093 - DNA, 505 bp, Unknown
  Bacterial polypeptide expressing nucleotide sequence isolated from the Sargasso Sea
tatgttaaaaaaaatattttcaggagtgcaaccatctgggaatcttcatttaggtaattttttgggagctataaaaaattttgtaagtcttcaaaatcaagaaaacacagattgtgtatattgtattgttgatcttcatgctattacgactaagcaagatccaaaagccctcaaagaaaatataagagaaactttagcaacttttattgcaagcggaatagatccaaaaaaaagcattatattcaatcagtctgcagtttctgcgcactcggagggtgcttggattttaagctgtatagctaggatgggatggcttaatagaatgacacagttcaaagaaaaagcaggtaaagataaagaaaaagcaagcgtaggattatactcatacccaattttaatggcctctgatattcttctatatgattcaactcatgtccctgtgggagatgatcaaaaacaacatttagaattatgtagggacattgctcaaaaatttaatttagaa

SEQ ID NO: 301094 - DNA, 862 bp, Unknown
  Bacterial polypeptide expressing nucleotide sequence isolated from the Sargasso Sea
attactggttaaacaagatccaaaaattttaaaaaataatataagagaaacaactgctgctttccttgctagcggattagattataaaaaaagtattatttttaatcagtccttggtaccagcacattctgaaggctcgtggattttaggatgtattgcaagaatgggatggttaaatcgaatgacacaatttaaagaaaaagctggtaaagacaaagaaaaggcgagcgtaggtctttacatatatccaatacttatggctgctgatattttgttatatgattcaacgcatgttccagttggagaagatcaaaaacaacatttagaactatctagagatattgctcaaaaatttaacttagaatttaaatcccctgattttcttaaagcaccagaaccattaatacaaaaaaattttgcaagaattatgagcttaaaagatggaaccaaaaaaatgagtaaatctgatccttcagattttagtagaattaatttaacagataaaaaagatgagatagtgaataaaataaaaaaagctaaaactgataatttagctttgccttcagacgataaaaaattaaatgaaagaccagaagttgagaatcttttagggatttattcaagtttaaataaccaaacattaaacaattcaataaatgaatttggtggaaaaaatttttctgaatttaaaaataaactttccgatcttgttgtagaaaaaatttctccaatatctaacgaaataaataaattaaaaaaggataataactttatagataagattttaaaagatggagctgaaaaagctgataaaataacttcaaaaaaagttaacgaaatgaaaaaaatcataggtttttaa

SEQ ID NO: 301095 - DNA, 553 bp, Unknown
  Bacterial polypeptide expressing nucleotide sequence isolated from the Sargasso Sea
catggttaaaaaaattttctctggagtacaaccaacaggaaacctacatttgggcaattatttaggtgctataaaaaattttgtagatctacaaaatcaagaaggaaatgaatgtgtttattgtgtcgtagatttgcatgctataacagtaaaacaagatccaaaagttttaaaaaataatattagggaaacaactgcagcttttttagcaagtggattagataataaaaaaagcattatatttaatcaatcttcagtcccagctcatgctgaagcttcttggatacttgggtgtgttgcaagaatgggatggttaaataggatgacacaatttaaagagaaagcaggcaaagataaagaaaatgttagcgttggtttatatatttatcctgtactaatggcagctgatatattgttatatgattcttcgcatgtgccagttggagaagatcaaaaacaacacttagaactttcaagggacattgctcaaaaatttaatttagatttcaatgctaaagatttttttaaagttccagatccattaattcaaaaa

SEQ ID NO: 301096 - DNA, 790 bp, Unknown
  Bacterial polypeptide expressing nucleotide sequence isolated from the Sargasso Sea
aattttgtaaaattaaataacgatggtaacaataattgtatattttgtgttgttgatctccatgctattacaaataaacaaaacccaaaagagttaaaagaaaatactctcgaaactatagcaacctttattgcttgtggaattgatccaaaaaaaagcattttatttaatcaatcccaagtacctgctcatacagaaactgcttggattttaagttgtgttgcaaggatgggatggttaaatagaatgacacaatttaaagaaaaggctggtaaggataaagaaaaagctagcataggattatattcttatccaattttaatggctgcggatatattactttatgatgcatctcatgttccagttggagacgatcaaaagcaacatttagaactttgcagagatatagcccaaaaatttaataaagattttaatgttgaggatttttttaaagtacctgagcctttaatacaaaaagaattttcaagaattatgagtctcaaagatggtcaaaaaaaaatgagtaaatcagagttatcagatttaagcagaataaatttaacagacacaaaagatcagattgtaaacaaaattaaaaaagccaaaacagatactttaccaatgccatcgagtattgatgaattaagaaaaaggccggaagtaaataatttgattggaatatattcgagtttgtcagaagaaagtttggaaaaaattttaaatactttttctggaaaaaatttttccgaattcaaagactctttgtcacaattattagttgattatttag

SEQ ID NO: 301097 - DNA, 499 bp, Unknown
  Bacterial polypeptide expressing nucleotide sequence isolated from the Sargasso Sea
ggaaatttacatcttggaaattatataggtgcaataaaaaactttgttgatttacaagacaataaagataacaactgcattttttgtgttgttgatcttcatgccatcactgtaatgcaagatccgatagagttaaaaaataacattagagagacggcagcagcatttatcgcaagcggtattgacccaaaaaaaagtttaatattcaatcaatctttagttcttgcacactcagaaggttcttggattttaggatgtgttgctagaatgggatggcttaatagaatgacacaatttaaagagaaagctgggaaagataaggaaaaagctagtgtcggtttatatatttatcctattctaatggcctctgatattcttttatatgatgctactcatgtgccagttggagatgatcaaaaacagcatttagaactttgtagagatatagctcaaaaatttaataatgaatataaatgttcagattttttaagatcccctg

SEQ ID NO: 301098 - DNA, 832 bp, Unknown
  Bacterial polypeptide expressing nucleotide sequence isolated from the Sargasso Sea
tttttgtgttgttgatcttcatgccattactgtaatgcaagatccaatagaattaaaaaataatattagagagacagcagctgcgtttatcgcaagcggcattgacccaaaaaatagtataatatttaatcaatctttagttccagctcacgccgagggttcttggatattaggatgtgttgctagaatgggttggctcaatagaatgacacaattcaaagagaaagctggaaaagataaggaaaaagctagtgttggtctatatatctatccagttctaatggcttctgacatccttttgtatgatgcgactcatgtgccagttggtaatgatcaaaaacagcatctagaactctgtagagatatagctcaaaaatttaataacgagtataaatgtccagatttcttaaaacctcctgagcctcttatacaaaaacatttttcaaggataatgagtttaaaagatggtacaaaaaaaatgagcaagtcagatattgctgaaggcagtaggattaatttaacagataatgaggatcaaattattaataaaataaaaaaagcaaaaacagataataatactttgcctggaaacgaagatggacttaaagggagacctgaagctgaaaatttaatgggcatttattctagcctgagtaatcaaaatattaatgatacattaaatgaatttgaaggaaaaaacttctctgatttaaaaaataaactatccgaaataatcgtgactaagctgtcgcctatatcaaaagaaataaaaaaattgttgtcagataaaaattatctagatcaaattttagaggatgggagtgttaaagca

SEQ ID NO: 301099 - DNA, 592 bp, Unknown
  Bacterial polypeptide expressing nucleotide sequence isolated from the Sargasso Sea
atgaataaaaaaattttttcaggtgttcaaccaacaggtaatttacatttaggaaattacttaggggcgattaaaaattttgtcaaacttagtaatgatgatgaaaatgattgtattttttgtgttgttgatttacatgccattacaattaaacaagatccgaaggaacttaaaaatcatattagagaaactgtagcatcatttattgcttgtggaataaatcctgaaaaaaatattatttttaatcaatccactgttcctgctcattcagaagctacgtggttgttaagttgtgttgctaggatgggctggttaaatagaatgacacaatttaaagaaaaagcaggtaaagataaggaaaaagcaagtattggactttattcttatccaatattaatggcagctgatattctattatatgatgcaacacatgtacctgtgggagaagatcaaaaacaacacttagaattatgtagagacattgctcaaaaatttaacaatgattatggagttgaagattttttgaaagttcccgaacctcttattcaaaaagaattttcaagaataatgagtcttaaagatggaacaaaaa

SEQ ID NO: 301100 - DNA, 667 bp, Unknown
  Bacterial polypeptide expressing nucleotide sequence isolated from the Sargasso Sea
tctgaacgtcacagcaataacgtcaatgcgggtttatttacttatcctgtgctgatggcggccgatattctggtgtataacgcgcatcaaattccggttggtcatgatcagaaacaacacctggaactggctcgtgatatagccacacgttttaacgcactgcatggtgatatttttactgtgccagaaccttatattccgggcgtagctgcgcgcgtgatgagtttgcaggagccaacgaaaaaaatgtccaagtcggatgagaatccctggaattttgtaggtttgctggaagatccgaagatgatcagcaaaaaattcaaaaaggctatgacggactcagaagatccacctcgtgtcacttatgatctggaaaacaaagcaggtgttgctaacctgttgagtatcttaagtggcgtcacaggtaagccgattgatagtctggtggctgagtacgaaggcaaaatgtacggtcacttaaaaggcgatgtggccgatgccgtgattgcgttattagaacctgtgcaggccaaattccatgaaatccgtcaggatcaaagcctgatgaatcaggtattaaaacaaggtgcagcagaggcaagagctcgtgcttccgtcacgcttgagaaagtgtacgacgctgtaggttttgttttaccgacgtaat

SEQ ID NO: 301101 - DNA, 410 bp, Unknown
  Bacterial polypeptide expressing nucleotide sequence isolated from the Sargasso Sea
tatgggagttaaaaaaattttttcaggtgttcagcctactggtaatctacatttgggcaactatataggcgcgatcaaaaattttgttgatctacaaaatgaaaataatgagtgtatattttgtgtagttgatttacatgctgttacggtaaaacaagatccaaaaattttaaaacaaaatattagagaaactgctgcaacttttttagcatgcggtattaatccgaaaaaaagtataatttttaatcaatcatccgtatcggctcactcggaagtttcttggttattaagttgtgttgctaggatgggttggttaaacagaatgacacaatttaaagaaaaggctggaaaagataaagaaaaggcaagcgttggcctctatatttatcctgtcttgatggcagcagata

SEQ ID NO: 301102 - DNA, 585 bp, Unknown
  Bacterial polypeptide expressing nucleotide sequence isolated from the Sargasso Sea
tatggcaaaaaaaatattttctggtgtccaaccaacgggtaatcttcatctaggaaattatttgggtgctataaaaaattttgtaaacttaaataatgataatgataacaagtgtattttttgtgtagttgatttacatgccattacagttaagcaagatccaaaagagctaaaaaacaatattagagaaactgtagcaacttttatagctagtggaattgatcccaaaaaaagtattatatttaaccaatccagagtatctgctcatgctgaaggagcatggatattgagctgtgttgctagaatggggtggttaaatagaatgacccaatttaaggagaaagctggtaaagacaaagaaaaagctagtattggattatattcttatccagttttaatggcagccgatattcttttgtatgatgctactcatgttcctgtaggtgatgatcaaaagcagcatttggagttatgtagagacatagctcaaaaatttaataatgattttgaagtagagaactttcttcaagttcccgaacctttaattcaaaaggagttttcaagaattatgagtttaaaagatgg

SEQ ID NO: 301103 - DNA, 673 bp, Unknown
  Bacterial polypeptide expressing nucleotide sequence isolated from the Sargasso Sea
taaggaaaaagcgggttcaaataaagagaatgcaagtgttggactatatgtatatccaaatttaatggctgccgacattctcttatatagagcaactcacgtacctgtaggagatgatcaaaagcagcatttagaacttgcaagagatatagcacaaaaattcaataatgattttaaaaataaaaattttttcccgattccagaacctcttattcaaaaaaatttttcaagagtaatgagtcttagagatggtaaaaaaaagatgagtaaatccgaggagtctgagtactcacgtattaatttgactgataccccagatgagataagaaaaaaaattaaaaaagctaaatcagattctgaaccaattccagaagaaataaaaacacttgaaacaaaaccagaagcgttcaatttaataaacatatattcttctttaactaatttaaaacatcaagatattttgaatgaaatgagaggaaaagatttttcaagtctcaaagaagctttgacagatgtattaatagctacaatttgtccaattggagagaaaattatagagttgaaaaatgataaatcgtacttatttaaagtgcttaaaacaggttcagataaagctaaggagatttcggatagaaatttgaataaaataaaggaaattgttggatttatttaa

SEQ ID NO: 301104 - DNA, 679 bp, Unknown
  Bacterial polypeptide expressing nucleotide sequence isolated from the Sargasso Sea
gcaggggttggtttgatggagagatctacttcatataaggataaaatagaaaaagggttaaaaccacatatgggtcttttttcttatcctatccttatggccgcagatattttgctttatggaagtgaaatagtgccagtgggaaaagatcaaaaacagcatttagaaatcaccagagatattgcaatccggtttaataatatttatggagatgtatttgttgtccctgaagcggatataaatgaaaatactatgttagttcccgggattgatggacaaaaaatgagtaaatcatatggtaacacaattcctattttttcagatgaaaaaataattagaaaagccgttatgtctatcactacagattctgcagatattaatgaccttaaagataaagacacgccgctttttaaaatttattctatgtttttaaataacgatgaaaaagatattctatctgataggtatgacacgcctggattaagatatggtgatttgaaaaaggaactgtttgaaaaaattattgaacatttttcgccctaccgtaaaaaaaggaatgacttattaaaaaatattgattttgtatatagttcgctaaatcaaggagctcaaaaagcatctatcattgcagatgattacataaaaaaaattcgagattccatgggacttaattattaaa

SEQ ID NO: 301105 - DNA, 680 bp, Unknown
  Bacterial polypeptide expressing nucleotide sequence isolated from the Sargasso Sea
tatgggaaaaaaaattttttcaggtgtacagcctactggaaatcttcacttggggaattatttaggtgcaattaagaattttgttgaattaaataatgataaagataatcaatgtgttttttgtgttgttgatttacacgcgataacagtacatcaagatccaaaagaactaagaaataatattcgagaaactgtcgcaacttttatagcaagtggtattgacccaaataaaagtgttatctttaatcaatccaaagttagtgctcatacagaagcagcgtggatattgagctgtgttgctagaatgggttggttaaatagaatgactcaattcaaggaaaaagcaggaaaagataaagagaaggcaagcataggactttatagctacccaattttaatggcagcagatatacttttgtatgatgcgagtcatgttccagttggtgatgatcaaaaacaacatttagaactttgtagagatattgctcaaaaatttaataatgattttaaagttgaagatttttttaaagtaccagagcctttaattcaaaaagaattttcaagaattatgagtttaaaagacggtacaaaaaaaatgagtaaatcagaatcttcagatttaagtcgaataaatttgacggatgataaagatcaaattattaataaaataaaaaaagcta

SEQ ID NO: 301106 - DNA, 516 bp, Unknown
  Bacterial polypeptide expressing nucleotide sequence isolated from the Sargasso Sea
tatgttaaaaaaaatattttcaggagtgcaaccatctgggaatcttcatttaggtaattttttgggagctataaaaaattttgtaagtcttcaaaatcaagaaaatacagattgtgtatattgtattgttgatcttcatgccattacgacaaaacaagatccaaaagcccttaaagaaaatataagagaaactttagcaacttttattgcaagcggaatagatccaaaaaaaagcattatatttaatcagtccgcagtttctgcgcactcggagggagcttggattttaagctgtatagctaggatgggatggcttaatagaatgacacagttcaaggaaaaagctggtaaagataaagagaaagcaagcgtaggattatactcatacccaattttaatggcctctgatattcttctatatgattcaactcatgtccctgtgggagatgatcaaaaacaacatttagaattatgtagggacattgctcaaaaatttaatttagatttcaatgtacc

SEQ ID NO: 301107 - DNA, 820 bp, Unknown
  Bacterial polypeptide expressing nucleotide sequence isolated from the Sargasso Sea
atgtcaaaaaaaattttttcaggtgttcagccaactgggaatttacatttaggaaattatttaggagcaataaaaaattttgttaatcttcaaaaggaaaaagataatacgtgtatatattgtgttgtagatttacatgcaataacagtcaagcaagatccaagaattttgaaaaaaaacattagagaaacaacagctacctttttagctagtggattggatccaaaaaaaagtattatatttaatcaatcaatggttccatcccactcagagggcgcatggttattaggatgtgtagcacgcatgggctggctaaaccgaatgacacagtttaaagagaaagcaggtaaagataaggaaaaagctagtgtcggactctacatatacccagtattaatggcatcagatattttgctttataattccactcatgtaccagtaggagaagatcaaaaacaacatctagaattaaccagggacatagcacaaaaatttaatttagatttcaatagcccaaactttttaattacacctgaacctttaatacaaaaaaatttttcaagaattatgagtttgaaggatgggaaaaagaaaatgagtaaatcagatccatcagatcaaagtaggattaacatgactgatgacaaagaccaaattgtaaataaaataaaaaaggcaaaaactgatagcggcgaatttcctgaaaataataatgatcttaacaaaagaccagaattaaataatctatttggaatatattcaagcatccaagaccaggatatgaaatcaacaataaatgaatttcaaggtaaaaactttc

SEQ ID NO: 301108 - DNA, 349 bp, Unknown
  Bacterial polypeptide expressing nucleotide sequence isolated from the Sargasso Sea
atgggaaaaaaaattttttcaggagttcagccaactggtaatcttcatttaggaaattatttaggagcaattaaaaattttgtcgaacttaacaatgaagctaataatgattgtattttttgtgtagttgatcttcatgcaattacagttaatcaggatccaaaagaattaaaaaacaatgttcgtgaaactgtagcaacatttatagcaagcggtattgatccaaaaaaaagtataattttcaaccaatcaaaaataagcgctcattctgaagctgcttggatattgagctgtacaacaagaatgggttggttaaatagaatgactcaatttaaagaaaaggcaggca

SEQ ID NO: 301109 - DNA, 337 bp, Unknown
  Bacterial polypeptide expressing nucleotide sequence isolated from the Sargasso Sea
tatgaaaaaaataattttttcaggtgtccaacctactggtaatttacatttaggcaattatcttggtgctataaaaaattttgtaaaattaaataacgatggtaacaataattgtatattttgtgttgttgatctccatgctattacaaataaacaaaacccaaaagagttaaaagaaaatactctcgaaactatagcaacctttattgcttgtggaattgatccaaaaaaaagcattttatttaatcaatcccaagtacctgctcatacagaaactgcttggattataagttgtgttgcaaggatgggatggttaaatagaatgacacaattaaag

SEQ ID NO: 301110 - DNA, 852 bp, Unknown
  Bacterial polypeptide expressing nucleotide sequence isolated from the Sargasso Sea
acctgctatatctgaaagtaagaaagaaagcacttcatcttttttatttttagcttattatcactctttaattaaaaatttagatcccgaattaacacatagttcaagttttgaaatagctgcttgttggcttgcttgtggtttagattccaaaactacaaccttttataggcaatccgatgttccacatatcatggaattagcgtggatattaagttgtctgacggccaaagggttacttaacagagcacatgcctataaagctgcagtatcattaaatgaagataaaaattctaaagacccagataaaggaataaccatggggttgtttaactatcctattttaatggccgcagatattctaatgtttaacgcagatgaggtacctgtaggccaagaccaaaaacaacatatagaaatgacaagggacatagcaaataggtttaaccaccattacggagatgtatttacaataccagaagcagttataagtgacgaaacaggaatattgccaggaatagatgggcaaaaaatgagtaagtcttatggaaatacaattccagctttcattgatactacaaaattaaaaaagctagtaaacaaaattaagactaattctctggaaccaggagtacctaaggaaacacgagattgcactgtttttagtttgtataaagcctttgcatctcctgatcaggttttaaacatggaagaagcttatgaaaatggtatatcttggggcgaagctaaaaatcaattgtatggtcttttagaagaatttatatctccatatagagaagagtatcaaagaatctctcaagatagaggctatgttgagcaaaccttaaagga

SEQ ID NO: 301111 - DNA, 499 bp, Unknown
  Bacterial polypeptide expressing nucleotide sequence isolated from the Sargasso Sea
atgggtaaaaaaatattctctggcgttcagcctacaggtaatcttcatcttggaaattatttaggtgccataaaaaactttgtagacttaaataacgataaagataataaatgtattttttgcgtagttgatctgcatgccattacagtaaagcaagatcctaaagaattaaaaaataatatacgggaaactgttgcaacttttgtagcaagcggaatagatccaaaaaaaagtataatttttaatcaatctagtgtggctgcacatgcagaaggagcatggatattaagctgtgttgctagaatgggctggttgaatagaatgactcaatttaaagagaaagctggtaaagataaagagaaagccagcataggactgtactcttatccagttttaatggcagctgatattctcttatatgatgctactcatgttccagtaggtgatgatcaaaagcaacatttggagttatgtagagatatagctcaaaaaatttaat

SEQ ID NO: 301112 - DNA, 505 bp, Unknown
  Bacterial polypeptide expressing nucleotide sequence isolated from the Sargasso Sea
aatgagtaaaaaaatattttcaggtgtccagccaagtggcaatcttcatttaggaaattatataggtgcaataaagaattttgtagatcttcaaaatcaaaaaggaaaccaatgtgtttattgtgttgtagatttacatgctattactttaaaacaagatccaaaaattttaaaagatagtataagagaaactacagctgcttttttatcaagtggtatcgatccaaataaaagtataatatttaatcaatcattagtaccagcccatgcagaaggatcatggatattaggatgtattgcaagaatgggatggttaaatcgtatgacacagtttaaggaaaaagcaggcaaagacaaagaaaaggccagcgttggtttgtatatttatccaatattaatggctgcagatattttgttatatgatgcaactcacgttcctgtgggcgaagaccaaaaacaacatttagaattatcacgagatatagctcaaaagtttaattcagat

SEQ ID NO: 301113 - DNA, 724 bp, Unknown
  Bacterial polypeptide expressing nucleotide sequence isolated from the Sargasso Sea
aatgcaaaaaaataatactcttctttcaggagctcagccttctggaaatattcatattggaaattattttggagctattgaaaactgggttaatctacaggatcagtatcagtctctttttggggttatggatcttcatgctattacggcaaaatatgatcctaggttacttagagagagctctataaatttagttattacttaccttgcttgcggtatagatcctcaaaaatctaatatttttattcaaagctctatatctgaacatctcgagttttcttggatcttgggatgtcatactcctatgggttggcttaatagaatgactcaattcaaggacaaatctcaaggacaaaaaaaagaaaacatcaagtatgggttatattcttatcccgtattgatggctgccgatattcttctttatggggcgggttttgtacccgtaggaaacgatcaaaagcaacatatagagcttacagcagaaatttgtcaaagttttaatcacaactatcaaactgattttcttaaagttccaaaatatatttatgcctcatctaaaagattgatgtctcttaacaatggaaagaataaaatgagcaagtcagatgttagtgagttatccagaattaacctagaggatagtgaagaggaaatttttaagaagattaagaaatgcaaaactgattcgatttctggaatttcatatgatgaaaaccgcccagag

SEQ ID NO: 301114 - DNA, 910 bp, Unknown
  Bacterial polypeptide expressing nucleotide sequence isolated from the Sargasso Sea
aattttttcaggagttcagcctacaggaaaccttcacttaggtaattatattggtgcaataaaaaattttgttgatctacaaaatcaagcagataatgaatgtgtctattgtgttgttgatttacatgcaataacaacaaagcaagatcctaaaattcttaaaagcaatataagagagaccacagctgcttttttggcaagcggaatagacccaaacaaaagcattatatttaatcaatctttagtaccatctcattcggaaggttcttggatcttaggatgtatagctcgtatgggttggttaaatagaatgactcagtttaaagaaaaggctggaaaagataaagaaaaagctagtgtcggtttatatatatatccaattttaatgactgccgacatattgttatatgatgcaacacacgttccagtaggagaagatcaaaaacagcatttagagttatcaagagacattgcgcaaaaatttaatttagattttaatgcaccaaattttcttagagctccagaaccattaatacaaaaaaatttttcaagaataatgagtttgaaaaacggaaaaaataaaatgagtaaatcagatccatcagatttaagtagaataaatttaacagacaataaggatcaaatagttaataaaataaaaaaagctaaaactgataatgacccattaccaagtaatgaaaaaaatctaagtaaaaggcctgaggttgaaaatttattaggaatatattcaagtttaagtggccaaaatttagaaaattctataaatgaatttagcggaaaaaacttttctgtttttaaagaaaaattagcagaactagttgttgaaaaaatttcaccaatatctattgaaattaataaattgcaaaaagatatcagttttattgataaa

SEQ ID NO: 301115 - DNA, 603 bp, Unknown
  Bacterial polypeptide expressing nucleotide sequence isolated from the Sargasso Sea
aatgaaaaaaaaaatcttctccggagttcaaccaactggaaatttacatttgggaaattatttaggagcaatcaaaaattttgttgcgttacaaaatgaaaaagataatgaatgtgtttactgtgttgtagatttacacgcaattactgttaaacaggatccaaaaatattaaaggataatataagagaaacaacagccgcctttcttgcaagtgggctggactataaaaaaagtataatttttaatcaatccctagtacccgctcattcagaaggttcatggatattaggatgtattgctagaatgggatggttaaatcgtatgacacaatttaaagaaaaagcaggtaaagataaagaaaaggcaagcgttggcttatatatatatccaatacttatggctgctgatattttattatatgattcaacacatgtacctgttggagaggatcaaaaacaacatttagaattatctagagatattgcacaaaaatttaatttagattttaaaactcctgatttttttatagcaccagagcctttaattcaaaaaaattttgcgagaattatgagtttaaaagatggaaaaaaaaaaatgagtaa

SEQ ID NO: 301116 - DNA, 529 bp, Unknown
  Bacterial polypeptide expressing nucleotide sequence isolated from the Sargasso Sea
atgactaaaaaaattttttcaggagttcaaccaacaggaaatttacatcttggcaattatataggtgcaataaaaaattttgtagatttacaaaataataaagataacagttgcattttctgtgttgttgatcttcatgctattacagtaatgcaagatccaacagagttaaaaaataatattagagaaacggcagcagcatttattgcaagtggtattgatccaaaaaatagtataatattcaaccaatctttagttcctgctcattctgagggttcgtggattttaggatgtattgctagaatgggatggcttaatagaatgacacaattcaaagagaaagccggaaaagataaggaaaaagcaagtgttggtttgtatatttatccagttctaatggcttcagatattcttttatatgacgctactcatgtaccagttggagatgatcaaaaacaacatctagaactctgtagagacatagctcaaaaatttaataatgaatacaaatgccctagattttctaaga

SEQ ID NO: 301117 - DNA, 321 bp, Unknown
  Bacterial polypeptide expressing nucleotide sequence isolated from the Sargasso Sea
agccgccggtggtgcgctacgatgtgcagaacaaggcgggcgtatctaacctgctggatattctctccgccgtgaccggacagagtattccggaactggaaaaacagtttgaaggcaagatgtatggtcacctgaaaggcgaagtcgccgatgcggtatccggcatgctgaccgagttgcaggagcgttattatcgttaccgtaacgacgaagccttcctgcaacaggtgatgaaagacggcgcggaaaaagcgggcgcgcgtgcatcagctacgctgaaagcggtttatgaagcgattggttttgttgccaggccgtaac

SEQ ID NO: 301118 - DNA, 520 bp, Unknown
  Bacterial polypeptide expressing nucleotide sequence isolated from the Sargasso Sea
gatgagtaataaaaaattggtattttcaggtgttcaacctactggcaacttgcatctaggaaattatcttggagcactaaagaattttgtatcattacagaaagaaatgaattgtgtttattgtgttgttgatctacatgcaataactactttccaaaatcctaaagaactaaaaaataatattttggagactacagcaggttttttagcaacaggactagacccaaacaaaagtataatttttaatcaatcttctgtccctgctcattcagaactggcttggattttcaattgtgtatcaagagttggttggctaaatagaatgacccaatttaaagataaggctggatcagataaagaaaaagctagtgttggactttatatttatccaaatttaatggcggctgatattttattatataaggcaactcatgttcccgttggagctgatcaaaaacaacatttagaattgacaagagatattgctcaaaaatttaacaaagaatttaattgtaaagat

SEQ ID NO: 301119 - DNA, 817 bp, Unknown
  Bacterial polypeptide expressing nucleotide sequence isolated from the Sargasso Sea
aaccactgcaagttttttagcctcaggcttagactctgaaaaaagtattatctttaaacaatcatcagttagtgaacacgctgaattagcttggattatgaattgtgttgctagacttgggtggttaaaccggatgacacaatttaaagacaaagcaggttctgataaagaaaaagcaagtgtaggtctttatatatatcctaatcttatggcagctgatatcttactttataaagcaacacacgttcctgttggagccgatcaaaaacaacatcttgagctttgtagagatattgcccaaaaatttaataacgattttaattgtgatggtttttttccactaccagagcctttgatattaaaaaaaatttctagagttatgagcctaagagatggaacaaaaaaaatgagtaaatctgaagaatcagattattcgagaattaatcttactgataccgcagatgaaattaaaaaaaaaatcaaaaaagctaaaactgattcatctccaatacctgaatctgaaaaagaattagaaaaaagaccagaagcacttaatttattaaatatttatgctgatctaaatcaaattccattaagcaaagttttaaaagatatgagtggaaaagaattttcttatttcaaagaaaaactatcacaagcattgattgaagttatagaacctattggaaaaaaaataaaaaacttaatgaatgataaggactatttagaggtaattctaaaaaaaggtcaggaaaaagcttcaaaaaaggctgaggaaaacctaaaaaagatacgtgaaaaaattggcctgttgtaa

SEQ ID NO: 301120 - DNA, 904 bp, Unknown
  Bacterial polypeptide expressing nucleotide sequence isolated from the Sargasso Sea
aaaaaataatcaatgtgtttattgtgtagttgatttacatgcaattacgattaaacaagatccaaaaattttaaaagatagcataagagaaactacggctgcatttttggcaagtggaatagattcaaataaaagtataatatttaatcaatcgcaagtctcagctcatgcagaaggatcatggatacttggttgtattgcaagaatgggttggttgaatcgaatgactcagttcaaagaaaaagcaggcaaagataaagaaaaagctagtattggactatacatatatccaatattaatggctgcagatattttattatatgatgcaacacacgttccagtaggggaagaccaaaaacaacatttagaattatcaagagatattgctaacaaatttaatttagattttaatgttccaaacttttttaaagttccggatcccttaatccaaaaaaatttttcaagaattatgagtttaaaagatggtaaaaaaaaaatgagtaaatctgatccatcagatctaagtagaataaatctaactgacacaaaagaagaaattttaaataaaataaagaaagcaaaaacagatacaatgcctattccaaatgaaataagcgaactaaaaaaaaggcccgaagtaggaaatttgcttgggatttattcaagtttaaataatcaaactactgaaaaaaccataaatgaatttaatggaaaaaatttttcagattttaaagacaatcttgctgaacttgttgtagaaaaaatttatccaatttcgttagaaattacaaaattattgaaaaatgaggatcatattgatcagattttaaaagaaggtgcagaaaaggcaaatgaacaatcatctaagaaagtaaaagaaatgaaaaaaattattggtttttaa

SEQ ID NO: 301121 - DNA, 387 bp, Unknown
  Bacterial polypeptide expressing nucleotide sequence isolated from the Sargasso Sea
tatgggtaaaaaaatattttcaggagtgcagcctacggggaatcttcatttaggaaattatttaggggctataaaaaactttgtaaatttaaacaacgacaatgataacgaatgtattttttgcgtagttgatctacatgccattactacaaaacaaaatccaaaagagttaaaaaacaatataagagaaactgttgcaacctttgtagccagtggaatagatccaaaaaaaagtataattttcaatcaatctagtgtgtcagctcattctgaaggagcatggatattaagctgtgttgctagaatgggctggttgaatagaatgacccaatttaaagaaaaagctggtaaagacaaagagaaagcaagtattggggttgtattctt

SEQ ID NO: 301122 - DNA, 463 bp, Unknown
  Bacterial polypeptide expressing nucleotide sequence isolated from the Sargasso Sea
atggctaaaaaaattttttcaggagtccaaccaacaggaaatctacatttaggtaattatttaggtgcaataaaaaattttgtagaactgcagaatgaagaggataataattgcatatattgtgttgttgacttgcatgcaatcactttgaaacaggatccaaaagaactaaaaaataatattagagaaactgctgcaacattcattgcaagtggtctcaatccaaacaaaagtattttgttcaatcaatctttagttcccgcacactcagagggttcttggatattgagttgtattggtagaatgggttggcttaacaggatgacacagtttaaggaaaaagcaggaaaagataaggagaaagcaagcgtaggcctttacatctatcctattcttatggctgcagatattatgttgtataatgcaacacatgtacctgttggtgatgatcagaagcaacatt

SEQ ID NO: 301123 - DNA, 769 bp, Unknown
  Bacterial polypeptide expressing nucleotide sequence isolated from the Sargasso Sea
ccaactggaaatttgcatttgggaaattatttaggagcaataaaaaattttgttgcactacaaaacgaaaaagataacgaatgtgtttattgcgttgtagatttgcatgcaattaccgttaaacaagatccaaagattttaaaagacaatataagagaaacaacagctgcttttctagcaagtggattggattatgaaaaaagtataattttcaatcagtctctagtaccagctcactccgaaggttcttggattttaggatgtattgcaagaatgggctggttaaatcgtatgacacaatttaaagaaaaagctggaaaagataaagaaaaagcaagcgttggtttatacatatatccaatacttatggctgctgatattttgctgtacgactctacacatgtacctgttggagaggatcaaaaacaacatttagaattatcaagagatattgcacaaaaatttaattcagattttaatgctcctgattttcttaaaacgcccgaaccattaatacaaaaaaattttgcaagaattatgagtttaaaagatggaacaaaaaaaatgagtaaatctgatccttcagatttaagtagaattaatttaacagatcaaaaagacgaaatagtaaataaaatcaaaaaagctaaaactgacaactcaactttaccttctgatgataaaaaattaaatgaaaggccagaagtcgagaatcttttgggaatttattcaagtttaaataatcaaacattatttgatacaataaatg

SEQ ID NO: 301124 - DNA, 437 bp, Unknown
  Bacterial polypeptide expressing nucleotide sequence isolated from the Sargasso Sea
aatgactaaaaaaattttttcgggtgttcagccaacaggaaatttacatcttggtaattatcttggggcaataaagaattttaccaaattacaaaatgataataaaaataactgtattttttgtgttgtagatttacattcaataactgttcaccaggatccaaaattactaaaaaaaaatgtgagagaaactgctgccacttttatagctagtggaattgatccttctaaaagtattatctttaatcaatcttctgtaccagcacattcagaagcagcttggatattgggatgtgtttcaaagatgggatggttaaatagaatgacacaatttaaagaaaaagctggaaaagataaggaaaaagcaagtataggactttatgtctatccagttttgatggctgcagatattttattatatgacacgacacatgttc

SEQ ID NO: 301125 - DNA, 582 bp, Unknown
  Bacterial polypeptide expressing nucleotide sequence isolated from the Sargasso Sea
tatgattcaaccatcaggtgacttaggcattggtcattatttgggagcaattattcattggttaaagttacaagagcaaggagattccggtctatttgcaattgctgatttgcatgcaattacggtgcctcagtcaccagaggttcttaagaagcgaacacttgacctggttgcattttatttggcgtgcggaattgacccggataaaagtatcatttttactcagtcacatgtgcctcagcatgcagagttagcttggattttaagttgcttaaccagtattggtgaattaaatcggatgacacagtttaaggataagactcagcatgctaaacgagaaagaataggggtcggattgcatgtatatccagtcttaatggcagctgatattttagcctatcaagcagataaagtccctgtgggggctgatcaaaagcagcatttggagctggcaagagacttagcgattcgctttaatgataagtttggccaggtatttaatgtgccagaaccggtaattgcctcatgtggtgcgcgaattaaatcattgactaatccgttgaagaaaatgtctaagtcaga

SEQ ID NO: 301126 - DNA, 565 bp, Unknown
  Bacterial polypeptide expressing nucleotide sequence isolated from the Sargasso Sea
ggagatgatcaaaaacaacacttagaactaactagagatattgctcaaaaatttaataatgattttaaaactgacttttttcctattcctaagcctttaatttttggagaagcaacacgcgtgatgagtctgcgtgacggatcaaaaaaaatgagtaaatcagacccatcagattattcaagaataatgttaactgactcagcagaaaatattgcacaaaaaataagaaaagctaaaactgatcctgaaccactgcctttagataaagatgggttggctaaaagaccagaagctgaaaatttaatatctatatttgcatctttgcaaaatacttctattgaaaatgttgtatcagaatatgctggaaaagaattttccatattcaaaaaagatttagtggatttatcagtatctaagctcgaacctataacaactgagatgaatagattaatgggtgatatcacttatatcgattctgtattaaatgaaggaaaagagaaggctataacagtggcggagcctgttttagcaaaaactagagaaataattggttttttatcctaat

SEQ ID NO: 301127 - DNA, 760 bp, Unknown
  Bacterial polypeptide expressing nucleotide sequence isolated from the Sargasso Sea
aaaaaaaacattttatttaatcaggctagcgtttccgctcattcagaactcgcttggatatttaattgtgtttccaggttgggttggttaaatcgcatgacacaatttaaagaaaaggctggttctcagaaagaaagagcaagtgttgggctttatgtgtacccaactttaatggcttccgacattttaatttatagagctacgcacgttcccgtgggggaggatcaaaaacagcatttggaattatgtagagatattgcacagaaatttaacaatgattttaatacaaaattttttcctttaaccgaacctttaataccagatgctgaatctagaattatgagtttaagagatggaaaaaaaaagatgagcaagtctgatgaatcggatttcagcagaataaatttaacagatgatccagatttaataagtcaaaaaataaaaaaggctaaaacagatagtgctccaataccaaaaaatctcaaagaacttgataaaagacccgaagctcttaatcttattcaaatttattcaagcattaataaattagaggtggaaaaagttttaaacgaatttggtggaaaaaatttttcagaatttaagaataaacttggagattctctaatcgaatcaatttgtcccattggcaaaaaaattaaagagtatttgaatgattcacaatatctcgaaaaagttttaattgatggaagtcaaaaagctagtgaaattgcaaccaagaatttagaggaaatttacgata

SEQ ID NO: 301128 - DNA, 676 bp, Unknown
  Bacterial polypeptide expressing nucleotide sequence isolated from the Sargasso Sea
atggataaaaaaagagtattttctggagttcagcctactggaaatttacatttaggaaactatttaggtgcaattaaaaattttgttgatttacaaaataagtttgagtgtgtttactgcattgtagatttacatgcaattactaatcgtcaagatccaactcaactcaaatcaaatatttttgaaactgctgcaagttttattgcttcaggtcttaatcctgataaaagtattatatttaatcaggccagtgtacctgcgcatagtgaactagcttggatatttaattgtgtagctcgaataggctggatgaatagaatgacacaatttaaagaaaaagctggagcgaacaaagaaaacgcaagtgtaggcttaatggtttatccaaatttaatggctgcagatatacttttatataaggcgacgcatgttccagtaggcgaagatcagaaacaacatttagaattaacaagggatattgctaagaaatttaataatgattttaaaagcaaagatttttttcccatagtagaacctttaattccaaaagagatatccagagtaatgaacctgagggatgcgaaaaagaaaatgagtaaatcagaagagtctgattatagtaggataaatttaaaagatgaaaaagaattgattgtgcaaaaaataaaaaaagcca

SEQ ID NO: 301129 - DNA, 760 bp, Unknown
  Bacterial polypeptide expressing nucleotide sequence isolated from the Sargasso Sea
ctgggtgttcagcctacaggtaaccttcatcttggaaattacttaggtgccataaaaaactttgtagacttaaataacgataaagataataaatgtattttttgtgtagtcgatttacatgccattacagtaagacaagatcctaaagaattaaaaaataatatccgggaaactgtcgcaacttttatagcaagcggaatagactcaaaaaaaagtataatatttaaccaatctagagtggctgctcattcggaaggagcgtggatattaagctgtgttgctagaatgggctggttgaataggatgactcaatttaaggagaaagccggtaaagataaagagaaagctagcataggattatactcttatccagttttaatggcagctgatattcttttatatgatgctactcatgttccagtaggtgatgatcaaaagcaacatttggagttatgtagagatatagctcaaaaatttaataacgattttgaagtagaaaattttcttcaagttcctgaacctttaattcaaaaagaattttcaaggataatgagtttaaaagatggttcgaaaaaaatgagtaaatcagagttatcagatttaagtagaataaatttaacagataacaaagatcaaataataaacaaaattaaaaaagcgaaaactgatcctatgcctatgccgcaagacttaaaggaacttgatgaaagattagaagctaaaaatcttttaggaatatattcaagtttaactaattcta

SEQ ID NO: 301130 - DNA, 586 bp, Unknown
  Bacterial polypeptide expressing nucleotide sequence isolated from the Sargasso Sea
ggaaaaaaatattatttttaatcaatctcaagtaccagaacatacacaattagcatggctgttgagctgtacagctagaattggatggctaaataggatgactcaatttaaagataaagcaggtaaaaatagagagaacgcatcagtaggtttatatacatatcctatactaatggcggccgatattatgctgtataaagccagtcatgttccagtgggtgatgatcaaaaacaacatctcgagcttgctagggatatagctcataaatttaatacggattacaatattgatttttttgttttaccagaaccattattcaattcagattccacacgcattatgagtcttagagacggtacaaagaaaatgagtaagtcagatacctcggattactctagaatattaatgacagatgacaatgatacgatttcattaaaaattaaaaaagcaaaaactgattctttgtcaatgccagaactagagaatggtcttagtaagcgcccagaaatagataatctaatcaatatttactcaagttgttcaggaatatcaagaaatattgttatagatcaattttcctctaag

SEQ ID NO: 301131 - DNA, 841 bp, Unknown
  Bacterial polypeptide expressing nucleotide sequence isolated from the Sargasso Sea
tctaatgttcttgaaactgtagcaacatttattgcgtcaggattaaatccagaaaaaaatattatttttaatcaagctagtgtttctgctcatagtgaacttgcatggatatttaactgtgttgcaagaattggttggatgaatcgaatgacgcaatttaaagaaaaagctggcgaaaataaagaaaatgcaagtgtaggccttttagtttatcccaacttaatggcagcagatatacttatttataaggctacccatgttccagttggtgaagatcaaaaacaacatttagaattaactagagacattgctaaaaagtttaacaatgactttaactgcaaagattattttccaatagttgaagctttaattcctaaagaaatttctcgagtaatgagtttaagagatggtaaaaagaaaatgagcaagtcagaagactctgatcaaagtcgaataaatttaaaagatagtaaagatttgattaatcaaaaaattaagaaggcaaaaacagatacagccccaataccatctgaaatatctggacttaaaaatagatatgaagcaacaaatcttataactatttatgcgagtttaaataatattgatttgcaaacagttctaaaagaatttggtggcaaaaatttttcaacttttaagagtaaattaagcgaatcaataattgaaaaaatctgtcctattggcgaagaaatgaaaaaattattaaaagataaaaattatctaaatgaggtgttggtaaaagggtcaaaaaaagctaaattaattgcagaaattaatattaaagaaatttatgaaataattggcctcacaaggttttcttgat

SEQ ID NO: 301132 - DNA, 637 bp, Unknown
  Bacterial polypeptide expressing nucleotide sequence isolated from the Sargasso Sea
atatgtataccctactttaatggcctctgatattttgctttatgatgcaacacatgttccagttggaaacgatcaaaaacagcatttagaaattacaagggatatagcacaaaaatttaacacagattttaactgtgcagattttattaaaattcccgagccactaattcaagaagaattttcaagaataatgagtctaaaagatggaacaaaaaaaatgagtaaatcagatatatcagaccaaagtagaattaatcttaaagatgaaaaagacgctattgtaaataaaattaaaaaagcaaaaacagatagcttgccactcccatcagatatgattgatttgaaaaaaagaccagaagcagataatttaattggaatctactgcaatttaagtggatacaaagttgaaaaagttttatctgatttttctggaaaaaacttttctttctttaaagaaaaactttcagatttagttatagataaaatttatcctattggtaaagaaattaataaattattaaaagcaaaagatcatttaataaatgtattaaaacaaggaacaaaaaaagccgaggttagagcaaatgataaattaaaaaaaattcatgaaaaaatcggttttttggacataaagtag

SEQ ID NO: 301133 - DNA, 628 bp, Unknown
  Bacterial polypeptide expressing nucleotide sequence isolated from the Sargasso Sea
aatgatttaaaaaacgttaatgcagcactattcacctatccaattttaatggcagcggatattttactttatgatgctaattatgttcctgttggtaaagatcaaattcaacatttggaaattactagaaacgtagcctctaaatttaataatttacatggtgaaaccttaattattcccgaatcgattactgatgaaaataccaaattaattattggaacagatggtcaaaaaatgagtaaatcaaaaagtaatattataaatattttccttcctgataaacaactcaaaaaacaaataatgtcaatcaaaacagatagtttacctattgagtcaattaaaaacccaaatacatgcaatgtgtttaaattatacagcctaattggtaatgaaactcaagttaagcaaatgaaggaaaattatgagaagggtggctacggttatggtgaagcaaagagtcagttatttaatctcatattagaaacttacagtaaacaaaggaacacctacaattacctaatggataatagaagtgaaattgaccaaatcttaaaagagggcgcaataagggcaaaaacaattgctgatcaagtaattaaaagagttaaatcaaaacttggaatttaag

SEQ ID NO: 301134 - DNA, 633 bp, Unknown
  Bacterial polypeptide expressing nucleotide sequence isolated from the Sargasso Sea
tagggttgtacatttacccaattttaatggcagctgatattcttttatatgatgcaacacatgttcctgttggagaagatcaaaaacaacatttagaactcacaagagatattgcccaaaaatttaatacagattttaaagcacaagatttttttaaaataccagagcccctcatacaggaaaaattctctcgtattatgagtcttaaagatgcgaaaaataaaatgagcaaatcagatccctctgatgctagtcgtataaatcttaccgacacagaggaacaaatccataataaaataaaaaaagcaaaaactgatacaaaatcttttcctgctaatgagaaagatctgaccaaaagaccagaaatacaaaatctgattggtatttattcaagtttaaaatcacaaaaaattactgacacattaaaggaatttcagggaaaaaatttttcaaattttaaagataacctatcagaggttgtgatagaaaatatttcccctatttcaaaagagatatctaaattaaaattagataaaggacatattcttcaagttctgaaagatggaagtgaaaaagccgaagctattgctgcagaaaaagttaaaaaaattaaagaaattattggcttttaaa

SEQ ID NO: 301135 - DNA, 645 bp, Unknown
  Bacterial polypeptide expressing nucleotide sequence isolated from the Sargasso Sea
aatgaaaaaacgaattctaacaggaattacaacaactggcacaccacacattggaaattatattggtgctattcgccctgcaattgaaatgacgaaagattctgatgaatctttcttttttttagcagattatcactcaattattaaaaaccaggactcagattctataaaaaattcagtaaagaatgttgcactagcatggttatcttctggattagacccaaataaatcctatttctataaacagtctgatgttccagaaataattgagttgtgctggattctaaactgcgtaactgcaaaaggtttaatgaatagggctcatgcctacaaagcagcaacgtcaataaatgaaaatgatcctgataaaggaattacaatgggattattctcatatcctgtactaatggctgcagatattcttatgtttgattcaacacatgttccagttggattggatcaagttcaacatctagaaatgacaagagatattgctgctagatttaatcatttatataagccaattttaactctaccagatcctattattcaggataaagaaaatatagttcctggattagatggacgaaaaatgagcaaatcttacggaaatgtaataccacttttgggaagtgaaaagatatt

SEQ ID NO: 301136 - DNA, 778 bp, Unknown
  Bacterial polypeptide expressing nucleotide sequence isolated from the Sargasso Sea
aaaaaaagcataattttcaatcagtcacaggtgagtgctcattcagaggcagcatggattttaagttgtgttgctagaatgggatggttaaataggatgacccaatttaaagaaaaagctgggaaagataaagagaaagcaagtatcggtctttattcgtatcctgttttaatggcagctgatattttattatacgactcaactcatgtaccagttggagatgaccaaaaacaacatttggagttatgtcgcgatatagctcaaaaatttaacaatgattataaaattgaaaatttttttaaggtccccgaacctttaataaaaaaagaattttcaagaattatgagtcttaaagatggtcttaaaaagatgagtaaatcagaggtatcagacttgagtagaataaatttaaccgatgataaagatcaaataataaacaaaattaaaaaagcgaaaaccgatactttagctttaccaagcaaaattgaagaattagaaaaaagacctgaggcaaaaaatttgataggtatttattcaagtttggtgaataatacactccaagagtcgattgatgaatttgctggaaaaaatttttctgaattcaaagaaaaattgtcagaaatagttgtaaatgaaatcaatccaatttcacaaagaattaatgagttattaggtgataaagtttttttagaaaaaatacttaaagatggatacgagagagccaatgaaattgcctcaaaaaaaataaaaaaaattcacgaaattgtaggtttttgag

SEQ ID NO: 301137 - DNA, 877 bp, Unknown
  Bacterial polypeptide expressing nucleotide sequence isolated from the Sargasso Sea
cctgggcaactacgccggcgccatccgtccggccatcgttgccagccgcgacccgcagatggactctttctacttcctcgccgactaccacgcgctgatcaagtgcgatgatccggcgcgcatccagcgctcgcgcctggaaatcgcagccacctggctggcgctggggctggataccgacaaggcgaccttctaccgccagtccgacatccccgagattcccgaactgtgctggctgctcacctgcgttgccggcaagggcctgctcaaccgtgcccacgcctacaaggcttcggtggacaagaacgtcgaacagggcgaagacccggatgccggcgtgaccatgggcctgttcagctacccggtgctgatggcggcagacatcctgatgttcaacgcgcagaaggtgccggttggtcgcgaccagattcagcatgtggagatggcccgtgacatcggtcagcgtttcaaccacctgttcggcaagggcaaggacctgttcgtcctgcccgaggtggtgatcgaggaggaagtggccacgctacccggcctcgacgggcgcaagatgagcaagagctacgacaacaccatcccgctgttcggcactggcaagcagctcaaggacgccgtggcgcgcatcgtcaccgactccaggttgccgggtgagcccaaggatgccgagggttcgcacctgttcaccctgtaccaggccttcgccagccacgcgcaacaggccgagttccgcgccgagctggaaggtggcctggcctggggcgaggcaaaaaaccgtctgtaccagttactcgaagacaccctgggcgaggcgcgcgagcgctacaacgcgctgatcgccaagccggccgatctggaggacatt

SEQ ID NO: 301138 - DNA, 373 bp, Unknown
  Bacterial polypeptide expressing nucleotide sequence isolated from the Sargasso Sea
atgggaaaaaaaattttttcaggtgttcaacccactgggaatcttcatttaggcaattatttaggcgctatcaagaattttgtagatttaagcaacgaaaatgacaatgagtgtattttttgtgtagtagatctccacgctattaccgtaaatcaagaccctaaagaatttagaaataatattcacgaaactgttgcaacttttattgccagtggaatagatccaataaaaaatattatttttaatcaatctcaagttagtgcacattcagaggctgcatggattttaggctgtattgctagaatgggatggttaaatagaatgacacaatttaaagaaaaagcagggaaggataaagaaaaggctagtatag

SEQ ID NO: 301139 - DNA, 862 bp, Unknown
  Bacterial polypeptide expressing nucleotide sequence isolated from the Sargasso Sea
aatgaaaaaaagaattctaacaggaataacaacaacaggcatacctcacattggaaattatatcggtgctattagacctgcattagaactagctaatgaatctgatgaatcatttttctttttagccgattatcattcaataataaagaatcaaaatatagaggaaataaaacactctgttgaaaatgttgccttagcatggctttcttctggtttagacccaaagaaaacatatttttatagacagtctgatgttccagagatacttgagttaagttggatattaagttgtgtaactgcaaaaggattaatgaatagagcacatgcctataaggctgcaagttcaattaacactgatgatcctgataagggaataacaatgggcttattttcttatcccgttttaatggctgctgacattttaatgtttgattcaactcatgtgccggttggatctgatcaaatacaacatttagaaatgactcgtgatattgcagcaagatttaatcatctttttaaaccattattaacattacctgaaccaattattcaaaaaaatgaaaacgtagttttaggtacagatggaagaaaaatgagtaaatcatatgggaatgttattcctttactagaaagtgaaaaaaatcttaaaaaatcaattatgaaaatagttacaaattcacttgagccaggtgaacccaaagattcaataaattgtaccgtttttgaactatataaaaattttgcagcagaatcagaaatacaatctatgcagcaatcttatgatgatggaatttcctggggcgaggctaaagagatattatttaatttagtgaatgaagagcttcaaccaattagatcaaaa

SEQ ID NO: 301140 - DNA, 770 bp, Unknown
  Bacterial polypeptide expressing nucleotide sequence isolated from the Sargasso Sea
ccaaagccaagtcacgcaacatgctgaactggcatggatttttaattgtgtctcccgacttggctggctgaaccggatgacgcaattcaaggataaggcgggcaaggatcgcgagaatgcgtcggtaggcctctatgcctaccccaatctcatggcgtcagacattttactttataaagcggatggcgtgcccgtcggtgaggatcagaaacagcacctggaactcagccgggatattgctcagaagttcaacaacgattttggtgtggatttttttcctctgcctgaacctttaattttgggtgaggcaacaagggtgatgtcgttgagagacgggacaaaaaaaatgagtaaatccgacccttcggaagcgtctcgaataaacatgaccgatggtcccgacgctattgctaaaaagatccggaaagctaaaacagatccggaagatttgccgggcgaccccaaggatttggcaggcaggccagaagccgcaaatttgttcggaatatatgcagcactgtcggaccagagcctggccgatgtttgcacgcaatttgatggtgcccagttttctgcgttgaaggttgacctcacggaactcgcggtttccgttcttggacctattggtaatgagatggctcgaatgatgagagatccggcttatttagatggtgtcttatccacgggctcagagcgcgcgcgcgccatcgcggcgcctatattaggcgatgtttacgacatcgttggcctccttcggtcgcaatcttaaa

SEQ ID NO: 301141 - DNA, 784 bp, Unknown
  Bacterial polypeptide expressing nucleotide sequence isolated from the Sargasso Sea
atgactaaaaaaaaattagtattttcaggcgttcaaccaacaggtaatcttcatttaggaaattatttaggtgcgcttaaaaactttgtttcattacaaaaagagatggaatgtatttattgtgttgttgacttacacgctataaccgtttttcaagatcccaatcacttgcacaaaaatgtgttagaaactacggcgagttttttagcaactggtttagatcctaataaaagtataatttttaatcaatcttcagtttctggtcacgcagaactcgcttggattttaaattgtgtttcaagaattggttggttaaatcgaatgacacaatttaaagataaagcaggatcagataaagaaaaggctagtgttgggctttatatataccccaatctcatggctgcagacattttaatttataaggctacccatgttccagttggggcagatcaaaaacaacacttagaattatctcgagatatcgctcagaaatttaataaagattttaattgcaaagatttctttcctttaccagaaccattaattcctaaaaacatttcaagagttatgagtttaagagatggaactaaaaaaatgagcaaatcagaagagtctgattattcaagaataaatttaaaagatacagctgacgaaataaataaaaaaataaaaaaagctaaatcggattcagactcaatacctggagatataaaatctcttgaaaacaaaccggaggctttaaatctactaactatttattccgagttaactcaaaatagttaga

SEQ ID NO: 301142 - DNA, 826 bp, Unknown
  Bacterial polypeptide expressing nucleotide sequence isolated from the Sargasso Sea
atcttggagcattaaaaatttcgtttctttacaaaaaaaaatggaatgtatttattgtgttgttgatttacatgcgataacaactttccaaaatcctaaaatactaaaatccaatattcttgaaactaccgcaggatttattgcttcaggactcgatcacgaaaacagtattatatttaatcaatcttcagtgagcggacatgctgaattagcttggattttaaattgtgtttcaagagttgggtggcttaatagaatgacacaatttaaagataaagctggaacagacaaagaaaaagcaagtgtcggtctttatatatatcccaatctaatggccgcagatatattattgtataaagctacacatgttccagtaggcgctgaccaaaaacaacatatagaactttcaagagatatagctcaaaaatttaataatgattttcaagttgaaaatttttttcctttacctgagcctttaataccaaaaaaaatttccagaatcatgagcttaagagacggaacaaagaaaatgagtaaatcagaagaatcagaatattcaagaattaatcttaaggacgatgcagatgaaattgtaaaaaaaataaaaaaagcaaaaacagactctgaacctataccgtcaaacgaagtagagcttaataaaagacccgaagcattaaacttgataactatttattcagatctgactaacacaccagtaggggaagttttaaaacaaatgtccgggaaagactttacacatcttaaaaaaaatttatcggatgcacttgtagaaaaaatatgtccgataggcaaagaaataaaaaaa

SEQ ID NO: 301143 - DNA, 788 bp, Unknown
  Bacterial polypeptide expressing nucleotide sequence isolated from the Sargasso Sea
aagcggaatagatccaaaaaaaagcattatatttaatcagtctgcagtttctgcgcactcggagggagcttggattttaagctgtatagctaggatgggatggcttaatagaatgacacagttcaaagaaaaagctggtaaagataaagaaaaagcaagcgtaggattatactcatacccaattttaatggcctctgatattcttctgtatgattcaactcatgtccctgtgggagatgatcaaaaacaacatttagaattatgtagggacattgctcaaaaatttaatttagatttcaatgtacctgactttcttaaagtacctgagcctattattcagaagtatttttcgagaataatgagtttaaaagacggtaccaaaaaaatgagcaaatcagatccatcagatttaagtagagtaaatcttactgatgacaaggacgttattaaaaataaaattaaaaaagcaaaaactgattctttacccattagtgaaaaagacatagagaaaagatttgaagcaaaaaatttgcttgaaatttactctagtcttgcagaaaagaaaattgaagatacaataaatcaatttgatggaaggaatttctctgaatttaaagaaaaattatctgatattatggttgaaaaaataagtcctatttctttggagattaacaaacttttaaatgataaaaaatacttggacaaaattttaattgaaggtatagaaaaagcagataagattgctaataaaaaaatattagaaatgaaaaaaattattggattttaaa

SEQ ID NO: 301144 - DNA, 665 bp, Unknown
  Bacterial polypeptide expressing nucleotide sequence isolated from the Sargasso Sea
tatgaaaacagttttttctggtatacaaccaagtggcctagtgcatctaggcaatttacttggtgcgataaataattgggttaagctatcaaatgaaaacagtaaaaattacttttgtattgttgacctacattcattaacaggactaccaaataaaaatgatcttaaaaaaagtataaatgatactttaaaagtacttgtagcttccggaattaatactaaaacttcggtcatatataaacaaagcaatcttcaggaacatgcttatctttcttggatactgtctaatttttgccaagtaggagagctacaacgaatgactcagtttaaagaaaaggcttcttcttttggcacgcattcgggtttattgacatatccaatcttgatggcttctgatattttaatacacaaagctaacgaagttcccgtaggagatgatcaaactcaacaccttgaattaactagaaatatagcagagcgttttaatgcaaattatggccaaatatttccaatccctgaaaaaacaagtggaaaatcaggtgctcgtttgatgtctttaaggcatccagaaaataaaatgtctaaaagctctgatgatataaatggaactatttactttaatgatgaaaaagacaacatattaaaaaaatttaaatcctcagtta

SEQ ID NO: 301145 - DNA, 832 bp, Unknown
  Bacterial polypeptide expressing nucleotide sequence isolated from the Sargasso Sea
ttttagaacggttgctagttttgttgcatcaggattaagtacagaaaaaaatattatatttaaccaagctagcgttgcagcacatagcgaactagcctggatttttaattgtgtttcaaggataggctggatgaatcgaatgacacaatttaaagaaaaggccggatcaaataaagaaaatgctagtgttggcctgcttgtttatccaaatttaatggcagccgatattcttatttacaaagccacccatgtgccagtaggcgaagatcaaaaacaacatttagaattaacaagagatatagcaaaaaaatttaataatgattttaaatgtaaagatttttttccaatagtagaaccattaatatcaaaagatataccaagagttatgagtttaaggaacggaaaaaagaaaatgagcaagtcagacgattctgactatagcagaattaatttaaaagatgataaagatttaattaatctaaaaattaaaaaagctacaacagatgcagactcaattccttctgaaatttctggtttaaaagatagagccgaagcaaaaaacctattatcaatatatgcaagcataaacaaaactaatttggaaaaagttttaaaagattttggaggtaaaaatttttcaactcttaagagtagtttaagtgagacaataatagaaaaaatttgccctataggaaaagaaattacaaaattattgcaagatgaaaaatatttaacaacaattctaaaaaagggtacaaataaagcagatttaattgctaaagaaaatataaaagaaatttacaacttaataggtctaacaaagttcacttga

SEQ ID NO: 301146 - DNA, 325 bp, Unknown
  Bacterial polypeptide expressing nucleotide sequence isolated from the Sargasso Sea
tatgagtaaaaaaattttttctggagttcagcctaccggaaatcttcatcttggaaattaccttggtgcgataaaaaattttgtaaattttcaaaatcaaactaatacagactgcatttattgtgtagtagatttacacgcaattacagtaaaacaagacccagttagattaaaagctaacattagagaaaccacagcggcatttattgctagcggtcttgatcacaaaaaaagtataatttttcaacaatcaatggtcgctgcacattctgaattttcttggattttagggtgttctgcgagaatgggttggttaataggatga

SEQ ID NO: 301147 - DNA, 1036 bp, Unknown
  Bacterial polypeptide expressing nucleotide sequence isolated from the Sargasso Sea
aatgagtgacgctgtgcaatctgaagcaataggtaaattcaagaagcgagttttttctggagtgcagccatctggtggattgacccttggtaactacttgggtgcaatcaaacgatttgtccagatgcagaatgacgattacgaaacaatttattgtgtagttgacctccatgcgattaccgtttggcaaagtccaaaagtgctcaggcaaaatataagggagttagcggcttcctttattgcatcaggactcgatccaaataaatctatattatttaatcaatcggcagtacctgaacatgctcagttaggctgggtctttaactgtgtggctcgcatgggctggatgcaaagaatgacacagtttaaagataaagccgggaaaaatgctcagaatgcatcgctaggtctatttggttatcctgcgctaatggcagctgatattttagcttatcatgcgactcatgttccagttggcgatgatcagaagcagcaccttgaacttaccagagatatagccataaaattcaatcatgattatgaaattgatttttttccggtgactgagcctgttattggaggaccagcagctcgagtaatgagcctgcgtgacggtacaaaaaaaatgtctaagtctgacccttcagatttaagtcgaataaacatgacagacaactcagatatgattgctaataaaattagaaaagcaaaaacagatcaatatggccttccgtccgaaccaaaaggtctggaagggagagctgaagcacagaatttagtatcaatatacgcagcactcggagatcaaagcgtggaaagcgttttaagcgaaattggcggaaaacaattttcagattttaaacctatgttggtagagagagctaccgcagtactgtcaccaatttccagtgaaatggatcgcattttgcaggatatacctcagttagacaaagtgttgagtgatggcgcatttaaagctaaatccgtagccaaaccaattttgaaaaaaacgttcgatatcataggtttgaattag

SEQ ID NO: 301148 - DNA, 898 bp, Unknown
  Bacterial polypeptide expressing nucleotide sequence isolated from the Sargasso Sea
tatgtctaaaaaaattttttctggagttcaaccaactggaaatttacatcttggcaattacataggtgcaataaagaattttgttgatttacaaaacaataaagataatagctgtattttttgtgtcgttgatcttcatgccattactgtaatgcaagatccgatagagttaaaaaataatattagagaaacagcagcagcatttatagcaagcggtattgatccaaaaaaaagtataatatttaatcagtctttagttcctgcacattccgagggctcttggattttaggatgtgtagccagaatgggatggcttaatagaatgacacaattcaaagaaaaggccggaaaagataaggaaaaagctagtgttggtttatatatttatccaattctaatggcctctgatattcttttatacgacgctactcatgtgccggttggagatgatcaaaaacaacatttagaactctgtagagatatagctcaaaaattcaataacgaatataaatgtccagattttttaagacctcctgaacctctaatccaaaaacatttttcaagaataatgagtttgaaagatggttcaaaaaaaatgagtaagtcagatattgctgaaggaagtaggattaatctaacagataacgaggatcaaattattaataaaataaaaaaagcaaaaacagataatgatactttacctggaaaagaagatggacttaaaggtagagctgaagcagaaaatttgatgggtatttactcaagtttaagcaatcaaaatattactgatacattaaatgaatttgagggaaaaaatttttctgaattaaaaaataaactatctgaaataattgttaataaactatcacctatatcaaaagaaatacaaaaattattg

SEQ ID NO: 301149 - DNA, 535 bp, Unknown
  Bacterial polypeptide expressing nucleotide sequence isolated from the Sargasso Sea
ttgaacagtaaaaaaattcttacaggtataacgactaccggtacaccgcatctaggaaactatgtaggtgcaataagacctgcaatagcttcttcaaaggagcaagatcatgattccttcttctttctagcagattaccatgcattgattaaaagcaaagattgtgaaggattgaggcaatcatgcttagaggttgcggcaacatggatagcatctggtcttgacattgatcacacctatttttatagacaatcggatattccagaaatattagagttaaattggattcttagtaattttacagcaaaaggtcttatgaatagggcgcatgcatacaaagctgctgttgatggaaatattgaatacaatgtatctgaacctgataagggaattactatggggcttttttcataccctgtcttaatggcagcagatattcttatgttcaatgccactcatgtgcctgtgggacaagatcaggttcagcatattgagatgacaagaggtatagcgcaacgctttaatcatcattacg

SEQ ID NO: 301150 - DNA, 1003 bp, Unknown
  Bacterial polypeptide expressing nucleotide sequence isolated from the Sargasso Sea
catgagtaaaaaaattttttctggagttcagcctactggaaatcttcaccttggaaactatcttggcgccataaaaaattttgtaaattttcaaaatcaaacaaatacagattgcatttattgtgtggtagacctacacgcaatcacagtaaaacaagacccaggtaaattaaaagctaacattagagaaactactgcagcatttattgcaagcggtcttgatcacaaaaaaagtataatttttcaacaatcaatggtcgctgcacattctgaattttcttggattttaggatgttctgctcgaatgggttggttaaataggatgacgcaatttaaagaaaaggctggaaaagataaagagaaagcaagcgttggtttatatgtttaccctgttctaatggctgcagatatattactttatgatacaacacatgttccagttggtgaagatcaaaaacagcatttagaattgacaagagacattgctcagaaatttaatttagacttcaattcaaatgatttcttaaaaataccagaacccatgattcaaaaggagtttgctagaattatgagtttaaaggatggaaccaaaaaaatgagcaaatctgatccctcagaaatgagtaggataaatttaaatgatacaaaagaggaaattgagaataaaataaaaaaagctaaaactgacactttggctttgccagataacattaaggaattagaaaataggcctgaggctaaaaatttacttggaatttattcttcattaaataatcaagaaattaacaaaacaatcaaagaattttcaggaaagagtttttctgaatttaaaaaaaaactctcagaaatagcaattgaaaaaatttacccaatatctcttgaaatgagcaagataaaaaaagattttacttttattgatagtgttttaacagatggaaatgttaaagctgatacaatttcatcaaaaaaagttagtgagataaagaaaattattggtttttaa

SEQ ID NO: 301151 - DNA, 894 bp, Unknown
  Bacterial polypeptide expressing nucleotide sequence isolated from the Sargasso Sea
aatggaaaaaattacaaaaagaattttatcaggtgttcaaccctcaggtgatttacatttaggaaattatcttggtgcaattaaaaattttgtctccctacaaaaagaatttgaatgttttttttgtgtagttgatttgcacgcaattaccgtttggcaagacccaaaaattttaaaacaaaaaacaagagaggtcgcagctgcatttattgcctcaggaattgacccagataaaaatacactttttgttcaatcccaagtacctcagcatgctcaattagcttggattttcaattgtgttgcacgtatgggatggcttaatcgtatgacacaatttaaagacaaggctggaaaaaacagtgaaaatgtatctgttggattattttcatatccaactttaatggctgctgatattttaatatatttagctacacatgttccagttggagaagatcaaaaacaacatttagagttaactagagacattgctcaaaaatttaataatgattttaaaactgatatttttccaataccggaaccgttgattttaggtgaggcaacaagagtaatgagccttagagacggccttaagaaaatgagtaaatctgatccatctgattattcaagaataatgttatctgatagtgaggatgaaatagttaaaaaaattaaaaaagcaaaaactgatcctctccctttacctgataatttagatgatgctaaaaatagacctgaagctataaatttattaaccatttatgctgctctcagtgatcaagaaatcggaacagtaatttctgaatatggcggcaaagaattttcacaatttaagaacgatttaggggaactagcatctactaaattatcacctatttcagttgagatgaataaatt

SEQ ID NO: 301152 - DNA, 1018 bp, Unknown
  Bacterial polypeptide expressing nucleotide sequence isolated from the Sargasso Sea
atgacaaataaaaaaaggattctttctggagttcaacctacaggagatttacatattgggaattggcttggagcaataaacaattgggttgaactccaagagaagcatgaaacatttctttgtgtagttgatttacatgcaattactacagaatatgaccccaagcaactttctaaaaatacactttccactgcagctttatatgttgcttgtggtatagatcctaatatttgttctatttttgttcaaagccagatatctgcacattcagaactttgttggatattaaattgcatgactccgataaattggatggaaagaatgatccaatttaaggaaaaatctgttcagcaaggtaataatgtttctattggattatttgattatccaatcttaatggctgctgacattttgttatacgatgctgattatgttccagtaggggaagatcaaaaacaacacttagaacttgccagagatattgcacaacagagaattaatgccaaatttagtaaggaagaaaacatattaaaaattcctcaaccaataattatgaaaaaaggttcaaagataatgagcttaaatgatggatcaaaaaaaatgagcaaaagtgacattaacgagggtagtcgaattaatttgttagatactcctgaaataattacaaaaaaaataaaaagagctaaaagtgatagttatatgggaatggaatttaataatcccgagaggcctgaatccagaaatcttttaatgatttattcattattaagtggtaaagaagtttctgaattagagaacgatttttcacaaacaggatgggggacatttaaaaaaatatttacagaacaaatagtagaatcgcttaaacctattcaggaaagatatcatgttctgattaacgatccatatgagttaaataagatccttatcaatggtaaagagaacgctgaagcagtggcaaataaaacccttagtagaattaaatctgaattaggattctttgaaatagagaaataaa

SEQ ID NO: 301153 - DNA, 760 bp, Unknown
  Bacterial polypeptide expressing nucleotide sequence isolated from the Sargasso Sea
atggcaaataaaaaaagaattctttctggagttcaaccaactggtgatttacatattgggaattggcttggagccataaataattgggttacgcttcaagagcaatatgaaacatttctatgtgtagttgatttgcacgcaatcacagcttcatataatcccaaagaattgtctcggaacactatctctactgcagctttgtacgttgcttgtggaatagatcctaatatatgctcaatttttgtccaaagtcagatttctgcgcattcagaactttgttggatattaaattgcatgaccccaataaattggatggaaagaatgattcaattcaaagaaaaatctatacaacaggggaataatgtatccattggattatttgactatccgatcctaatggctgcagatattctgctatacgacgctgactttgtaccagtaggtgaggatcaaaaacaacatcttgaacttgccagagatattgcacaacagagaattaatgccagatttagtaaggacaaaaacattttaaaaatccctcaaccaataatcatgaagaatggatcaaaaataatgagtttaattgatggttcaaaaaagatgagcaaaagtgatcctaatgaaggcagtcgtattaacttattagatgctcctgaagtaataacgaaaaaaataaaaagagcaaaaagtgacagctctattggaattgaatttaacaaccccaaaagaccagaatctaagaatcttttgatgatttatt

SEQ ID NO: 301154 - DNA, 670 bp, Unknown
  Bacterial polypeptide expressing nucleotide sequence isolated from the Sargasso Sea
atgactaaacctatcgtattgagcggggcccaaccgtcgggccagctgaccatcggcaactacatgggggccctgcgtcagtgggtcaacatgcaggatgacttcgactgcctctactgcatcgtcgatctgcacgccatcaccacccgccaggatccggctgccctgcgcaaggcctgcctggacgccgccgccctctatctggcggtcggcatcgatccggccaagagcaccgtgttcatccagtcccacgtgccgcagcacgccgagcttggctggatcctgaactgctacacccagatgggcgagctgtcgcgcatgacccagttcaaggacaagtccgcacgtttcgagaacaacgtcaacgtcggcctgttcggttatccggtgctgatggcggccgacatcctgctctatcaggccaatcaggtgccggtgggcaacgatcagaagcagcatctggagctgacccgcgacatctgcacccgcttcaacaacctctacggcgaggtgttcaccctgccggagcccttcattccgaccgaaggcgcccgggtgatgagcctgcaggatccgaccaagaagatgtccaagtcggatgacaacgaggccaaattcatcggcctgctggaagatcccaagcagatcgtcaagaagatcaagcgcgcgg

SEQ ID NO: 301155 - DNA, 1006 bp, Unknown
  Bacterial polypeptide expressing nucleotide sequence isolated from the Sargasso Sea
atggcaaataaaaaaagaattctttcgggagttcaaccaactggtgatttacatattgggaattggcttggggccataaataattgggttacgcttcaagagcaatatgaaacgtttctatgtgtagttgatttgcacgcaataacagcctcatataatcccaaagaattatccaataacactatctctactgcagctttatacgtcgcttgtggaatagatcccaaaatatgctcaatttttgtccaaagtcagatttcagcacattcagaactttgttggatattaaattgcatgaccccaatcaattggatggaaagaatgattcaattcaaagaaaaatccatacaacaagggaataatgtatctattggattatttgactatccaatactgatggctgcagatatccttctttatgacgctgacttcgtaccagtaggtgaggaccaaaaacaacatcttgaacttgcaagagatattgcacaacaaagaattaatgccagatttagtaaggataaaaatattttaaaaatccctcaaccaatcatcatgaagaatggttcgaaaataatgagtttaattgatggttcaaaaaagatgagcaaaagtgatcctaatgagggcagtcgcattaacttattagatcctcctgaaataatcacaaaaaaaataaaaagagcaaaaagtgacagttctattggaattgaatttaataaccctgagaggccagaatctaaaaatcttttgatgatttattcaatattatctggcaaagaaatttctcaatgtgaaaatgaattctcagaggctgggtgggggacatttaaaaaattaattactgaacaacttattgaatcactagaacctattcagaaaaaatataaattattaattaatgatccctatcaactaaataaaattcttgatgaagggaaagaaaaagctgaagatctagcaaatcagactttaaaaagagttaaatcaaaattgggattcttttaaa

SEQ ID NO: 301156 - DNA, 1009 bp, Unknown
  Bacterial polypeptide expressing nucleotide sequence isolated from the Sargasso Sea
atgaacaccaacccgaccattcttaccggcgatcgccccaccggccagctgcatctcggccactacgtgggatcgctacgtcagcgcgtgcagcttcagcacgatcatcaacagtttatcctcatcgccgatctgcagggattaaccgataacggcagcgacccacagaaaatcagcagcaatatctttgaggtgatggccgattatctggcggtaggtatcgacccgcacaagaccacgatttgcctgcaatcggcgcttcccgccctggcggagctgagcgcgctgtatatgaatatcgtcaccgtcgcccgcgtcgagcgtaacccgacggtcaaaagtgaaatcgcccagaagggattctcccgttcactaccggtcggttttctggcctaccccatcagccaggcggccgatatcaccgcgtttaaggcgggtctggtgccggtcggcgacgatcagctgccgatgatcgaacagaccaatgagatcgtccataaaatgaatagcctgaccacgacgccggtactgcagcactgtcgggcgctgctcagcgatgtcagccgcctgcccggcattgacggcggcgccaagatgtcaaagtcgctgggcaatacgctcacgctctcggccagcgaagagcagattcatcgtgcggtcggcgcaatgtataccgacccgacccatctgcgggtcagcgatcctggccaaatcgaaggcaatgttgtctttacgtacctcgatgctttccatcccgaccctgccttcgtcgccgagatgaaggcgcattatcaacgcggcggactgggtgaccgacagtgcaaaaacgcgctggaggagtgtctgcagacgctgctggcgcccattcgccaacggcgggcaacgtatattgcggataaaggaatgttgctggagttgctgcgccagggtagcgagcgggcgcatcgtctcacgcagcaaacgttgcatgaggtgatgcgcggattaggattgccggttctgttctgag

SEQ ID NO: 301157 - DNA, 1018 bp, Unknown
  Bacterial polypeptide expressing nucleotide sequence isolated from the Sargasso Sea
gatgtcaaataaaaaaagaattctttcaggagttcaaccaactggcgatttacatattgggaattggcttggggccattaataattgggttacgcttcaagatcaatatgaaacatttctatgtgtagttgatttgcacgcaatcacagcttcatataatcccaaagaattatctcagaacactatctcaactgcagctttgtatgtcgcttgtggaatagatcccaatatatgctcaatttttgtccaaagtcagatttctgcacattcagaactttgttggatactaaattgcatgaccccaataaattggatggaaagaatgattcaattcaaagaaaaatccatacaacagggaaataacgtatctattggattatttgactatccgatcctaatggctgcagacattcttctatatgacgctgactttgtaccagtaggtgaggatcaaaaacaacatcttgaacttgccagagatattgcacaacagagaattaatgccagatttagtaaggataaaaatattttaaaaattcctcaaccaataatcatgaagaatggatcaaaaataatgagtttagttgatggttcaaaaaagatgagcaaaagtgatcctaatgagggcagtcgtattaacttattagatgctcctgaaataatcacaaaaaaaataaaaagagcaaaaagtgacagttctattggaatagaatttaacaaccctgagagaccagaatctaaaaatcttttgatgatttattcaatattatctggcaaagaaatttctcaatgtgaaaaagaattctcagaaactggatggggaacatttaaaaaattaattacggaacaacttattgaatcacttgaacctattcagaaaaaatataaattattaattaatgatccctatcaactaaataaaatccttgatgaaggaaaagaaaaagctgaagatttagcaaatcagactttaaaaagagttaaatcaaaattaggattctttgaaatggagcaataa

SEQ ID NO: 301158 - DNA, 1009 bp, Unknown
  Bacterial polypeptide expressing nucleotide sequence isolated from the Sargasso Sea
atggaaaagccaacaaatagaattttatctggtgtgcagccatcaggagatctacatttaggaaactatcttggagcaataaaaaattttgttagtttacaaaaagattatgaatgttttttttgtgttgtagacttacacgcaataacagtttggcaagagccaaaggttctagcaagcaaaactagagaagtaactgctgcctttattgcttcgggcatagatccaaataaaaataatatttttgttcaatctcaagttcctcaacatgctcaattagcttggttatttaattgtgttgcaagaatgggttggttaaatcgcatgacacaatttaaagataaagcaggtaagaatagtgaaaatgtatcggtaggacttttttcatatccaactctaatggctgcagatattttaatctacttagcgactcatgttccagttggagatgatcaaaagcaacacttagaacttacaagagatatagctcaaaaatttaataatgactttaaggtagatttatttccaattcctgaacctttgatttttggagaagctacaagagtgatgagtttaagagatggatcaaaaaaaatgagcaaatcagatccatcagattattctagaataatgttaactgatactgctgaaaatattatacaaaaaattaaaaaagctaaaactgatccgcaaccactaccacaaaatattgatggtttaagtagccgaccagaagcagaaaatttaatttcaatatttgcttctttgcaggatgtctctattgaaaaagtaatatcagaatattcaggaaaggaattttctatttttaaaaaagatttggctgacttagctgtgtctaaattagaacctataaccgtagaaatgaataaattgatgaatgatatttcttacatcgattctgttttaagtattggaaaagagaaggctaaacaggtagctgaaccagtattagcaaaaactaaagaaattattggttttttatcctaat

SEQ ID NO: 301159 - DNA, 580 bp, Unknown
  Bacterial polypeptide expressing nucleotide sequence isolated from the Sargasso Sea
aatgaaaaaaaaaattttttctggtgttcagccaactggaaatttacatttaggaaattatttaggtgcaatcaaaaattttgtcgctttgcaaaatgaaaaagataatgaatgtgtatattgtgtcgtagatttacatgcaattactgttaaacaggatccaaatattttaaaggataatataagagaaacaacagcagcttttcttgctagtggattggattataaaaaaagtataatttttaatcagtctctagtgcccgcacattcggaaggatcgtggattttgggatgcattgcaagaatgggatggttaaatcgtatgactcaatttaaagaaaaagctggcaaagataaagaaaaagcaagtgttggtttatatatatatccaattcttatggctgctgatattttattatatgactccacacatgtgcctgttggggaagaccaaaaacaacatttagaattatctagagatattgctcaaaagtttaatttagattttaaagctcctgatttccttatagcaccagaaccattaattcaaaaaaatttttctagaattatgagtttaaaa

SEQ ID NO: 301160 - DNA, 1003 bp, Unknown
  Bacterial polypeptide expressing nucleotide sequence isolated from the Sargasso Sea
tatgggcaaaaaaatattttcaggtgttcagcctacgggcaatcttcatcttggtaattatttaggggcgattaagaattttgttgaactaaacaatgatgactcaaatcaatgttttttttgtgtagtggacctacatgcaataacagtcaaacaagatcccaaagagttaaaaaaaaatattagagagactgttgcaacatttattgcaagtgggatagatccaaaaaaaagtattgtttttaaccaatcaggtgtagcagcccactccgaaggtgcctggattttaagttgtgtagctcgtatggggtggctaaatagaatgacacaatttaaggaaaaagctggaaaggataaggaaaaagctagtattggattgtattcttatcctgttcttatggcagctgacattttgttatatgatgcttcccacgttcctgtaggagacgatcaaaagcagcacttagagttatgcagagatatagctcaaaaatttaataatgattttggtgtagagggctttttaaaagttcctgagcctttaattcaaaaggagttttctagaattatgagtttaaaggatggatcaaaaaaaatgagtaaatctgagttatcagatttaagtagaataaacttaactgatgataaggatcaaattatcaataaaattaaaaaggctaaaacggatcctttaccaatgcctaaagatataaaagaacttgaaaataggcttgaagctcaaaatttattagggatttatgctagtttaagtaactcaactttagagtcttccatagcaaattttgtgggcaagaacttttcagaatttaaaaatgaactatcagagttagtagttaataaaattattccaatatctaaagagataaaaaaattactcaatgaccaatcatatcttgattctattcttctagatggagttgaacatgctgaaaaaattgcgtcaaaaaagatgaaaaatataaaagaaatagtaggtttttaa

SEQ ID NO: 301161 - DNA, 826 bp, Unknown
  Bacterial polypeptide expressing nucleotide sequence isolated from the Sargasso Sea
cctggacgccgccgccctctatctggcggtcggcatcgatccggccaagagcaccgtgttcatccagtcccacgtgccgcagcacgccgagcttggctggatcctgaactgctacacccagatgggcgagctgtcgcgcatgacccagttcaaggacaagtccgcacgtttcgagaacaacgtcaacgtcggcctgttcggttatccggtgctgatggcggccgacatcctgctctatcaggccaatcaggtgccggtgggcaacgatcagaagcagcatctggagctgacccgcgacatctgcacccgcttcaacaacctctacggcgaggtgttcaccctgccggagcccttcattccgaccgaaggcgcccgggtgatgagcctgcaggatccgaccaagaagatgtccaagtcggatgacaacgaggccaacttcatcggcctgctggaagatcccaagcagatcgtcaagaagatcaagcgcgcggtgaccgactccgacgagccggcggtggtgcgtttcgatccggagaacaagccgggggtctccaacctgctgaccctgatgtccggggtgaccggccgttccatccccgaactggaacagcatttcgaaggcaagatgtacggtcatctcaagaccgaaaccgccgaggccgtggttgccctgctggagccgattcaggcccgtttccacgagctgcgtcaggatgaggctcatctgcaggccattttggcggccggtgcacaaaaggcgcgggaaagggctgaaaaaaccctggccagcgtatatgatgtagtcggcttcgttcctcgagcctga

SEQ ID NO: 301162 - DNA, 1003 bp, Unknown
  Bacterial polypeptide expressing nucleotide sequence isolated from the Sargasso Sea
tatgggtaaaaaaatattttctggtgttcagcctacaggtaatcttcatctaggaaattatttaggtgccataaaaaactttgtagacttaaataaagataaagataataaatgtattttttgtgtagttgatctacatgccattacagtaaagcaagatcctaaagaattaaaaaataatatacaggaaactgttgcaacttttgtagcaagcggaatagatccaaaaaaaagtataatttttaatcaatccagtgtggctgctcatgcagaaggagcatggatattaagctgtgttgctagaatgggctggttgaatagaatgactcaatttaaggagaaagctggtaaagataaagagaaagccagtataggactgtactcttatccagttttaatggcagctgatattcttttatatgatgctactcatgttccagtaggtgatgatcaaaagcaacatttggagttgtgtagagatatagctcaaaaatttaataacgattttgaagtagaaaattttcttcaagttcctgaacctttaattcaaaaagaattttcaagaattatgagtttaaaagatggttcaaaaaaaatgagtaaatcagagttatcagatttaagtagaataaatttaacagataacaaagatcaaataataaataaaataaaaaaagcgaaaactgatcctttgccaatgccgcaagacataaaggagcttgatgaaagattagaagcaaaaaatcttataggaatatattcaagtttaactaattctacattggaaaacgcagtaaaaaattttgcaggtaaaaacttttcagaatttaaagaacaattagctgaagaacttgtgaataaaattgaacctatttctaatgagataaaaaaacttttaggagataaaagttatttagataaaattcttctagatggagttgaaaaagccaatttaattgcatccaaaaagattgaaagaattaaagaaatagtaggtttttaa

SEQ ID NO: 301163 - DNA, 1006 bp, Unknown
  Bacterial polypeptide expressing nucleotide sequence isolated from the Sargasso Sea
atgaataaaaaaaaattagtattttctggagtgcaaccaactggtaatttacatttgggcaattaccttggagctttaaaaaattttgtttctcttcaaaaacaaatggaatgtatttactgtgttgtagatttacatgctattaccactttccaaaagcctagtgaattacaaaataatgttttagaaactgttgctagtttcatatctacaggtttggatccaaataaaagtataatatttaatcaatcctcagttccaggacataccgaattagcttggattttaaattgtgtttcaagaattggttggttaaataggatgacacagtttaaagataaagctggttcagataaagaaaaagcaagtgtaggattatatatttatcctaatctaatggcagctgacattttactttataaagcaacccatgttccagttggagcagaccaaaaacaacatttagaactctcaagagatattgctcaaaaattcaacaacgattttaaatgtaaagatttttttcctattcctgatccattaattccaaagaatgtgtcaagagtaatgagtttaagagatggtacaaaaaaaatgagcaagtcagaagagtcggacttttcaagaattaatttaaaagatgatgcagatgaaataataaaaaaaattaaaaaagctaaatctgactccgaacctattcctgaagatttgagtaatttagaaaaaaaaccagaggctttaaatttaataaatatttatgctgaaattaccaaaaaaagtttagagacagtgattagtgaagtagctggcaaggagtattcatttttaaaaacaaagttatcagaagtccttatcagtgaaatagtgccgataggaaaagaaattaaaaaacttttagatgataaagcttacttgatgaaaattttgaaaaaaggtaaagaaaaagccaatattattgctgaggaaaaccttaaaaatatacgtgaaaaagtgggattgatataat

SEQ ID NO: 301164 - DNA, 1009 bp, Unknown
  Bacterial polypeptide expressing nucleotide sequence isolated from the Sargasso Sea
tatgagtaaaaactttgtaaaaagagtgttatcaggggtgcaaccaacaggtgggttacatattggaaattaccttggtgcgataaaaaactttgttgatatgcaaaatgatggtgagtgccttttttgtattgtagatcttcacgctataacagtttggcaagatccaaaattacttgatatgcaaaaaagagaggttgctgctgcatttatagcatcaggtattgatcctgaaaaaaattcaatatttaaccaatcagaggtcccagaacattcacaacttgcttggcttcttaattgtacaagccaaatgggatggttaaaaagaatgacacaattcaaagataaggcaggtaaaaatcaagaaaaagtaagtgttggattattcacatatcctgttttgatggctgcagatatattagtttacaaagcaacacatgtcccagtgggagatgatcagaaacaacacatagaattaacgagagacatagtaataaagtttaataatgactataaaaaagagatattccctctcccagaaccattaatcttaaaatcaacatcaagagtaatgagtttaaaagacggacaaaaaaaaatgagtaaatcagatccgtctgatttaagtagaattatgttgaccgatgaagatgatgacataagaaaaaagatttccaaagcaaaaactgatgagtttccttttccagataatcctagtgatcttgaaaaacggcccgaagcaaaaaatttgattactatcttttcaggttttaccggaacctcgattgataatttaataacagagtatgcaggaaaaaatttttcacatttgaagtcaaatttatcagaggtagtgatttctggaattaagcctattcgagaagaaatgaaaaaactgcttgaggataaaaaccatttagacaaagttacaaataaaggaactaaaaccgcaagaaccattgctgcacaagttttaaaagaggtgtacgaaacagttggccttaaataa

SEQ ID NO: 301165 - DNA, 1009 bp, Unknown
  Bacterial polypeptide expressing nucleotide sequence isolated from the Sargasso Sea
atggaaaagccaacaaaaagaatactgtccggtgtccaaccatctggtgattttcatttaggaaattatcttggcgccataaaaaattttgttagtcttcaaaaagaatatgaatgttttttttgtgttgttgatttacatgctattacagtttggcaagatccaaaagtgttagcaaataaaacaagagaagtaaccgctgcctttattgcttctggtattgacccaaagaaaaataatatttttgttcaatcacaagttcctcaacatgcacagcttggatggttgttcaattgtgttgcgaggatgggatggttaaaccgtatgacgcaatttaaagataaggctggaaagaatagtgaaaatgtatctgttggtttattttcttatccaactttaatggcggcagatatattaatctatttagcaacgcacgttcctgtaggtgatgatcaaaaacaacatttggagctcactagagatatagcccaaaaatttaataacgattttaagacagatttttttcctattcctgaaccattaattttaggagaggcgacaagagtaatgagtctacgtgatgggtcaaaaaaaatgagtaaatcagatccatctgattattcgagaataatgttaactgatactgcagagaatattacacaaaaaattaaaaaagcaaaaacagaccctgaaccattaccacaagataaaactggtttagaaaaaagaccagaagcagaaaacctaatctcgatattcgcttctttacaagacacatctattgagaatgttattaaagattatgcagggaaagaattctctacctttaaaaaagatttggcagatttatctgtatctaaattagagccaattacgagtgaaatgaataaacttatgaatgatgtttcttacatcgattctattttaaaacagggtcaagataatgctattgcagtagcagaaccagttttacagaaaacaaaagaaattattggttttttaacataaa

SEQ ID NO: 301166 - DNA, 1039 bp, Unknown
  Bacterial polypeptide expressing nucleotide sequence isolated from the Sargasso Sea
ttttttaaattatcaaaatgggaagataagctaattgaatattatgaaaaaaacccagaatctattctccctcaatcaagatataatgaggttttaagttttattaaaggtggtttaaaagatttatcaatttcaagaactacttttaattggggtattaaagtaccagatgctgataaacatgtaatgtatgtttggatagatgctctttgcaattatattacagcattaaattatccaaatacagataatgaatcatttaagaaattttggcctggtattcatgtagttggaaaagatatattaagatttcacgcagtttactggcctgcatttctaatggctgcagatatagagcctccaaaaaaaatctttgctcatggttggtggactaatgaaggtcaaaaaatatctaaatcagttggaaatattattaatccttatgaaatcatagatacgtacggactcgatcaaataagattttttctttttagagaagttccttttgggaatgatggtgatttttcaaaaggggcaattgctcaaagagttaatgctgatttatcaaataattatggaaacttaattcaaagaataacctcatttattataaaaaattctaactcaaaagtatctaagccaacaaattataatcaaatagatataactttaatgaaatcatttgatgaaacattagattcttattttaaaaacatgaaatcttttcagattgataaagctttaaaaaatatttttgactatttatcagaaattaacgcttatgtagatagtcaagcaccttggtctttaaaaaatacagataatcaaagaatgaatgatgttttatatttggtcacattaatgactattaagacatcaattcttttatatccagtaataccttcaagtattgataaagctctaaatatttacaatttaacaattaataatttaaatttaattaactttgatgatttttcacctgaatcaattttcataaataaacccaaaccacttttccctagaattgaattgtgat

SEQ ID NO: 301167 - DNA, 1000 bp, Unknown
  Bacterial polypeptide expressing nucleotide sequence isolated from the Sargasso Sea
aatgaagaaaagaattttaacaggtattacgacaactggtactcctcacatcggaaattatttaggtgcaattaagcctgcccttgatttagtagagccagataatgattcatatttttttcttgcagattatcatgctttgataaaacaaaataatcctaatgaaattgagaaaagtgttaaaaatgttgctctagcatggctttcatcaggtttagatcctgagaaatcgaatttctataggcagtcagatattcctgaggttcatgaactaacatggattttaaattgcagcgcatcaaaaggattattaaatagggctcatgcatataaatcaatggcagctgaaaatactcaaactggaaatgatgaggataaagccattaatatgggtttattttcatatcctgttttaatggctgcagatattctgatatttggtgcaacacatgtgcctgttgggcctgatcaagctcagcacatggagatgactcgtgatattgcaggcacttttaaccacacgtattctaatttattaactttaccagaagctataattcaaaatgaagtatcaatacctggaattgatgggaaaaagatgagtaagtcttataataacattatcccatttctatcatctgaaaaagatttagataaatccatttcaaaaattgttaccaattctttagaaccaggtcagccaaaagatactaaagattgtactctttttcagctatattcgtgttttgctactagtgatgaaataaacgaaatgaatcaagcatacaaggatggtattggatggggtgatgctaagaaaaaattattttcaatcattaattctgaaatttccccaattagagaaaaatattttgaattaaatgacaaaccaaatttattaaatgatttattttctgaaggtgctcaaaaagttcgtcctcaagcaaaagagcttgtcgaaaaattgcgtgaggctgttggcataaataaaattgtataa

SEQ ID NO: 301168 - DNA, 1003 bp, Unknown
  Bacterial polypeptide expressing nucleotide sequence isolated from the Sargasso Sea
aatgagcaaaaaaattttttcaggtgtccaaccaagtggtaatctacacttaggaaattatattggtgcaattaaaaattttgtcgatcttcaaaatcaaaaaaataatcaatgtgtttattgtgtagttgacttacatgcaattacaattaaacaagatccaaaaattttaaaagatagtataagagaaactacagctgcatttttagcaagtggaatagattcaggtaaaagtataatatttaatcaatctcaagtttcagctcatgcagaaggatcatggatacttggttgtattgctagaatgggttggttaaatcgaatgactcagttcaaagaaaaagcaggcaaagataaagaaaaagctagtatcggactatacatttatccaatattaatggctgcagatattttattatatgatgcaacacatgttccagttggagaagaccaaaaacaacatttagaattatcaagagacattgctaacaaatttaatttagaatttaatgttccaaacttttttaaagttccagatcccttaatccaaaaaaatttttcaagaattatgagtttaaaagatggtaaaaaaaaaatgagcaaatctgatccatcagatctaagcagaataaacctaactgatacaaaagaagaaattttaaataaaataaagaaagcaaaaacagatacaatgcctattccaaatgaaataagcgaattaaaaaaaagacccgaagtagaaaatttgcttgggatttattcaagtttaaataatcaaactactgaaaaaaccataaatgagtttaatggaaaaaatttttcagattttaaaaacaatcttgctgaacttgttgtagaaaaaatttctccaatttcattagaaattacaaaattgttgaataatgaggatcatattgaccagattttaaaagaaggtacagaaaaggcaaatgaacaatcatctaaaaaagtaaaagaaatgaaaaaaattattggtttttaa

SEQ ID NO: 301169 - DNA, 976 bp, Unknown
  Bacterial polypeptide expressing nucleotide sequence isolated from the Sargasso Sea
tatgaaaacagttttttctggtatacaaccaagtggtctagtgcatctaggcaatttacttggtgcaataaataattgggttaagctatcaaatgaaaacagtaaaaattacttttgtattgttgacctacattcattaacaggattaccaaataaaaatgatcttaaaaaaagtataaatgatactttaaaagtacttgtagcttccggaattaacactaaaacttcggttatatataaacaaagcaatcttcaggaacacgcttatctttcttggatactgtctaatttttgccaagtaggagagctacaacgaatgactcagtttaaggaaaaagcttcttcttttggcacgcattcgggtttattgacatatcctatcttgatggcttctgatattttaatacacaaagctaatgaagttcctgtaggagatgatcaaactcaacaccttgaattgactagaaatatagcagagcgttttaatacaaattatggtgaaatatttccaatccctgaaaaaacaagtggaaaatcaggtgctcgtttgatgtctctaagacatccagaaaataaaatgtctaaaagctctgatgatataaatggaactatttactttaatgacgaaaaagacaacatattaaaaaaatttaaatcttcagttactgattctgaaaacattgttaggtacgatcctaaaaataaaccaggtattagtaatttgattgaaatttatgctgcagttaatgataaagaaatatctgaaacagaaaaagaatttgaaaattctcaatatggagaatttaaaatagcagttgctgaaacagtaattgactatcttgacccaataaaaaataattttgatgacttaaccagtgataatttagaggatattgttgtatcaaatttaaaatcagcaaaagattctgctcaaaaaacaattattgaagttgaagaagctttaggtataagttga

SEQ ID NO: 301170 - DNA, 1003 bp, Unknown
  Bacterial polypeptide expressing nucleotide sequence isolated from the Sargasso Sea
tatgggtaaaaaaatattttctggtgtgcaacctacaggcaatcttcatcttggcaattatttaggagcaataaagaattttgttgaattaaataatgacaaagcaaatgaatgtattttttgtgtggtagatttacatgctataacagtcaaacaagatccaaaagaactaaaaaaaaatattagagaaactgtagcaacatttattgcaagtggaattgatgcaaaaaaaagtataatttttaatcaatcaggtgttgcagcccattctgaaggtgcttggattttaagttgtgtggctcgtatgggctggttaaatagaatgacgcaatttaaagaaaaagctggaaaggataaggaaaaagctagcattggattatattcttatcctgttcttatggcagctgatattttattatatgatgctacccatgttcctgtaggagaggatcaaaagcaacatcttgagttgtgcagagatatagctcaaaaatttaataatgattttggtatagaggattttttaaaagtacctgagcctttaattcaaaaagaattttctaggattatgagtttaaaggatggatcaaaaaaaatgagtaaatccgagttatcagatttaagtagaataaacttaacagatgataaagatcaaataatcaataaaattaaaaaagctaaaacagataccttaccaatgccgaaagatattaaagagcttgaggggaggcttgaggcacaaaatcttttaggaatttttgctagcttgagtaattcaactttagaaacttccatagaaaaatttgctggcaagaatttttctgagtttaaacaagagctatctgaattattagttaataaaattatgccaatatctgaggagataaaaaaattacttcaagaccaatcatatcttgattctatccttctagatggagttgaaaaggctaataaaattgcgtcaaaaaagattaaaaatataaaagaaactgtaggtttttaa

SEQ ID NO: 301171 - DNA, 1000 bp, Unknown
  Bacterial polypeptide expressing nucleotide sequence isolated from the Sargasso Sea
atgaccaaacccatagtactaagcggtgcacagccgtccggcgaattaaccataggtaactacatgggtgcattgcgtcaatgggttgccatgcaagatagccacgactgcctatattgcgtggtggacttgcatgccattaccgtgcgccaagaccctcaagcattgcgtgaagcctgtttagatacgcttgcactgtatttagcctgcggtgtcgatccaaagaagagcacagtgtttatccaatcccaagtgccacagcacactcagttgggttgggcgttaaattgctacacccaaatgggtgaattgagccgtatgacgcagtttaaggataagtcacaaaagcacgccaacaatattaacgtcggtttgtttggttatcctgtactgatggctgcggatattctgctgtatcaagcaaatgaaatcccggttggccaagatcagaaacaacatcttgaattaactcgtgatatcgcgactcgctttaacaacgcttacggcgagacgtttaccatccctgagccttttatccctgagcatggtgctaaggtgatgtcgctacaggatccgctgaagaagatgtctaagtcggacgacaaccgtaacaacgtgattggcctgcttgaagatccaaaagcggtcatgaaaaagctgaaaaaagccatgaccgacagtgatgagccgccagtcgtgcgtttcgatatggaaaacaagcctggcgtgtctaacctgctgagcttaatgtcgggtatcacaggtcaaagcattgccagcctcgaagccgagtttgaaggcaagatgtatggtcacttaaaaggtgccgcgggtgaagcggttgtgggcatgttagagccactgcaagaacgttaccgtgcactgcgtgccgaccgtgcttacctcgaccaagtgatgaaagcgggcgctgaaaatgcccaagctcgcgccgaagtgacgcttaaaaaggtgtatgagaagattggtttgttagtgtaat

SEQ ID NO: 301172 - DNA, 970 bp, Unknown
  Bacterial polypeptide expressing nucleotide sequence isolated from the Sargasso Sea
atggccaaaatattaactggcattcaatccacaggaacacctcaccttggtaatatacttggagcaattattcctgctgtagatatggcgaattcaactaatgacgagtcgtatcttttcattgccaatatgcattctcttactcaaattaaaaatgaaaaaattctaaaagagaatacattttcaactgcagcaacttggttagcatttgggttagatccagaaaaaacatgtttttacagacagagtgatgtacctgaagtaactgagttagcttggtatttaagttgtttttttccatatcaaagattaaaattggctcactcatttaaagacaaatctgataatttaaaagatgtgaattcgggattattctcttatccaatgttaatgtctgcagatattcttctctatgacgctgacatagtccctgttggaaaagatcaactacaacatcttgaaatgactagagatgtagcatcaagatttaataatttgatgggagaaacatttattatacctgaagctaaaattcaagatgacacaaaatatattacaggaacagatggtgaaaaaatgagtaagtcaaagaataatattatagatatttttgttgatgacaagacactaagaaagcaaattatgaagattgaaactcatagcttatcggttgaagatccgaaaaatcctgaagagtgtaatgtgtttaagttgtatgaagttgtcgcttctacaaatgaaatcgaacaactaaaaaaacagtatttaaaaggagggattggatatggtgagtctaaagaactgttatatgataaaatcctaaatcgtttttcagaaaacagagaaaaatattttgatttattacaaaatagatttaaagttgaagaccttttatcaaaaggatccaaaaaggcaagagtgcaagctcaaaaagttcttaaaagagttaggagtcgccttggtttttagc

SEQ ID NO: 301173 - DNA, 967 bp, Unknown
  Bacterial polypeptide expressing nucleotide sequence isolated from the Sargasso Sea
atgtcaagaatattaaccggtatacaaagtacaggaactcctcatctaggaaatatcttaggagcaattattcctgcaattgaagaatcaaaaaaaaataaagattcttatttattcattgcagatttacactctttaacacaaattaaagatccagttgagctatcagaaaatacttattcaactgctgctgcatggttagcttttggattagacacatcaaatacagttttttataagcaatcagacgttcctacaacaaccgaactttcatgggttttatcatccttattcccatatcaaagattaaccctggcgcattcttttaaagataaatccaatcagttaaaagatgtaaatgttggattatttacatatccaatgttaatggctgctgacatattgctgtacgatgcaaatgtggttcctgttggaaaagatcaacttcagcatcttgaaattactagagatgttgcaaataagtttaataataaatatggagaaacattagtaattccagaggctttgacaaatgatgaaaccaagtatgttattggtacagatggtcagaaaatgagtaagtctaaaaataatatcattgatatttttttatcagaaaaaatgttaaagaaacaaataatgtcaattgaaactgacagtactcctcttgagtcacctaagaatgctgaaagttgtaatgttttcaaaatatacactctattgggttcaccagatcaagttaaaaatcttaaaaccaaatatgaaaatggtggttttggatatggacatgcaaagcaagaattatttgagttaatcctagaaaaatttaaagctgaaagagaaagatatgaccacttaatgtcaagcaaaaaagagattgatttgattttaagtgaaggtgctgaaaaagccatgaagacagcaaatgaagtgatgaatagggttagaaaaaaacttggctattaat

SEQ ID NO: 301174 - DNA, 577 bp, Unknown
  Bacterial polypeptide expressing nucleotide sequence isolated from the Sargasso Sea
aatgtccaaaaaaattttttcaggcgttcagcccacaggcaatcttcatttaggcaactaccttggagctattaaaaattttgttgatttaaacaatgatgatcaaaatgaatgtattttttgtgttgtagatttacatgcaataactactaagcaagataaagacgaattaagtaacaatattcgagaaacaaccgcaacatttatagctagtggtatagatccaagtaaaagcattatttttaaccaatcaaaagttcatgcacatgcagaaggttcttggatgttaagttgtatggctccaatgggctggttaaatagaatgacacaatttaaagaaaaagctgggaaagataaggaaaaagcttctgttggtttatatatttatcctatattaatggctagcgacatattactttatgatgctacgcatgttcctgttggagaagatcaaaaacaacatttagaattaacaagagatatagctcaaaaatttaataaagattttaattgtgaggattttttaagagtaccagaaccattaattaaaaagcatttttcaagaataatgagttaa

SEQ ID NO: 301175 - DNA, 1003 bp, Unknown
  Bacterial polypeptide expressing nucleotide sequence isolated from the Sargasso Sea
aatgtccaaaaaaatattttctggtgtccagcctacaggtaatcttcatttaggtaactatctaggagctattaaaaattttgttgatttaaataatgataaccgaaatgaatgtattttttgtgttgtagatttacatgcaataaccgttaggcaagacaaagatcaattaaaaaataatattcgtgagacaactgcaacatttttagctagtggtattaatccaaataaaagtattatttttaatcaatctaaagttcatgcacattcagagggctcatggatgttaagttgtatagcaccaatgggttggttgaatagaatgactcaatttaaagaaaaggcaggaaaagataaagaaaaggcttccgtaggtttatatatttatcctatattaatggctagcgatatattactttatgatgctactcatgtaccagttggagaagatcagaaacaacatttagaattaacaagagacatagctcaaaaatttaataaagattatgactgtgatgattttttaaaagttccagagcctttaattaaaaaaaatttttcaagaataatgagtttaaaagatggtctaaaaaaaatgagtaaatcagatccatcagatcttagtcgaattaatttaaccgatactaaagatgaaattatcaataaaattaaaaaagcaaaaactgactctttgccaattccttttgaagaacaaaaattaaaagatagacatgaagctgaaaatcttcttggaatatattcaagtatttcagatcaaaccttagataaaactttaaaagaatttgggggaaaaaatttttcagatctaaaaagacaattagctgaagttttatcaagtaaaatttccccaatttccgatgagataaaaaaattgatcaatgatcaaaattatttagataaagtgctcgctgaaggggcatttaaggccgaagaaattgcaggaaaaaaaataaaagaaatgaagaaaataataggtttttaa

SEQ ID NO: 301176 - DNA, 1006 bp, Unknown
  Bacterial polypeptide expressing nucleotide sequence isolated from the Sargasso Sea
tatgagcagtttccaaaaaagagttttttctggtgttcaacctacaggaaccctgcatttaggtaactatcttggtgcgataaaaaactttgtagagcttcaaaaagaatttgaatgtatttattgtgttgtagatcaacacgccattactgttgagcaaaatccagctgagcttcgctcaaacacgctagaggtattagcatcatttatcgcagcaggagtggactataaaaaacaaattatatttcaacaatcaagtgtagcagaacactctcagcttgcttgggtatttaattgtgtcagtcgaattggttggcttaatagaatgacacaatttaaagataaagctggaaagaataaagaaaatgtaagtgttggtttaatggtttatcctaacttaatggctgcagatattcttgcttaccttgcaacacatgttcccgtaggtgatgatcaaaaacaacatttagaactgtcaagagacattgcacaaaaatttaataatgattttaaagtagacttctttccactgccagaaccacttatttatggaaatgcgacaagagtaatgagccttcgagatggaactaaaaagatgtcaaaatctgatgcatctgaattttctagaattttattaactgatagtgatgatgatataagttctaaaataaaaaaagcaaagtctgactcagaccttattcctgatgacaaagatcagttacaaaataaacctgaatgcttaaatttaatcaatattttgtctgcttgttcaaatgaaagtattgaaaaaactctggtaagttatgctggcaaagaatactcaaaattaaaaaatgaccttgcagacaaattaattcaagtcataggaccaattagaaccgagatattaaatcttctcaataataaagacgaattaaataaagtcctagatatgggtagcgaaaaagcatccacaattgcaggcccaattctcaaagaagtctataagatagtcggttttagatag

SEQ ID NO: 301177 - DNA, 1006 bp, Unknown
  Bacterial polypeptide expressing nucleotide sequence isolated from the Sargasso Sea
aatgactagtttccaaaaaagagttttttctggcgttcaaccaacagggacactgcacttaggtaattaccttggtgctataaaaaactttgtggaacttcaaaaagaatttgaatgtatttattgtgtggtagaccaacacgcaatcaccgttgagcaaaatccaaatgagcttcgctcgaacagtctagaggtattagcgtcgtttattgctgcaggagtggattacaaaaaacaaattatatttcaacaatcaagtgtagcagagcactctcaactcgcttggttgtttaattgcgtcagtcgtattggttggctaaatagaatgacacagtttaaagataaggcaggaaaaaatagagaaaacgtaagtgttgggttaatggtttaccctaatttaatggcagctgatattcttgcatatcttgcaacgcatgttccggttggtgatgatcaaaaacaacatttagaattatcaagggatattgcacaaaagtttaataatgattttaaagtcgatttctttcccctgcctgaacctttaatctatggcaatgctacgagggtgatgagtctacgggatggaaccaaaaaaatgtcaaagtctgatgcctccgagctttccagaattttattaactgatagtgatgatgatatcagctctaagataagaaaagcgaagtctgactcagaccttattccagaacacaaagaccaattacaaaataaacctgagtgtttaaacctaataaatattctgtctgcttgtttggaccagagtattgaaaaaactttagcgggctatgcgggcaaagagtactcaaaattaaaaaacgatcttgcggacactttaattcaagttgttggtcccgtgaggaaagagatactcaatcttctcgataacaaggatgagttaaataagattttgcaggtggggagtgaaaaagcatccacaatcgcaggccccattatcaaggaagtctataagatagtcggttttagataa

SEQ ID NO: 301178 - DNA, 463 bp, Unknown
  Bacterial polypeptide expressing nucleotide sequence isolated from the Sargasso Sea
tatgaaaaaaaaaattttctctggtgttcaacctactggaaatcttcatttaggaaattatttaggagcaataaaaaattttgttgatttaaacaacgagactcaaaatgaatgtatcttttgtgtagttgatcttcatgcaataacggtaagccagaatccaaaagatttaaaatcaaatatacatgagacagtagctacatttgttgctagtggaatagatccaaaaaaaagtataatttttaatcaatctcaagtgagtgctcactcagaggcagcatggattttaagctgtgttgctagaatgggatggctaaataggatgacacaatttaaggaaaaagctggtaaggataaagaaaaagcaagtattggtctttattcataccctgttttaatggctgctgacattttattatacgattcgacacatgtacctgttggagatgatcaaaaacaacat

SEQ ID NO: 301179 - DNA, 1003 bp, Unknown
  Bacterial polypeptide expressing nucleotide sequence isolated from the Sargasso Sea
tatgagtaaaaaaatattctctggtgttcagcctacaggcaatcttcatctaggaaattatttaggggctataaaaaactttgtagatttaaataatgttaatgataacaaatgtattttttgtgtagttgatttacatgccatcacagtaaagcaagatcctaaagaattaaaaaataatatccgagaaactgttgcaacttttatagcaagtggaatagaccccaaaaaaagtataatttttaatcaatctggggtagccgctcattctgaaggagcatggatattaagctgtgttgctagaatgggttggctaaataggatgactcaatttaaggaaaaagcaggtaaagataaagaaaaagctagtattggtttgtattcttatccggttttaatggcagcagatattcttttatatgatgccactcatgttcctgtaggtgatgatcaaaagcaacatttggagttatgtagagatatagctcaaaaatttaataacgattttgaagtagaaaattttcttcaagttcctgaacccttaattcaaaaagaattttcaagaataatgagtttaaaagatggttcaaaaaaaatgagcaaatcagagttatcagatttaagtagaataaatttaacagatgacaaagatcaaataataaacaaaattaaaaaagcaaaaacggatcctttgcctatgccacaaaacattaaggaacttaatgaaaggttggaagctaagaatcttttaggaatttattcaagtttgacaaattcttcattagaaaattcaataaataattttgcaggtaaaaacttttcagaatttaaagaaaaattaacagaagaacttgtaaataaaattgaacctatttctaatgagataaaaaaacttttaggagataaaagttttttagatgaaattcttctagatggagttgaaaaagctaatttgattgcatccaaaaagattgaaagaattaaagaaatagtaggtttttaa

SEQ ID NO: 301180 - DNA, 1003 bp, Unknown
  Bacterial polypeptide expressing nucleotide sequence isolated from the Sargasso Sea
ttgaaaaataaaaaaattcttacaggtataaccactaccggaacaccacatctgggaaactatgtaggtgccataaggcctgccatagcttcttcaaaggagaaagatcatgattctttcttctttcttgctgattaccacgcattgattaaaagcaaagatcctgaagggttgaggcaatcatgcctagaaatcgcggcaacatggatagcctcaggtctcgatatcgataatacctatttctataagcaatcagatattccagaaatattagagttaaattggatccttagtaattttacagcaaaaggtctaatgaatagagcacatgcatacaaagctgcagtggatgataatgagaaagcagatccagataaaggaataacgatggggcttttttcttaccctgttttaatggcagcagatattctcatgtttaaggctacacatgtaccagtgggccaagatcaggttcaacatattgagatgacaagagatattgcccaacgctttaatcatcattatgaagagatttttgtaataccagaaggagttatcgataaagaatcttctgttttacctggtttagacggaagaaagatgagcaaaagttatggaaatattattcctcttttttgtgattcaaaaacacttagaaaacatgttatgaagattaaaacaaattcattagagccaggcgagcctaaatcgagtgaagactgtttattgtttgatatttacaagagctttgcatcagattcaaaaatcagttcaatgaaaaaggatctcgaagggggaatatcttggggtgatgcaaaaaatcaactttatgagctgcttgatgagcagctttctaatcatagattgagatatgatgaattgatgaatgatccatcttaccttgataaggtacttcgagatggagcagaaagggcaagagaggttgcgcatactaacttaaatgagattaaaagtgtcatcggcctgggttcattaagctaat

SEQ ID NO: 301181 - DNA, 734 bp, Unknown
  Bacterial polypeptide expressing nucleotide sequence isolated from the Sargasso Sea
catgagtaaaccagtagttttaagcggcattcagccaaccggtggtatgacaataggcaactatgttggcgctattaaccagtggctaaagttacaggaagatcacgaaagtttctttatgttggttgacttgcatgcaatcaccgttcgccaagagccagaattattacgctctcgtgtactagatggcgttgcattgtatgctgcatgcggtatcgaccctgaaaagtcagcgttatttgttcagtctcaagtgccagagcacgcacagttagcgtgggtacttaattgttacgcgcaaatgggtgaacttaaccgcatgacccagtttaaagataagtcgtcaaagcatgctaacaatgtaaacgtgggcttattttcgtacccagttttacaagcggccgatattttactttatcaagccgatcaggtaccagtaggcgaagatcaaaaacaacacttagagctaacgcgtgacatagcgacacgctttaataacttatacggtgacgtttttaaactgccagagccttacattccagagtttggtgcgcgtgtaatgagcctacaagacccactcaagaaaatgtcaaagtctgacgaaaatccaaacggctacattatgttattagatgagcctaaaaagattgagaaaaagcttaaaaaagcagtgaccgattcagacgagcaagcgcgtatttactttgaccgaactgaaaagccaggtgtatcta

SEQ ID NO: 301182 - DNA, 640 bp, Unknown
  Bacterial polypeptide expressing nucleotide sequence isolated from the Sargasso Sea
ggcaagtgtaggattgtacatatatccagttttaatggctgccgatataattctttatgatacaacccatgttcctgttggtgaagaccaaaaacaacacttagagttaactagagatatagctcaaagatttaatttagaatataaatctcaaaattttctaaaagtacctgagccattgattcagagagaattttcaagaattatgagtttaaaagatgggactaaaaagatgagtaaatctgatccttctgatttaagtagaattaatttaaatgatagtaatgatcaaataattaataaaattaaaaaagctaaaacagataacgatccgatgcctaaaagtaaatcagatatagagaaaagaaatgaaattaaaaatttatacaatatttactcaagtttaagtaatcagtctgaaaccaaaactattgaagaattttcaaataaaaacttttcagattttaaaaatagattagcagaattagtagtatctaatgtagaacctatttctaaggaaataaataaactcaataaagacaataggtttattgatgaaattttagagcaaggtgctgaaaaagcagataaaattgcatcaaaaaaggtcaaagaaataaaagaaattataggattttag

SEQ ID NO: 301183 - DNA, 1003 bp, Unknown
  Bacterial polypeptide expressing nucleotide sequence isolated from the Sargasso Sea
ttgaacagtaaaaaaattcttacaggtataaccacaactggcacaccacatctaggaaactatgtaggtgcaataagacctgcaatcgcttcttcaaaggagcaagatcatgattctttcttatttctagcagattaccatgcattaattaaaaataatgatcgtgatgagttgagacaatcatgtttagagattgcggcaacatggatagcatttggtctagacattgaaaatacctatttttacaggcaatcagatattccagaaatattagagttgaattggattcttagtaattttacagcaaaaggtctaatgaatagggctcatgcatataaagctgctgttgatgaaaatgagaaaggagatccagataagggtattacgatggggcttttttcttaccctgtcttaatggcagcagatattcttatgttcaacgccactcatgtgcctgtggggcaagatcaggttcagcatattgagatgacaagagatatagcgcaacgctttaatcatcattacggcgagatttttgtaataccagaaggtgtcattgataatgaatcgtcaattttgcctggtttagatggaagaaagatgagtaaaagttatgggaatatcattccacttttctctgattcaaaaacgcttcgaaagcatgttatgaagatcaaaaccaattcattagagccaggtgagccaaaatcgacagaagattgtctattgtttgatatttataagagttttgcatcagaatcagaaatcagttcaatgaaaaaggacctcgaagatggaatgtcatggggtgatgcaaaaaatgaactttatgagctgcttgatggccagctatccaaccatagattgaaatacgatgaattgattggcgatccggcatatctcgataaagtccttcaacaaggagcagagagggcaagagaggtggcaaagtctaacttacatgaaattaaaagcgcaattggtttgggttcattaagctaat

SEQ ID NO: 301184 - DNA, 559 bp, Unknown
  Bacterial polypeptide expressing nucleotide sequence isolated from the Sargasso Sea
tatgaaaacagttttttccggaattcaacctagtgggttagtacatttgggtaatctcctgggagcaataaacaattgggcaaaattatcaaatgaagactcaaaaaattatttttgtattgttgacctacattctttaacagcaatgcctaataaatctgacttaaaagacagcatcaaaaacacattgaaagttttattagcatctggaattaatttggaaaattctgtaatttatgtacaaagcgatcttaaacaccacgcctacttatcttggatactgtcaaatttttgccaagttggtgagttacaacgtatgacacaatttaaggaaaaagcttcttcgtttggaacgcattctggtcttttgacttaccccatcctaatggctgcggatattttaattcataaagcaaatgaggtcccagtaggcgacgatcaaactcaacatttagaattaacaagaaatatagctgaaaggtttaataataattatggtgaaatatttccaatacctgaaaaaactagtggaaaatatggtgctcgattaatgtcttga

SEQ ID NO: 301185 - DNA, 1000 bp, Unknown
  Bacterial polypeptide expressing nucleotide sequence isolated from the Sargasso Sea
atgagaaaaagaattttaacaggaattactacaactggtactcctcatattggaaattatttgggcgccatcaaacccgcacttgaattagttgcttctgataatgattcatatttttttcttgcggactatcacgcgttaataaagcaaactgatcccagggaaattgaagcaagtgttaaaaacgttgcattagcatggttatcatctggcttgaacccagatcagtctcacttttatagacaatctgacattcctgaagtgcatgaattaacttggatattaaattgcagcgcagccaagggcttgttgaatcgagcccatgcctataaagctattgttgctgaaaataccgaatctggtagcgatgaggataaggcaataaatatgggcctcttttcatatccagttttgatggctgctgatatattgctatttgaggcaactcatgttcctgttggcccagatcaagcacaacacatggagatgactcgagatattgcaggtaaatttaatcacacatactcaaacatactgacgattcctgagacaattatacaaagtgaagtatcagtaccaggaattgatgggagaaaaatgagtaagtcatataacaacatcattccttttttatcctcagagaaagctttacaaaaatctattgcaaagattattacaaattctttagaaccaggtgagcccaaagaacataagagttgtactctttttcaactttattccatgttcgctaatgctgaggagatcaataatatgaagctatcatataaagatggaattggctggggcgatgttaagaaagatttattcactgctatcaataatgaaatagtccctataagagaaaaatatgccgcattaaaggatcaaccagatctattgaatgatttattttctgacggggccagcagagttcgacctcaagctcaagagcttgtaggtaaattacgtgagcttgtaggcatctcaaaaattgtttaat

SEQ ID NO: 301186 - DNA, 675 bp, Unknown
  Bacterial polypeptide expressing nucleotide sequence isolated from the Sargasso Sea
aatttaaagaaaaagcaggtaaagataaagaaaaagctagcgttggcttatatatttatccggtattaatggctgcagatattttattatatgatgcaactcatgttcctgttggagaagatcaaaagcaacatttagaattatctagagatattgcgcaaaaatttaatttagattttaatgcaccagacttcctgagagctcctgagcctttaattcaaaagaatttttcaagaatcatgagtttaaaagatggaagaaataaaatgagcaaatcagatccatcagatttaagtaggattaatttaacagataataaagatcaaattgttaataaaattaaaaaagctaaaactgacaatgagcagttgccagttgatgataaaaatttaagcgataggcctgaagttgaaaatttactaggtatatattctagtttaagtggtcaaagtttacaaaactctataaatgagtttagtggaaaaaatttctctgattttaagaaaaaattagcagagattgttgtagaaaaaatttctccaatatctattgaaattaacaaattacaaaaagatattaattatattgatacagttttaagtgatggaggcaaaagagctgaaatgattgcttcaaaaaaagttactgaaataaaaaaattaattggattttaat

SEQ ID NO: 301187 - DNA, 1003 bp, Unknown
  Bacterial polypeptide expressing nucleotide sequence isolated from the Sargasso Sea
atgtccaaaaaaatattttcaggtgttcaacccacaggcaatcttcatttaggtaactatcttggagctatcaaaaattttgttgatttaaataatgatgaccaaaatgaatgtattttttgtgtagtagatttgcatgcaataactattaagcaagataaacatgaattaaagaataatattcgagaaacagctgcaacatttatagccagtggcatagatccaagtaaaagtattatttttaatcaatcaaaagtttatgctcatgcagaaggttcttggatgttaagttgcttggctccaatgggctggttaaatagaatgacacaatttaaagaaaaagctggcagagacaaagaaaaggcttcagttggtctatatatttatcctatattgatggctagtgatatattactttatgatgctacacacgtgcctgttggagaagatcagaaacaacacttagaattaactagggatattgctcaaaaatttaataaagattttgactgtcacgaatttttaaaagctccaaaaccactaataaaaaaaaatttttcaagaataatgagtttaaaagatgggttaaaaaaaatgagtaaatcagacccatcagatcttagtagaattaatctaacagatactaaagatgaaattattaataaaataaaaaaagcaaaaactgactcttttccaattcctaatgaagaccaaaaattaaaaggtagacctgaagcaaggaaccttcttggtatctattcaagcattttaggtcaaactttggacaaaaccctagaagaatttgggggtaaaaatttttcagatcttaaaagtcgtttagccgatgtgttgtcaagtaaaatttccccaatatctgatgagataaaaagattaattgatgattatgaatatttagacaaaattcttgcagagggagctagtaaagctgaggaaattgcaggaaaaaagatagcagaaatgaagaaaataataggtttttaaa

SEQ ID NO: 301188 - DNA, 442 bp, Unknown
  Bacterial polypeptide expressing nucleotide sequence isolated from the Sargasso Sea
tatggtaaaaaaaattttttcaggtgttcaaccaacaggaaatcttcatttaggaaattatattggagcaattaaaaattttgtagatcttcaaaatcaagatggaaatgagtgtgtttattgtgttgttgatttgcatgctattacaacaaagcagaatccaacaactttaaaaaaaaatataagagaaactacagcagcatttttagcaagtggaatagatcctaaaaaaagtattatatttaatcaatctttagtatctgctcattcagagggatcatggatattaggatgtattgcccgaatgggttggttaaatagaatgacacaatttaaagaaaaagctggaaaagataaagaaaaagcaagtattggcttatatatttatcctgtattgatggcagcagatatacttttatatgatgcaacacatgttccagtt

SEQ ID NO: 301189 - DNA, 742 bp, Unknown
  Bacterial polypeptide expressing nucleotide sequence isolated from the Sargasso Sea
gcacagctgggctgggcgctgaactgctacacctatttcggtgaactgagccggatgactcagttcaaagacaaatctgcgcgctattcggaaaacattaacgccggtctgtttgactatccggtgctgatggcggcggacattctgctgtatcagaccaaccaggttccggttggcgaagatcagaaacagcacctggagctgagccgcgatatcgcgcagcgcttcaacgccctttacggcgaggtgtttaaagtgcctgagccgtttattcctgcatccggtgcccgcgtgatgtccctgcttgaaccgacaaagaaaatgtccaagtcagacgacaatcgcaataacgtgatcggtctgctggaagacccgaaatcggtggtgaaaaagatcaagcgcgccgtgacggactccgatgagccgcctgttgtccgctatgaccagcagaataaagccggtgtctccaacctgctggatattctttccggggttaccggtcagagcatcgcggagctggagcagcatttcgaaggcaaaatgtatggtcacctgaaaggcgaagtggctgatgcggtgtccggtatgctgctggagctgcaggagcgctataaccgcttccgtaacgacgaagcgttcctcaatcaggtgatgaaagacggggctgaaaaagccagcgctcgtgcgtcgcaaacgctgaaagcagtctatgaagccattggttttgtggctaagccgtaag

SEQ ID NO: 301190 - DNA, 793 bp, Unknown
  Bacterial polypeptide expressing nucleotide sequence isolated from the Sargasso Sea
tatgcataaaaagagagtattttcaggagtgcagccaacagggaatttgcatttaggtaattatttaggcgcaataaaaaattttgttaatttacaaaataaatttgaatgcgtctattgcattgtagatctgcacgccataacaaaccgtcaagatcccaaagaattaaagtctaatattttagagacaatagctagttttgttgcatcaggtctagaccctgaaaaaaatattatttttaatcaggcaagcgtttctgctcatagtgaattagcatggatatttaattgcgtagcaagaattggatggatgaatcgaatgacacaatttaaagaaaaagccggggccaataaagaaaatgctagtgttggacttctcgtttatcctaatttaatggcagcagatattcttatatacaaagcgactcatgttcctgtgggtgaggatcaaaaacaacatttagaattgaccagagatatagcaaaaaaatttaataatgattttaaatgtggagaatattttccagtagtagaacctttgataccagaagaagtttctagagttatgagtctgagagatggaaagaaaaaaatgagtaagtcagaagattctgatcaaagcagaataaatttaaaagatgataaagatttaattaatcaaaaaattaaaaaagctaaaactgacaatgatcctattccatctgaaataaatggattaaaaaacaggcacgaagctttaaatcttatatcaatttatgcgagtataaatggaattaaagtagataaagtttaa

SEQ ID NO: 301191 - DNA, 853 bp, Unknown
  Bacterial polypeptide expressing nucleotide sequence isolated from the Sargasso Sea
ccaaaacctaatgatttacaaaataatgttttagaaactgttgctagtttcatatccacaggattagatccaaataaaagtataatatttaatcaatcatcggtaccaggacatactgaattagcttggattttaaattgtgtttcaagaattggttggttaaataggatgacacaatttaaggataaagctggctctgataaagaaaaagcaagtgttggattatatatttatcctaatctcatggcagctgacattttactttataaatcaactcatgttccagtcggagcagaccaaaaacaacatttagaactctcaagggatattgctcaaaaatttaacaacgattttaattgtaaagatttttttccaattcctgaacctttaattccaaagaacgtgtcaagggtaatgagtttaagagatggtacaaaaaagatgagcaagtcagaagagtcagatttttcaagaatcaacttaaaagataacgcagatgaaataataaaaaaaattaaaaaagctaaatctgactcagagcctattcctgaaaatttaagtaatttagaaaaaaaacctgaagctttaaatttaataaatatttatgctgaaatgactaaaaaaaatttagaaacagtgcttaatgaagtagctggcaaggagtattcatttttaaaaacaaagctgtcagaggtccttatcagtgagatagtgccaataggcaaagaaattaaaaaacttttagatgataaggctcacttgatgctaattttgaaaaaaggcaaagaaaaagccaatattattgctgaggaaaaccttaaaaatatacgtgaaaaagtgggattgatataat

SEQ ID NO: 301192 - DNA, 1003 bp, Unknown
  Bacterial polypeptide expressing nucleotide sequence isolated from the Sargasso Sea
gatgactaaaaaaattttttcaggagtccaaccaacaggaaatctacatttaggaaattatttaggagcaattaaaaattttgtagaactgcagaatgaaaaagataataattgtatatattgtgttgttgatttgcacgcaattactttaaaacaggatccaaaagaacttaaaaataatatcagagaaactgcagcaacattcattgcaagtggacttaatccaaacaaaagtattttattcaatcaatctttagttcctgcacactcagagggtgcttggatattgagttgcattggcagaatgggttggcttaacaggatgacacaatttaaggaaaaagcgggcaaagataaggagaaagcaagcgtaggcctttacatctatcctattcttatggctgcagatattatgttgtataatgcaacacatgttccagttggtgatgatcagaagcaacacttagaactctgtcgcgatatcgctcaaaaattcaataatgagtataatgttgaagacttcttagttcctcctgaaccattaatacaaaaacaattttctagaattatgagtttaaaggatggttcaaaaaaaatgagtaaatcagacgtttcagatttaagtagaataaacttaaaagacagtaaagatttaataattagtaaaattaaaaaagcaaaaacagatccacatcctatccctaatattattgaagaattagaaaacagacctgaggcagaaaatttacttggaatatattcaagtttaaaaaatcaaaatataaaaaccactttaagggaatttggtggtaaaaatttctctgagtttaaaacaaatctctctgaacaattaattgataaaatttctccaatagcaaatgaaataaataaattattaaataatgctgattatctagacaaaattttattaactggagcagaaaaagcaaatgatattgctgaaaataaagtaagagaaattaaggaaataatcggtttttaa

SEQ ID NO: 301193 - DNA, 1003 bp, Unknown
  Bacterial polypeptide expressing nucleotide sequence isolated from the Sargasso Sea
atgggtaaaaaaatattttctggagtgcaacctacgggcaatcttcatttaggtaattatttaggtgcaataaaaaattttgttgaactaaataatgacgatgcaaatgaatgtattttttgtgtggtggacttgcatgctataacagttaaacaagatccaaaagaattaagaaaaaatattagagaaactgtagcaacatttattgcaagcggaatagacgcaaaaaaaagtataatttttaatcagtcaggtgttgcagcccactccgaaggtgcttggattttaagctgtgtagctcgtatgggatggctaaacagaatgacacaattcaaagaaaaagcaggaaaggataaggaaaaagccagcattggattatattcttatcctgttcttatggcagctgatatcttgttatatgatgccacccacgttcctgtaggagatgatcaaaagcaacatcttgagctgtgcagagatatagctcaaaaatttaataatgattttggtgtggaggattttttaaaagttcctgagcctttaattcagaaagaattttctaggattatgagtttaaaggatggatcaaaaaaaatgagtaaatctgagttatcagatttaagtagaataaacttaacagatgataaagatcaaataataaataaaattaaaaaagctaaaacagatacgttaccaatgccaaaagatattaaagagcttgaggggaggctagaggcacaaaatcttttaggaatttttgctagcttgagtaattcaactctggaaacttccatagaaaaatttgctggcaagaatttttcagagtttaaacaagacctatctgaattattagttaataaaattatgccaatatctgatgagataaaaaaattacttcaagaccaatcatatctcgattctatccttctagatggagttgaaaaggctaacaaaattgcgtcaaaaaagatcaaaaatataaaagaaactgtaggtttttaat

SEQ ID NO: 301194 - DNA, 970 bp, Unknown
  Bacterial polypeptide expressing nucleotide sequence isolated from the Sargasso Sea
atgtcaaaaattttaactggagtgcaatcaacgggtactcctcatttaggaaatattttgggtgcaataattccagctatagaactatctaaaaaaagtgaaaatgaatcttttttgtttatagcagacttacactcattaacgcaaataaaaaaagcagaagaattaaaagaaaatacttttgcaacagctgccgcatggttagcatttgggttagatgtagataaaactgttttttataaacaaagtgatgtaactcaagtaacagaactctcatggtatctttcatgcttctatccatatcaaagacttactctggctcactcatttaaggataaatcgaatagccttagagatataaatacaggtttgtttacctatcctattcttatggctgcagatattttgttgtacgacgcaaaatttattccagttggaaaagatcaactacaacatattgaaataacaagaaaagttgcatcaaaatttaatagtataaatggggaaacatttataattccagaacctttaattcaagaaaaacataaaaatatacctggtacagatggaaataagatgagtaaatcgaaaaataatacaattaatatctttttgtcagataaaaaactaagaaaacagataatgagtatcgcaactgatagcacaccaatggaaaaaccaaaaaatccagataactgcaatgtattcaaaatttattctttaattgcgagtcaaaaagatattaaaaaaatgaaatctaaatacctaagtggaggctttggatacggggatgcaaagaatatactttttgaagaaatattaaataaattcaaaagcgaaagagatttatttaatcattttatttccaatcctgatgagatttatgatatccttgaagttggtgcaaaaaaagcaagaaaaatagctgacaacgttttaaatagagtaagaaaaaaaattggatattaat

SEQ ID NO: 301195 - DNA, 820 bp, Unknown
  Bacterial polypeptide expressing nucleotide sequence isolated from the Sargasso Sea
atgggaagagttttttcaggagttcagccgacaggtaatttgcatttaggcaattatttaggagctatcaaaaattttgttttattacaaaatgaccataaatgtatttactgtgtggttgatatgcatgcaattactgtaaaacaagaccctaaaattttaaaaagtaatattttagaagttgctgcagcatttgtagcttcaggtataaatccagaaaaatcagtgatttttgttcaatctcaagtctctgcccatgccgaacttgcatggatttttaattgtgttgcgcgtcttggttggctgaatagaatgacacaatttaaagaaaaagctggcaagaatagagaaaatgcttctgcgggtctttatacttatccagtattaatggctgcagatatattagcataccatgcgacgcatgtccctgtaggcgatgatcaaagacagcacttagaattggctagagacatagcgcaaaaatttaataatgattttaaagcagattattttcctattacagagccagtaattatgggaaatgctactagagttatgagcttgagagatggtaagaataaaatgtcaaaatcagatgtttctgattattcaagattaaatctcacagatagtgcagatgacatttcaaataaaataagaaaagctaaaacagatccattacctcttcccgatgaatcttgtctttctagtgaaaaaaaatttaatgaagatattattgcgaataggccggaagctgtaaatttattaagcatttattccgcactttctaatgaaagtcttaaagaggtggttttaaaat

SEQ ID NO: 301196 - DNA, 1600 bp, Unknown
  Bacterial polypeptide expressing nucleotide sequence isolated from the Sargasso Sea
gctggggcagcctgtgggtatcgctcgcgggcccggcctgcaacttcgtgcaggcgctgatctggggtgtgctgaccctcgtgctgcccgccgtcggcatcgacgagccgttcttcacgcggatggcgtttgccggcgtcagcgcgaacctcgtgctcggcgtgctgaacctgtttccgctgccgccgctcgacggcggccgcatcctggcggcgctgctgccgacgaagcaatcgatcgcgctgtcgcgcatcgagccctacggtttcatcatcgtcctcgtgctggtcgcgacgggcgtgctgacgaacttctggctgcgcccgctcgtcaacgtcggctatgccgtcctgagcgccatcctgtccccattcgcctcgcttctctaacgacaaccatgttccctgaacgtattttctccggcatgcgacccaccgggtcgctgcacctcggtcactaccacggcgtgctgaaaaactgggtgaagctgcagtccgagtacccgtgcttcttctgcgtcgtcgactggcatgcgctgacgacgcactacgagactcccgaggtcatcgagaagaacgtgtgggacgtgctgatcgactggctcgcatccggcatcgatccggcgcaggccacgctgttcatccagagcaaggtgcccgagcacgccgaactcgcgctgctgctcggcatgagcacgccgctcggctggctcgaacgcgtgccgacctacaaggagcagatggagaagctgaaggacaaggacctgtcgacctacggcttcctcggctatccggtgctgatggcggccgacatcctgctgtatcgcggctcgctcgtgccggtcggtgaagaccaggtgccgcacgtcgagatgacgcgcgagatcgcgcgccgcttcaactacctgtacggtcgcgagccgggcttcgaggagaaggcgctcgatgccgcgaagaagctgggcggcaagcgcgcgaagctttatcacgagctgcgcaacgcgtatcagcaggagggcgacgacgaggcgctcgaacaggcgcgcgcgatgctgcaggaatcgcagagcctgtcgatgagcgaccgcgagcgcctgttcggctatctcgaaggcgcgcgcaagatcatcctggtcgagccgcaggcgctgctcaccgaagcatcgcggatgccgggcctcgacgggcagaagatgtccaagtcgtacggcaacacgatcggcctgcgtgaagacgccgagacgatcacgaagaaggtccgcacgatgccgaccgatcccgcgcgcgtgcgccgcaccgatccgggcgatcccgacaagtgcccggtgtggcaactgcaccaggtctataccgacgaagccacgcacgactgggtgcagaaaggctgccgctcggcgggcatcggctgcctcgactgcaagcagccggtcgtcgaaggcatcctgcgcgaacagcagccgatgctcgagcgtgcgcagaagtacatggacgatccgtcgctgctgcgcgcgatcgtcgcggatggttgcgacaaggcgcgcaagtacgcgacggaaacgatgcgcgacgtgcgtgacgcgatgggcctgtcgtacaactga

SEQ ID NO: 301197 - DNA, 1012 bp, Unknown
  Bacterial polypeptide expressing nucleotide sequence isolated from the Sargasso Sea
atgaaaaaagaaatatatctcacaggaatcacaactacgggaactcctcatattggtaactatgtgggtgcaattcgtcctggaatacaggccagtatcgacagaacgaaggataatttctattttttagctgatcttcatgctctagcaaaggcaggagatcctgaaagaatagctaaatctacactggaaatatcagctgcttggctagcacttggtttggacataaacaatgcatatttttaccgtcaatctgatattcatgaaattcctgagttaacttggatccttaaaagtatgacggcaaagggtttaatgaatagagcgcactcttataaagcacaggtgcaaaaaaacattgaatcaggtgcgcaagataatgataaaggaatcaatatggcgttatatagttatccgatactaatggctgctgatattctcatgttcaaatcaacgcatgtacctgtcggcaaagatcaaaagcaacacattgaaatgacgagagatatcgcacaaagattcaatcataagtacggaaatatcttagttgtgccagaggcagtaataagtgaggatacagcaactttatctggacttgacggaagaaaaatgagcaaaagttatgataatgtaattccattattctcagacgaaaaaaaactaaaaaaattaataatgaaaatcaaaaccaatagtctggaaccaggtatcccaaaggatactgatgattctattttgtatgatatttatcaggcattctcaagccccgaagaaaccgagaatgttaaaaatctctatgcacagggtatagcgtggggagagatgaaaaaaatattatatgaatgtataaatgatcagttgaaaccagccagagaaagttatcaaagactgattgctaatccaaaaaaaattgaagatgagctccaaaaaggggcagaaagagccagagagatatcagtaccctatatggaagaaataaggaacgcggtaggtattagaaaattgaactaga

SEQ ID NO: 301198 - DNA, 1036 bp, Unknown
  Bacterial polypeptide expressing nucleotide sequence isolated from the Sargasso Sea
aatgagtaacgctgtgcaatctgaaccaataggtaaattcaacaagcgagttttttctggagtgcaaccatctggtggattgaccctaggtaactacttaggtgcaatcaaacgatttgttcagatgcaggatgacgattacgaaacaatttattgtgtagttgacctccacgcaattaccgtttggcaaaatccaaaaatgcttaggaaaagtacaagggagttagcggctttctttattgcatcagggctggatccaaataaatctatcttatttaatcaatcagcagtacccgaacatgctcagttaggctggatctttaattgtgtggctcgcatgggctggatgcaaagaatgacacagtttaaagataaagcagggaaaaatgctcagaatgcatcgctaggcctatttggttatcctgcgctaatggcagctgatattttagcctatcatgcgactcatgttccagttggcgatgatcagaagcagcacctggaacttaccagagatatagccgtaaaattcaatcacgattatgaaattgattttttcccagtgactgagcctgttattggaggaccagcagcccgagtaatgagcctgcgtgacggtacaaaaaaaatgtcaaagtctgacccttcagatttaagtcggataaatatgacagacaattcagatatgattgcaaataaaattagaaaagcaaaaacagatcaatatggccttccgtccgaaccaaaaggtctggaagggagagctgaggcacagaatttagtatcaatatacgcggcactcggagatcaaagtgtggaaagcgttttaagcgaaattggcggcaagcaattttcagattttaaacctatgctggtagaaagagctaccgaagtactgtcaccaatttccagtgaaatggatcgcataatgcaggatatacctcagttagacaaagtattaaatgatggcgcatttaaagctaaatccatagccgaaccaattttgaaaaaaacattcgatatcataggtttgacttag

SEQ ID NO: 301199 - DNA, 943 bp, Unknown
  Bacterial polypeptide expressing nucleotide sequence isolated from the Sargasso Sea
ttaggagcaattaaaaactttgtaaatttacaaaatgaaaagaacaatcaatgtgtttattgtgtagttgatttacatgcaattacagttaagcaaaatccaaaagaattaaaagatagtattagagagacaacagcagcattcattgcaagtggattggattataaaaggagcattatttttaatcaatcgtccgttccatctcatagtgaagggtcttggattctaagttgtgtagctagaatgggttggttaaatcgtatgactcaatttaaagaaaaggcaggtaaggataaagaaaaagcaagtgttggattatatatttatccaatattaatggcatctgatattttattatacgacacaacacacgtaccagtgggagaggatcagaagcaacatttagaattaaccagagatatagcgcaaaaatttaatcttgaatttaattgtccagatttttttactgcgccagagcctctaattcaaaaaacatttgctagaattatgagtctcaaggatggaaaaaaaaaaatgagtaaatcagatccatcagatttgagtagagtaaatttaaatgactcaaaagatgtaattataaataaaataaaaaaagcaaaaacagatgataaaagtatgccagaagacaataaaaatttgaataaaagaccagaaattgaaaacttattgggaatatattccagtttggctgatcaaaaaatagaaaaaacaataaatgaattttcaggaaaaaatttttcagaattcaaaaccaaactttccgaaatggttgtcgagaaaatttcacctatttcaacagaaattaataaactacaagaggataaagaatttattgataagatattaagagatggatcagaaagggccaatgaaatagcttcaaaaaaggttaatgaattgaaaaaaattgtaggtttttaat

SEQ ID NO: 301200 - DNA, 994 bp, Unknown
  Bacterial polypeptide expressing nucleotide sequence isolated from the Sargasso Sea
aatgaaaaaacgaattctaacaggaataacaacaacagggatacctcacattggaaattatattggtgctatcaggcctgcactagaattagccaagggatctgatgaatcatttttctttttagctgattatcattcaataataaagaatcaaaatattgatgaaataaaacactctgttgaaaatgttgccttatcgtggctttcttgtggtttagacccaaagaagacgtacttttatagacagtctgatgttcccgagatacttgagctaagctgggtcttaacctgtgtaactgcaaaaggattaatgaatagagctcatgcctataaagctgcaagttcaattaatactgatgatcctgataagggaataacaatgggcttattttcttatcctgttttaatggctgctgacattttaatgtttgattcaactcatgtgccggttggatctgatcaagtacaacatttagaaatgactcgtgacattgcagcaagatttaatcatctttttaaaccattattaacattgcctgaaccaattattcaaaaaaatgaaaacgtagttttaggcacagatggaagaaaaatgagtaaatcatatgggaatgttattcctttactagaaagtgaaaaaaatcttaaaaaatcaatcatgaaaatagttacaaattcacttgagcctggtgaacccaaagagtcaatagactgtaatgtttttgaactatataaatattttgcgacagaatcagaaatacaatctatgcaacaatcttatgatgatggaatttcttggggtgaagctaaagagatgttatttaattcagtcaatcaagagcttcaaccaattagatcaaaatatgaagagctttctaaaaataaagaccatattaatgacttattaagtgatggtgctaaaaaagctagactaatagcaaaggaaaaaatattagagataagagaagcggtaggattatctaagatcttataa

SEQ ID NO: 301201 - DNA, 1018 bp, Unknown
  Bacterial polypeptide expressing nucleotide sequence isolated from the Sargasso Sea
atggcaaataaaaaaagaattctttcgggagttcaaccaactggtgatttacatattgggaattggcttggggctataaataattgggttacgcttcaagagcaatatgaaacatttctatgtgtagttgatttgcacgcaataacagcctcatataatcccaaagaattatctaaaaacactatctctacagcggctttgtacgtcgcttgtgggatagatccaaatatatgctcaatttttgtccaaagtcagatttcagcgcattcagagctttgttggatattaaattgcatgaccccaattaattggatggaaagaatgattcaatttaaagaaaaatctatacaacaaggtaataatgtatctattggattatttgactatccaatacttatggctgcagacatccttctttatgatgctgacttcgtaccagtaggtgaggatcaaaaacaacatcttgaacttgcgagagatattgcacaacagagaattaatgccagatttagtaaggataaaaatattttaaagatccctcaaccaatcatcatgaagaatggttcaaaaataatgagtttaattgatggttcaaaaaagatgagcaaaagtgatcctaatgagggcagtcgcattaacttattagatcctcctgaaataatcacaaaaaaaattaaaagagcaaaaagtgacagttctattggaattgaatttaacaaccctgagagaccagaatctaaaaatcttttgatgatttattcaatattatctggcaaagaaatttctcaatgtgaaaatgaattcttagagactggatgggggacatttaaaaaattaattaccgaacaacttattgaatcactagaacctattcagaaaaaatataaattattaattaatgatccctatcaactaaataaaatccttaatgaaggaaaggaaaaagctgaagatttagcgaatcagactttaaaacgagttaaatcaagattgggattttttgaaacggagaaataaa

SEQ ID NO: 301202 - DNA, 860 bp, Unknown
  Bacterial polypeptide expressing nucleotide sequence isolated from the Sargasso Sea
ctcaattataaaaaatcaggactcagattctataaaaaattctgtaaagaatgttgcattagcatggttatcttctggattagacccaaataaatcctatttttataaacagtctgatgttccagaaataattgagttgtgctggattctaaactgcgtaactgcaaaagggttaatgaatagggctcatgcctataaagcagcaacgtcaataaatgaaaatgatcctgataaaggaattacaatgggattattctcatatcctgtactaatggctgcagatattcttatgtttgattcaacacatgttccagttggatcggatcaagttcaacatctagaaatgacaagagatattgctgctagatttaatcacctatataaaccaattttaactctaccagatcctattattcaggataaagaaaatgtagttcctggattagatggacgaaaaatgagcaaatcttatggaaatgttatacctcttttggaaagtgaaaagatattgaagaaatcagttatgaaaattgttacaaattctttggagccaggagagccaaaggattcatcagattgtactatttttagcttgtttaaaaattttgttgatgattcagagatgaaatcaatacaaaaagcgtatgacgagggcatagcttggggtgaggccaaagaaatgctatttaattcaatcaatgacgaacttgaacctatacgattaaaatttgaagaactcaaagaggacaatgattatattaatgatttattgagtgacggtgctaaaaaagcaagagacattgcaaaagacaaaatttttcaaatcaaagaagctattggcataactaaaatatcttaat

SEQ ID NO: 301203 - DNA, 1003 bp, Unknown
  Bacterial polypeptide expressing nucleotide sequence isolated from the Sargasso Sea
atgtcaaaaaaaatcttttctggagtacagccaaccggtaacttacatttaggaaattatttaggcgctataaaaaattttgtaaatttacagaaagataagcaaaataattgtatatattgtgttgtagacttgcatgccataactgttaaacaagatcctaaagttttaaaaaaaaatattagagaaacaaccgcaacatttgtggctagtggattaaatccaaaagaaagtattatatttaatcagtcaatggtaccttcacattccgaaggagcttggttattaggatgcattgctagaatgggttggttaaatagaatgacccaatttaaagaaaaagctggcaaggataaagagaaagcaagtgttggtctttacatttatccaatacttatggcttcggatattcttttgtatgatactacgcatgtgcctgttggagaggatcaaaaacaacatttagaacttactagagacatagctcaaaaatttaatcttgattttgattgcaaggatttcttaaccgcgccagagcctttaatacaaaaaaatttttcaagaattatgagcttaaaagatggaacaaaaaaaatgagtaaatctgatccctctgatcaaagtcgaattaatatgactgatgataaagatcttatagtaagtaagattaaaaaagcaaaaactgatagcgcaaagttaccagaaaacgacaaagatataaataataggcctgaattaaaaaatctttatggaattttttcaagcattcaaaatcaaactttggacttgacgatagacgaatttaaaggaaaaaatttctcagattttaaaaataaattagcagaagttttagttgaaaaaatttatccaatttcgaatgaaacaaataaactattaaaagatgaaaaatttattgatcaaatattactagatggatcggaaaaagcagaagtaattgctaaaaaaaaggttaatgatataaaaaatataataggtttttaaa

SEQ ID NO: 301204 - DNA, 973 bp, Unknown
  Bacterial polypeptide expressing nucleotide sequence isolated from the Sargasso Sea
tatgaaaactgttttttcaggaattcaacccactggtaaagtgcatttaggaaacttattaggcgctataaataattgggtacatttatcaaatgaggaaaataaaaactatttttgtgttgtcgatcttcattctttaactacacatccagacccttcattaatgcaagaaaatattaatgaaactataaaagtccttatttcttcaggaattaatcaaaaaaattctaacatttacatccaaagtaatgttcctgagcatgtacaactttcttggatcctatcaaacttttgccaaattggagagctgcaacgaatgacgcaatttaaagaaaaagcagatcaattgggtagccacgctggaatacttacatatcctgtgttgatggctgctgatatattaatccacaaagctaatgaagtacctgttggagacgatcaaactcagcatttagaactaactagaaacattgttgaaagatttaataattcttacggtgaaatttttccgttacctgaaagaacaactggcaaagtaggagctcgattgatgtctttacgccacccagataacaaaatgtcaaaaagcaaagatgatttaaatggaacaatatattttgatgattcaaaagatgagattattaagaagttcaagtcttcagttactgactctgaaaatgaaataaaatttgataacgaaaccaaaaaaggtattagcaacttaattgatatttattcaacactacatgaacttactcatgcagatgttgaaaataaatttaaaaattcgtcttatggtgaatttaagattgaggttggagaaagcgtagtaagttatttagagccaattaaagaaagatatgactcattaagtgaaggagatgttgcctctttgattaaagataatcttgatgatgttaaaaattctgcaaaaaaaacaatggatgaagtaagcgcagttgttggagtttag

SEQ ID NO: 301205 - DNA, 859 bp, Unknown
  Bacterial polypeptide expressing nucleotide sequence isolated from the Sargasso Sea
gttttgcaagaccctaaagttttagcaaataaaacacgagaagtaactgcagcttttattgcctctggtattgatccaaaaaaaaataatatttttgttcaatcacaagttcctcaacatgcacaacttggatggttgtttaattgtgttgcgaggatgggatggttaaaccgcatgacacaatttaaagataaggccggaaagaatagtgagaatgtttctgttggtttattttcatatccaacattaatggcagcagatatattaatttatttagcaacacacgttcctgtaggtgatgatcaaaaacaacatttagagttaacaagagatattgcacaaaaatttaataatgattttaagacagatttttttcctattcctgaaccattaattttaggagaggctacaagagtgatgagtctccgcgatgggtcaaaaaaaatgagtaaatcagatccttctgattattccagaatcatgttaactgatacagcagaaaatattacacaaaagattaaaaaagctaaaacagatcctgaaccattaccacaagataaaactggtttagaaaaaagaccagaagctgaaaacctaatctcgatttttgcttctttacaagacacatctattgagagtgttataaaagattatgcagggaaagaattttccacctttaaaaaagatttagccgatttatctgtatctaaattagagcccattacgagtgaaatgaataaactcatgagtgatgtttcttacatcgattctattttaaatcagggtaaagagaatgctatagcagtagcagaacctgttttgcaaaaaactaaagaaattattggttttttgtcctaaa

SEQ ID NO: 301206 - DNA, 1003 bp, Unknown
  Bacterial polypeptide expressing nucleotide sequence isolated from the Sargasso Sea
atgggtaaaaaaattttctctggtgtccagccaacaggtaatcttcatttaggaaattatttaggcgctataaaaaactttgtagatttaaataatgataacaagaacgaatgcattttttgtgttgttgatctacatgccattacagtaaagcaagatcctaaagaattaaaaaataacattagagaaactgttgcaacttttatagcaagtggaatagatcccaaaaaaaatataatttttaatcaatctagagtggctgctcacgcagaaggagcatggatattaagctgtgttgctagaatgggctggttaaatagaatgacccaatttaaagagaaagctggaaaagataaggagaaagctagtattggattatactcttatccagttctaatggcggccgatattcttctatacgatgctactcatgttcctgtgggtgatgatcaaaaacaacatttagaattatgtagagatatagctcaaaaatttaataatgattttgatgtagaaaattttttacaagttccagaacctttgattcaaaaagaattttctagaataatgagtcttaaagatggatcaaaaaaaatgagtaagtcagatctatctgatttaagtagaataaatttaactgacgataaagatcaaataattaataaaattaaaaaagcaaaaacagatcccctgtcaatgccctcaagcactaaagagttggaagaaagattagaagcaaaaaatcttataggtatttatgcaagtctcacaaattctagtatagaaaaatctgtacaaaattttgcaggtaaaaatttttcagaatttaaagaaaatttatcagaagtattggtagataaaattgaacctatatctaaagaaataaaaaaattattagaagataaaatatatttagaacaaattcttctagaaggagttgaaaaagctaatttgatagcttcaaaaaagattgataaaatgaaagaaatagtaggtttttaat

SEQ ID NO: 301207 - DNA, 1021 bp, Unknown
  Bacterial polypeptide expressing nucleotide sequence isolated from the Sargasso Sea
atgaataaaaaaaataaagaaagagtattttctggagtacagcctacaggatctcttcatattgggaattatcttggagcaattagaaattttgtaaatgttcaaaatgattatgactcaattttttgtattgtagatcttcatgccataacggtttggcaagaccctaaaattctaagtgagaatatatatgaagtagcagcagcctatatagcgtctggaattgatccaagtaaagcgacaatttttgttcaatcccaaataccagctcatgccgaattagcatggattttgaactgtgtctcaaggatcggttggcttaatagaatgacacaatttaaagagaaagctggcaaaaatagagaaaaagtttccgtaggattatatgtttatccaaatcttatggcttcagacatccttttatatcacgcaaatttagttcccgtgggagatgaccaaaagcaacatttagaaatcacaagagatatagctcagaaatttaacaatgatttttgtaaaagtaataaagttggattttttccaataccagaacccatgattttgccagtggcatcaagagtaatgtctttacgtgatggctcaaaaaaaatgtctaagtcagatacatctgagatgacaagaatagaatttgctgatgataatgatcttataatgaagaaaattatgaaagcgaaaactgacccattgcctatgccagtaactattgaagaacttgatgaaagaccggaaataaataatttaataaatatatatggagctttttcaggaaagaaaatcgaaaatataataatagattttgagggaaagcaattatctgattttaagaaagaactatgtgaggctgtgacagatgaaattgcgccaattagagataaatttttagaattgaaagatgataagacatatttaaaggaaatacttcataatgggatgattaaagctagagaaaaatctgatcctattattgaagaagtaaaatctatagtcggattaggatgat

SEQ ID NO: 301208 - DNA, 1012 bp, Unknown
  Bacterial polypeptide expressing nucleotide sequence isolated from the Sargasso Sea
tatgaataaaaaaagggtattttcaggtgttcagccaacaggtaatttacatttaggaaattatttgggggcaattaaaaattttgtaaatttacaggataggtttgaatgtgtttattgtattgtagatttgcatgcaataactaatcgtcaagatcctaaagaattaaaatctaatatttatgaaacagtagctagctttattgcttcaggattaaatcccgaaaaaaatattatttttaatcaggcaagtgtatcagctcacagtgaattagcctgggtgtttaattgtgttgcaagaataggttggatgaacagaatgacacagttcaaagaaaaagctggctcaaacaaagaaaacgcgagcgtaggacttttggtttatcctaatttaatggcagcggatatacttatttataaagctacccatgtcccagtaggtgaagatcaaaaacaacacttagaattaacaagagatattgcaaaaaaatttaataatgactttaattgtaaagactattttccgatagtggagccattaataccaaaagaaatttctagagtaatgagcttaagagatggaaaaaaaaagatgagtaaatcagaaagttcagatcaaagcagaattaatttaaaagatgacaaagatttaattgatcaaaaaataaaaaaagctaaaacagataacgatgcaattccctcagaaataggcgggcttaaaaacagacctgaagctacaaacctcctatcaatttatgcaagtataaataatgttgatctatctgaagttctaaaagaatttgcaaataaaaatttttcaacttttaagagtaatttaagtgaatcactagttgaaaagatttgtcccatcggaaatgaaataaaaaaactgttaaaagataagaataacctaaataagattttaataaatggcgcaaaaagagcggatttaatagcaaatcgcaatttaaaagaaatttatgaaataatcggccttactaagttcacttga

SEQ ID NO: 301209 - DNA, 717 bp, Unknown
  Bacterial polypeptide expressing nucleotide sequence isolated from the Sargasso Sea
tatgagcagtttccaaaaaagagttttttctggtgttcaaccaacaggaaccctgcatttaggtaactatcttggtgcgataaaaaactttgtagagcttcaaaaagaatttgaatgtatttattgtgttgtagatcaacacgctattactgttgagcaaaatccagctgagcttcgctcaaacacacttgaggttctagcatcatttattgcagcaggagtggactataaaaaacaaattatatttcaacaatcaagtgtagcagaacactctcaacttgcttgggtatttaattgtgtcagtcgtattggttggcttaatagaatgacacaatttaaagataaagctggaaagaataaagaaaacgtaagtgttggcttaatggtttacccaaacttaatggctgcagatattcttgcttaccttgcaacgcatgttcccgtgggtgatgatcaaaaacaacatttagaattatcaagagacattgcacaaaaatttaataatgattttaaagtagacttctttccgctgccagaaccacttatttatggaaatgcgacaagagtaatgagccttcgagatggaactaaaaagatgtcaaaatctgatgcatctgaattttctagaatcttattaactgatagtgatgatgatgtaagttctaaaataaaaaaggcaaagtctgactcagaccttattcctgatgacaagaatca

SEQ ID NO: 301210 - DNA, 829 bp, Unknown
  Bacterial polypeptide expressing nucleotide sequence isolated from the Sargasso Sea
aaataatgttagagagacaatagctgcatttgtagcaagtggactggattataacaaaagtataatttttcagcagtcaatggttccagcgcactcagaaggtgcttggatcttaggttgttcagcaagaatgggttggcttaatagaatgacacaatttaaagaaaaggcaggaaaggataaagaaaaggctagtgttggtctgtatgtttatccagtgttaatggcttcagacattttactttatgacacaacgcatgtgccagtgggagaagatcaaaaacaacatttagaattaacaagagatattgctcaaaaatttaatcaagattttaattctccaagtttttttaaattaccagagccaatgatacaaaaaaatttttcaagaatcatgagtttaaaagatggtgtaaaaaaaatgagcaagtcagacccatctgaaatgagtagaattaatttaaatgactctaaagatactatagtaaacaaaatcaagaaagcaaaaacagatacattacctttaccaggcaatgaaaaagaattagagaatagaccagaagcaaaaaatcttattggaatttattcgtctttaagtaatcagaatgtaagcaaaaccatggaagaattttcaggaaaaaatttttcagattttaaaaacaaactttcagagatagtaatagaaaaaatttatcctatatctaaagaaatgaataaattaaaaaaagaccaaaattttacagacaaaattttaaaagagggaacacacaaagcctctgaaattgcatcaaaaaaaataaaagatataaaaaatataattggtttctag

SEQ ID NO: 301211 - DNA, 1012 bp, Unknown
  Bacterial polypeptide expressing nucleotide sequence isolated from the Sargasso Sea
tatgcataaaaaaagggtattttcaggagttcaacctacaggaaatttacatttaggaaattatctaggagcaataaaaaattttgttgatttacaaaataaatttgaatgtatttattgcatagttgacctacacgcaattactaaccgtcaagatcctaaagaattaaaatctaatattttagagactaccgctagctttattgcgtctggcttaaattctgaaaaaaatatcatatttaatcaagctagtgtagctgcacatagtgaattagcatggatattcaattgtgttgctagaattgggtggatgaatcgaatgactcaatttaaggaaaaagcaggtgttaataaagaaaatgctagtttaggtctattggtttatcctagtttgatggcagctgatatacttatatataaagctactcatgttcctgtaggcgaagatcaaaaacaacatttagaattaacgagagatattgcaaaaaaatttaacaatgattttaaatgtgataattattttccaatagtagaaccattgattcctaaagaattttcaagggtaatgagcttgagagatggaatgaaaaaaatgagtaaatcagaagattctgaccaaagtagaataaatttaaaagatgataaagatttaattgatcagaaaattaaaaaagctaaaactgataatgatcctattccatcggaaataaatggtttaaaaaatagacatgaagctgcaaatttaatatcgatttatgcgagcataaatcaaattgaagtggataaagttttaaaagaatttggtggtaagaatttttctacttttaagagtaaattaagcgaatcgcttattgagcgaatttgcccaataggcaatgaaataaaaaaattattaaaagataaaaatcatctcaaacaaattttagaaaaaggttcaaaaaaggcggaaataatagcccaaagtaatcttagagaaatatatgaggtaattggtctaacaaagttcacttga

SEQ ID NO: 301212 - DNA, 805 bp, Unknown
  Bacterial polypeptide expressing nucleotide sequence isolated from the Sargasso Sea
gctgtcagcaggacttaatcctgataacacctatttttacagacaatcagatattcctgaaataagtgagctagcatggattttgggttgcgttacttcaaaaggcctaataaaccggtcgcatgcgtataaagcagctgttgatcagaataaatctaataatttagatgatgataaagcaatcaccatgggcttattttcttatccggtattgatggcagcagatatattaatttttaatgcaacacatgtcccagttggaagtgatcaaattcagcaccttgaaatgaccagagatatcgcaggtagattcaatcatatttataaaaatgatctctttaatctcccagaggctattacaaatgatgatgcaaagacaataccgggtcttgatggaagaaaaatgagcaagtcgtacaacaatgtcatacctttcttatgtacagagaaagagcttcaaaaaggtgtgatgcgtatcgttactaattcacttgagcctggtgttaaaaaagacacaaaagactgtaatttatttacgatttattcatcatttgcttcaaatgatcagattaatgccttaaagaaactttatgctgatggggtgggttggggtgaagctaaaaaattagtatttaatgacctaaatgcaatcatagaaccagtgagggatcgttattttgacttgttacaaaaacctgattatttaaatgacgttcttgatcacggctcttcaaaagtgactccaatagctaaagaacttttagagaaggttagagatctagtcggcatcaaaaaaatcagttaa
